United States Patent Application Publication US 2008/0114160 A1 - sequence listing, part 42

SEQ ID NO: 10099 - DNA, 114267 bp, Oryza sativa
cacgtggctatcgtgtacttgttttggaaactaacaaaattgttgagacttgcgaagttacttttgatgaggctagtccaagtactagaccagaaattgcaggtacgttatcactggtttagggggaggatggtcgtatttttgaagacgggagcgacgacgatgacgaggttggctcgtccggtcagaccgggcgccaagccagttagaccgccggcacacctccagtcagactggctcaggacgagcggttagaccggccagggtcattggcatcaggttctgttgacgctgatcgagatggtcctctagaggctacaactttgactagtgagggtacataacgtgaaacaacttcagaagtcgctcctccttagcatattcaacgacgacatccaccggaacaaatcattggtaatctaggtgagcggactacaaggtctaaggtaacgactcatgatatttgtgcaagttctgcatttgttgcttcttttgaactcaaagatgttactcatgcattaactgatgaatcgtggattaacgccatgcatgaagaacttgaaaattttgagagaaaaaaagtttggactttagttgaaccaccttctggacataataaacaagtgggttttaaaaaataaaaaaaatgaggatggtttgattgtgagaaataaagctagacttgttgctaaatgttttacccaggtggagggtttggattttggtgaatcttttgctcctgttgctagaattgaggcaattagacttttgttggcttttgctgctttaaaaggctttaaattgtatcaaatggatgtgaaaagtgcttttctaaatggttttatacaggaggaagtttatgtcaatcaaccaccaggtttcgaaaatcctgattttcccaaccatgtttttaagttgtctaaatctttgtatggcttgaaacaagcacctagataggtttaagaactttttgcttgcgaaaggttttcaaatgggaaaggttgacaaaacactttttgtttttaagcatggtgataatcaactgtttgttcagatttatgtgaatgatatcatctttggttgtccaactcacgctttggttgtggagtttggtgagactatgcgcagggaattggagatgagcatgatgggtgagttatcgtactttttgggattgcaaattaagcaaacacctcaaggtacatttctgtatcaaaccgagaataccgatctctttcacatggtgacatagaagatgcgtcattatattgaagaatgacggtggaaatatcaactcaaagctgacaaggcattgcaccacgtccccctgaagggctgctaaactgtctggattgatgatcttctacgaaattgcgttcatgaaagcacatagctttgttattgttgcctggacattatcaggaaggataccacaaattataacggaaagcaattgtgtcatcaacatgtggtagtcatgagacttttggtttgtgaacttcttttccttcatgcttatcattcactttatattcgaggagtatctagacggtaccttgatgctctacaggcattgaaacatactttccttcttttccttgctcagggtgtagctcgctggactaaagtaatggcttcctttcaccttcggttttggatgaaggccctcgagttgttccatatgtttgagatcattacatgctttgagtgtatctttggactacccatatacatctaagaagcccagcaggttgacgcaaaggttcttagtgaggtgcatcacgtcgattgcgcggagaacgtccaagccttcctaatagggtaattcccagaaaatagagttcttcttccacatcgccacgtgaccatcttcgctttctataggttggctgttaggcccctttctaaatataactttcagatctttcaccatagcgaacacggctttttcgttgcgatgtttaggcttagtacggtggtttgccttctattcgaagtgcttgcctttcttccatacaaggtggtttgcaacaaggaatcaatgatggcccatgtacacaaccttcctgcaatgcttcagttacgtacttttagtttcatccatatagtgagtgcaagccttgtatcccttgtttgaccgtccatataggttactaagtgcaggccaacagttaatggcaacgaacagcaacgctcgtagattacattgctcctgtttatcctcatcccacacagggatgccttctttcctccacagcacttttagatctccaaccaatggttttaggtacacatcaatgtcgttaccaggttgcttcgggccttgaataatgatcggcatcaagatgtgcttccgcttcatgcatagccaaggaggaggttgtagatgcacatggtgacagaccacgtgctatggccgctgctcatctctccaaatggatccattccatccatacttaaactgaaccttacattcggtgcatactctccgaagtctttaaatgctctgtcgatatttcgtcactgcgacccgtcagcggggtgtctcagcatcctgtcttgttgaagttcttctgcgtgccaccacatcattctagcatgcgatttgttcctgaaataaatgtttcagccgtggtattatagggaaataccacatcaccttagcatgaactctcttcttcaaaggttgtccgtcaacatcacctggattatctcgtctaatcttgtattgtagtgctttgcaaaacgggcatgcttctaggtttcgtactcctcaccgcgatagaggatacaatcgttcggacatgcgtatatcttctgtacttctagtcatagagggcagactgctttcttagcttcgtacgttgtttcgtgcaattcattcccctctagaagaatgttctttacgagttacaataactcgccaaatgccttgtcactcacaccatttttggccttccattgcaagaactccaacgtggtactcaactttttgtggccctgttcgcaacctgggtacaacgatgttttgtagcccgctaacatgcgctctagtttctgcacctccttttcattcgcagtcctcctttacgtcccgcaacatctgaccaagatcatctacaccgtcattatcttcaacagccccgtccgcctcgcccgttgtgttttcttcaaatccaccgtactaagcccagtctagaatgttatcgtcttctactttatcttcttccactgcaacccctagctctccgtgcgaggtccaacaattatagctacgcatgaacccccactgaaacaggtgggcatgaatagttcatactatggaatactccttctagtttttgcacttgtcgcatgaacaagacataaaaccgttatgcttgttagtattggccacattcaaaaaataatgcacgccgttaataaactgtttcgaccgcctgtctgcgtacatccattgctgatccatcaacctgaaatgcatataaatcgtaaaaataaaatctacaaaagtaaactaaataaataatcatacaataatttaaaacatcatccttaaactcaaaaccgacgttacatattttaaatgaatttgggatgacatggaagaaggcgcctatcgcaagagcgacaaagatggcgccgagacggaagactatattgtacttatttctaactattctaacgatttttaaattaacttaggtttgtattctttcatcttaattttctatattagttttttcctttgtcatttttaatttaatgtacttatttatagctatttaactatttttcaattaacttagtttcccattcttttatacaaataatcataaaataattatacaaaaatcgcacatattattcattttttcattatttttaaatttctaaccataccttcaatgtattgtacttttctctaaccatttattaaattaactaagtttttactattattttaacttagttttcctcggccttttcctttgccatctcttttacaacatatttatccacattcttttaacctaattttccctcaacaaatttttctctctcatcattttccaccataaaccttgttggagactatattgtataccaacaaagctataaatgtaatatgctaagcatacatcattagtgtcacgcccggaatttctatccaaaattccaaacacttatatgtgcgtttaaccctcgtccaagaatcagccgaggcacacaataacaaattgataatagagtactatcaaacagctaattaatattcgcaaaataaattattacagaggtggatagttcctctcatagaataaaattctaagcggcggaaaataaaacaaagactgaacagctatggtgactccactccacaagcaacttgacctgaacaacgcctaatcctccagatcatcaccttcattgatatactcctcctctgatgaatgaatattgcaagaatgagcatatgacatactcaacaagccacacagcaaatatgcaagtgcacaggataacaaagaatggcataggaaagctcatttgcataaacagcatttaataaacattttaaagaataataaaacagttgaataattaatcagtattaaataaacactatacaacacacccgtgttgcataggcccaacctcatctgaacaaccaaccccggttgtacaaatcaaatctccataccaggaatataccattccaaaccaggagtcaaattaattaacacaatattatcattaatgagaagtgtgagactaatcacgaaaaacattgttaaactcacccataaccgcgggcacgactattcgaatagttttactctgatcagagatgtaccactgtacccacaagacacaactccacaacatgtcaccatgcgcctcagtaccaccacagtaccttggaaaggaactgtgacaatacctctcacacaacacaactcaccacagtgcaccgttcctggatcataatctccccctcaaaaccagaggcaatggactccccagcgacccccacggacttctcgccgcttcacagtctggcaccccatagtgaatcatgctatacaaaaggtaaagctgttgcccacgctggcttgtggttggcacggtaaatgtttcacaacagtagctcgcgaaccggtccttaattgtcatgagcacgaccttcaaaaccatgtactcacaacccacctttaatcaggtttatgtgttaattaattaacataacatgattaaccatcatgagctaccattaaataaccataaataataatgtaatttgattaatcccattaatgagctaatgtttctaagcatggctaagcaattatacctatatatagcctttagctgaaccaaaccaatatataagctccaagctaattcaatttattacccataggaaaataaattcatcattggccattaattaatagggaaaagctcaccacccgatgatattcgaaaataatgcataagttgaaataaaacattagctttaaatagcttcaacatgctcaaagggttgtttgggatctttgtgacttgccttgagcttcttcaaacgcttccgatccttcctcaacaaaaacgctctcctccggaacgtcggaaactaaagcaaataaacaaaatcaacaaaacagtacaaaaacaagcataaacagtacatgtggatatttttaacatgtagatcttgattttagatgaatttagcaacttgaaccacccgaatcggagttacgacgatttagttatgaatttccgaagttttaatcgattttcatctaatccagaaaattattacgaattaaataaaagatttatgacgtcacgatgacgtcatcgccgacctagcactggacgacgcggccaccggcgatagagagctcggccgggctcaccgaggacaccaacgcgaagaggacgacgtcacgaactcaccggtgcgaaaaacaacgacggacgacgacgaacgacggccagcgatgaggttcgacggcggctcggctcggttccccgacggcaacggcgctccggtggtcttcggcggctgcgaagggatggccggggttctcctcctccgtgcgcacccgacggtggcgacgggaggcggcggcgacggctaaagcggcggcgtggcgcgactggagaggcggcggcggctagggcaacgcggtggcgatgctacggacgacgagggagcttgggacttgaggcaaacggaagaggacgactaggggatgctatttataggcggtgattagagagatcggactccaaacgagaggaatcgagctgggaaaatctaaagttagtttggagagataaactcaaaacgaactcgatttggtttatccgggcaaaattgattctcgaaaccttaggggaaaggaagaggataaggaggagatgctttcccctcaaacaatcggactcggggcgaccggatagggcgaatttggaggagggaggcggcgctcgggctcggccggctcggctggaggttgaagacaacctcgacatgtgggccccacatgtcggtggccgggaggaggagggtggggcggctcggcttgcgcgaggagagagggatgttgggccgaaaaccggcccaacggcttaggggaggatttttaaaactttttcaattaaaataattcgtgaaatgatgtttcatttattaaaaatacttcccttgctcaaataattcctagaaaaatctaaaaaatagataaacaagcaaagtatttaataaaattttatctagctcaattttatgttgaaatttttcatagattattagagtttaacttgtaagcttttaaattaatttctaaaaatgatttaaaagatgaattattaaattaggcgattttcaggacgtgacaattagagaatggagttgctaaccttatcgatcccttcaatttgtatattatcaccaaaaccatttcaccaaaaattttggtagcacctccgtccctcacacctccaatttgcatcaatgacttgggctggaggaggaagaagtataaaaaggtgggtaactttagtcccacttgaccgagactaaagatcaccactttagatctttagtccggattggtgttaacaaccaagactaaagatccccggccctctgacaggaccctaacaggccctgtcaggaggcgaaccgggcggttagtcccgttggagttattaaccgggactaaaaaagtagttttagtcttttttttggaaccttgctattgtggttttcaaccgatccagcaaagatcagttctccggtatcatagtaacactagtacagatcctttcatctgtgacggcccataacaagactggaatttgcgggccgtcacaaggaagtaatctcaatcgggccggaggccgacagcaaagcaattcatgaacccccaccgatgaagaagagcaggaaggcacactcttcccctcagagaattactctcgataaacccgaagcaaaggggagaggaaggggagaaaaggtgcaggcctcgcttctagctccgaggaagctagatctgggcaagggccaggaagagactaagggcaaagaggtcaagaagaaatacgtcgctccacaggagttccaactaggcatgccattggttggagatgacgtgcttgccgcaatgggcaccgcttgcaaggaccttcacttatactacatggagaaatctaacgtcaggaagccgaataaagctaccgatatccttggagagcacgatggaaagccattccttggttcaacaaattatatcatggtctactttaaggatcttttcgaccactacaggctccgagcggtggacacaagcctccttaagtgctacttcttgtaagtactgtagcccaactcaatctggtaataacaatcggtttaacttgcttacaagatcatttatcctgtgtgtaggtaaagttggcaatggtgtcagaagcatgcaccggaagttgccttccttgatccacaagtggtcactgtcacaaatctccagaatgaccgtcaaggaatggtcaactacatctacgacaccttgtggtcccgccgagacaaggagtacattatgtgcgcctataatcaatagtaagtgtgttaactaaatatacacaacagcatgacacattccttaagtacttaatcaactttcactatattaatgccgcagtgcccattggatccttctggtcataacacctaagtggagtacatgtcaccacctgaactccagaattgataagaacgcatttgattggaccccaattcaactagcgatagatgaagcgtgggcccaatatgtgcaaagaggaggcctcaggaagacaggacatgacaccctcatccacaaaaaaagacttcccggtaaagtaacaaataggtgaccagtgcggattccatgtgtgccacaacatgcgccttctgtatagagaaaaggtgaagactttggctgagtttgaggtcggtggtctcaattgtgatagactaactacattttagtacttatatatgatcgatcaactaatctggaattatgacaatatagggcacaataaccaagtctctgcctaccagctttgaggaggttcgcgaggagatagccagcttcatcctccgcgaaataattaaccccaaaggaatgtttaggcttaaactaaaatgatgaacaatgttgaacttttatgtttaggcaatgatgaacacttattatgcaactgtgatgatgtaactgtgatgtttatatttatgtatatatttcatatgtttatgttaagacttgctaaataaatatttgatccaactaacttggttttgcaggtgaaatatgataaatatttgaatggatgtgaaatatgtgaatggatgtgaaatatgagatggctgtgaatgtgtggttgtgtgaaatatgttgatgtttgtgtatgtgaatgcatatgtatatgaatgggtgatgctggagagctggggatattagatatctgtgtttgtttttgtcatttttgtagccggcatggctagcaaagaagacctgaggctagccaaaaaaaaaaatttattttttttggattatagtcatctgtgacgggccataactaaatgcccgattgagatgacggtcatctgtgacgggctttagtttaggcccgattgaggtcaggagtcatctgtgacgggctctagtttaggcccgattgaggtcagtaatcatctgtgacgggctctattttaggcccgattgaggtcagcagtcatctgtgacgggctctagtttaggcccgattgagatgagtatcatctgtgacgggctctagtttaggcccgataaaggttagtagtcatctgtgacgggcgctagttgtggcccgattgagataggtcatctgtaacgggctatagtttgactgggcgtctgggtcaaagctatcggtgacgggctttacttagggcccgattgagatagattcatccgtaacggccgtttgcccgattgggataacttttcacatcagtgacttctagcctgtgacggacgctgtgcccgattgagatggggcttaccgcccgattgagatgagggtatccgttctagtgtaacgatattcatgtacgttgcataattttttgatagttgtcgacattttaaatagaaatgcgtagggaccaaattatgccacgtaatatacagtagagccgcagatgatttgaaaagtcggaatgaagttctctacgtacgctaggcggccggcttgccgagttgctcgcacgcgcgaagaccttgacctaatcctactcgcggggaagacttatactagtccaagtatgacttaattatgagttattatatttcatgactggcatatgtgtatcatatcgcacgtaactttaatttagacatcaagcacgggctactgtcgatctacatctctcaaagggaatacaccatatatatatacaagactcgagatcactcgaagatagtgcagttgttgcagcattcgctgataaaggctaactcgaacagcacaaatgagtagtgaaacatcgcccgtgccatctccccgcgggataactagagctcttctatggcttgctgtggcaacggtggcatgcctgcccgccgttgcatcttcctgccgtagaagttgcggcgacgtagcgatcccttatccgttcgggatgaaagacgatcagccaggctgcgccattcctggctttgaggtgagctgcaaacgggacggcctgctgctcaagccgtttctctcggatgacgtggaggtgcgcggcatcttgctagcagaatctcaggttcggataaagatggatatatcctggtcgtgctataacacgattaacagaacaatggactccataaattggtttctgtccttcagggatacaccatacagattatctgatactggcaacaagttcacggtcatcggatgccgaacacttgcttacatcaccatcacaaagccgcaacagctggaaagcagtagtttaaccaccggatgcgtggccacatgtaatagccagggcgaccttgcaagtctctccgatggaacctgctctgggataggctgctgtcagaccaccatcccaaaggggcttcagaactatgggatctggttcgatgaccgctttaacacagcgaagatctataacatgagccgttgcagctacgcagcactcgtggaagcatcaaacttcaccttttccacgagctatgcgatgtcatcagcgttcaatgacacatacgccgggcaggcgccgttgcttctggattgggccattgggaaccaaacgtgcgaggcagcgcggcggaatcccaatcccgatcccaaatacgcgtgcatcagtaacaacagtgactgtttcaactcgtctaatggaccaggctatatctgcaaatgcaaggaaggatttcatggaaatccttacctggatgatccagagcttggatgcaaaggtacgaaatgaacgatttctctgtgttgaccgtatcagtatatgccgcgtcaaccccttgcctacttaatttatataggatgctccttattctaacttcagtcttctgctttcctattatcagtctgtctgatattttcttatccgtcattcaagctaacttgcacaagacatttactacagttacatatacaagccatttgctaaacttgcacagttgaaaaactgcaaattcggtaaaaatgaagtgcgactttagtttggtttctttctagatgaattattatacttgtataaatcattatttctagctagtttccattctgctaaggagttagacgaaagcataatactttaccttttaggttacaacattaatatttgcttcaccacagggagaaaaatataaaggtactgatgtagtgtttgaaagtgattgatagacaagaataaacttagtcacgttacaaataagataggtccttttagcttttgtaatcatatttgcacgtgctcagatagcctcatcttttcgcgtatgcttattagccaaaatttaaattttcaaccttaaatttgaagttgattttggggtttttttcatcgaaatttatttttcagccattgtttttagaccgctaagaacacgtatatgaaagttttatttataaattatttttcgtttgcaaaatatgccgtttcgcttattccctcatatttttaaacatgtatttggttgcagatatcaacgagtgcactgattggtcgaagtacccgtgtgctgtgcctggaacttgcgttaacactcccggtgcattcaagtgcgtgtgccctccgggttatccgaaaggcaacgcccaaaatgggacatgcgagagagatcaactaccactcagttctggggcaaaaatcgctattggtactatcatgcttccgtctcatgctacatgtttggactgtttattttatttcccgtacataacgagtagtaatattgttcatttttttttcgcgagcatataatagcattcattctttatagtgtcttcaattcacgctactacatcttcggagtcactatgagataaagtatttttgaaggcggacaaaacatgttttcacaagcgaccgactagcaatgccgcctgtaccacagtcccgcctgtaccacaatccctgtagaaatcatgattttcctaggcaggcaactggtccaccagcgaagagattttgcagtgaagagattttgctcagcgtttctagcccttactcgaacatcgttctacctttcgctgattgttccatgtaccattgatggaatcggtacatttgcgtggagagattctgcacctgatcaggcttgacgagaggtttacccagcttaaattggtatttcacctcagccactgggatctctgcgtcgttggactccctcaactggtccaaggatagaccggtttctttcatgaatagtttgatctgtcgttttttaggtgtaagaaacgcgtcaccgggatccagctcgggctgtggttgatctccaagctgagggacttctttggactgtcttttggacttttcgtcagccttcttcactgttcgcttgtagtccttcagccctacctttgcctcgaccggtgctatcatcaacacgtgacagtcatgagactctagattcgtgaacttcttatcattcctgcttattattctctttatattagaggagtacccagacggtaccttgatgctctccaagcattcaaatatactttccttctctgccttgctaagagtgtagctggctgggcttaagtactggctttctttctcctttggttccgggtggaggtcctcacgttgtttcatatctttgagatcattgcgtgcttcaagtgtatctttcgacttcccgtacacacctaggaagcccagcaagttgacgcagaggttcttggtgaggtgcatcacgtcgattgcgtggcggacgtccaagattttccaatagggtaactcccaaaaaatagacttcttcttccacatcgccgcgtgaccatcttcgctggctacgggttggctgccaggtcactttccaaacactactttcagatctttcaccatatcgaacacggttttaccgttgcgaaatatatgcttcttacggtggtccgccttctgatcaaaatgcttgcctttcttctggacaagatgggtcgcagcaagaaattgacgatggcccatgtagacaacctttttacaatgcttcaaatacatactttcagtttcttgcaaacagtgggtgcaagccttgtaccccttgtttgactgtctggataggttgctaagggcaggccaatcgttgatggttacgaacagcggcgcttataggttaaattcctcctgtttgtcctcatcccacacatggacgccttctttcttccacaacagttatagatcttcaaccagtggtcttaggtacacatcaatatcgttaccagattactttgggccttgaataataatcggcattatgatgtacttcctcttcatgcatagccaggagggaggttgtagatacacatcataagaggccaagtgctatggccgctgctcatctctccgaatggatttatccatccgtacttaaaccgaaccttacattccgtgcatcctttctaaagtctttaaacttttctatcgatgttttgtcactacgacccatcggcgaggtgtcttagcatcccgtcctgttgacgttcttttgcgtgccatcgcatcattcttgcatgctctttgttcctgaacaaacgtataagttgtggtattaggggaaaataccacatcaccttcgcaggaactcttttcttcgagggctgtccgtcaacttcacttggatcgtctcttctaatcttgtaccgtagtgcattatagaccgggcatgcttctaggttctcgtactcctcaccgcgatagaggatacaatcattcggacatgcgtgtatcttcttgtcacaccccaatctgataccgccgtacaacggcacctgacaggagcgtgtcgtagggaaaacggcgtgaaccgcttcctacgaaaccgcgatctcggtaccagtcccaggacatagtgctggtacccacggtgacaaaaatgaatcatagcaatccttaaaataaatagaggacttatttaccttagcttaggttgcagctcagacagcccgagaatacaaccgacgacacggacgaggcgaacaccaacaacggcagcagcagcggaaccaacggtctaacacccaacaccacaggcgacggctgggaaccaggacgaaaccctaatcttcacttcacctcatcttcaacttcagggcggagaaactatatatatttatatagagcaagggtgagtactttcgtactcagcaagtcacgggaacttaggtgtttaatgcaagcttggaagagaggcaaggttgttttacaaatcttttatttgaagacattttgaaatcactaagtgatttatttctttctaagtttggggcgaaaagagacttgcgtctcgattcgactttaagagatgcttttcaacagctcatttagtaatgtaccgacctcccgggtcagatcattacttctcggctcccagagccattccacttgattaatcggctcccagagcctttttcattttctcggactcccagagtccagctgcccagcagcacaacaatccgcttccactcgggaagcctagtctatgatgcccgcagacatcccaaatcacacagattcgtttctgaccactcaggttgtccatctgccacataggctgattcaggttacgattcccacacaacaacaacttttcacaaagcacaggcaaacaaatctacgcaacgggaaccacctcacatccgcccatgaccgtgggcacggctgtttgaacagttagttaacctctgcagaggggtacactttacccacaagatacgaacttattccgaacacccgtcgatatcggaggttcgcaacaaagcctttcccaagctgacccagggttacctcatgccacatagaaggatcaaatcctcacataaatataggccattttagttttcacaaatcaaactccaaccacctcgatcggtaatctggcaagcttcgcgttctggccttaccaggaacccgggttggctccaatcgaccccgccccggcgttccccaactattggcatgcgaggtttccctgaaccgactagttacttagctagggtgtcccattccaccttgtggttgcactttgattatgtttgatgagtttcccacaggaatcggtccttatatgcgaatacgggacagtgccacataggcacaacccccgcatcgcgagttttcacaattcattttattttcaaacacaccgacaccgcatgtcgggttttgaaggcttcacaaacccatttcccaagttttcgacaaacaacggtgtatgtgggatatttggtatacgcgctcagagagcacgaataccgaggtaccacaagggtggagcgacaaggaatcagggtagtacgacctacagaaattagtgcgactactgggtaggtccgtcggtttggcacgcaaaccgaggccaagcaagttaagtgtgtgattctaataatgcatgttgcaaacaaaataataatgacttttcaattataggggcaattgatcaaagggtgacttgccttgctcaaggtcttcatgaagcttcacgaatcttcgagaaaacccgcgatcgacgaaaatccgataaccgcaactatacgcaaacaatcgaaaacctaaacaaaggaccaaaagaaagatcctatttagactaattagtagtgccattaaatagatctcaattttacggaattactggaagttgaacggagtcaatcggatgagcggtttggaatatatggattttcgaagtttattggatttactaaccaaaggaaaaaggatttaataatttattaaaccctttttggaaagaaattgaaggagggatgggatttagacttctttgggcggctcgggctcgacccaagggtcatgcgcagcgcggtcaggccattgggccggcgcgggcgcgggtggtcggcccattaggggcgcggggagagagaggccgacgcgggtggacgcggtccaccgcgcgggacccacctggcggtggttgggttcacggtggggagggcgcgggctttataggcgaggaggagaggtcggtttggaggagggaaaccgacattggcggtcaagggagctcggctggtgttcacgggcggctgcggcggtttcgtgggcagcgcgaaggcagcgacggtgtggatgcgttgggcggcgaaggcggtggatcgaacggcggaaaatcgaaccgcgggagcgggaggattagcgcgggctggcgcagtcaaggtgggggcggcgagctggcgctggcatctgcgtctctgcctccaagcgctagcggccaaggagtggaggcgtggcgtcgttgcttgggagggaaaaagagaaaggaggacggtgggaagggggggctttaccatgccggtttgggaaaaaggaggtgggagagggagtgctctgcctctgggatttggatggacgcgggtggagcggcttgggcacgcgctgcagagcttgcggcaggcagcggggccgagcggcagcacgacgcaggcgctaacggcggcggcgaccgggcggttgcgcggcgcaggcgcggcagggctgacggcggcaacgaccggccggtcggccacgcgcaagcgcgggaaagagcgaaggcggtggcgggttttgggcggcgacggcgggaagcggcgtcggcgcgagagagagaaagagagagagagagagagagggagaaacagcgagagcgagagagacagagagagcgagcgacggctctctctctctcggctcgcatgcgtgcaacgcacgtgcgagggggggagatgatgggctgggaggggagatgggccgggggaggagaatcggtccatccaaaaacacagggtggtaaagtagacttttacagagaaaactgatttggatagaattggagagatttagggtttggattcgaattcaaatttgatattcaaactcgagggtttagggatgtatcaagggaaactcaaggagaagtcatggaaaagattcaaaaggaatacttgggtatttgttctcgggaacatagggtggagtcaaggaaaggattcgaggcgggatttgaataattctggattcgtagaagtatttggcgaggattcaaaggaaggatttgaatttcggaatttgattttggagacttaaattggaagaggaaatttcgatgaggatgattttgatggcgacgagagggatcaaggacggatttaaactgagatccacggcacgacttagactcgcacacaaagaacgaaaattttcgcaattaggattttgccgaattagtttttaacgcctcacgaaaagtggagcgttacagatccaccccccttacaagaatctcgaccccgagattcgacggtggaccacacacacgaaaccaaaaagggatcttcagacttcttcacagcttcagactctgctagtctttcttcaacttattgttgcatacttgccacaaaacggtctggtaacttgattcacttagcattcttcatcttactgtggctttgctcttgcctgtggaacctgttcttctcctgctccttcaacttgctcgagattcacaactttttcatttgtttctacttgcacatggttcagacgaccttgtccaacgggcggtgaggtcaacgaggcagaaccactatttggtggctttgaactttttggtccagatacgttaggaaggcttgttgttggttggactcgttttgacttgactttctgagggcagtaccatgaatagtgtcccatctcatggcagatgaaacattcgactcctgccttataaccacgtctttttgaaggtgtagggcatggtacggagttgcttcctttatggctattattgttgatcattgtggcttgctgaccaggttctgacatagtcgaacgagacgtagaaccggaaccatttgaatgctgagatgctttctgatagtattgtgctggcgagtttgtttttcgacacaaaccttcttttgcttgaatctctagggacattactttgcgtctcttgtattcttgcatctcttgttctgcatcttctagtaacaaggacttatcgaccatttgccgaaacgtcggaaagtcgtgagccaaaagtttcactcgcagtttcgcatccattccttttaaaaatcttctgatcttctttttatcagtgtctacacttctgaaccgccagtcctagagggcagactatcttcttagcttcgtatgttgtttctggcaacttgttttcctccggaagaatgttcttcactagtttcaataactcgccaaatgccttgtcactgacaccatttttggcattccattgcaagaattccagagttgtacctaactttttgtgcccctgttcgcaacctgggtacaacggcgtcttgtgatcagctaacatacactctaatttctgagcccccttttcacttttgcagtcctccttgacgtcctgcaacatttgaccaagatcatctgcagcatcgttatcttcaacagcaccttctacctcgcccgttgtatttccttcaaatccactgtactgagccagtccggaatgttctcgtcttctacttcatcatcttcatttgaaccccttgctccccgtgcgaggtccaaacattatatctcggcatgaaacccgtccgagacaagtgaatctgaatagttcttactacataatactccctctggtttttgtacttagtgcatggacaacggataaaaccattattctgctttttagcctcggccactcttagaaaataatgcacgccgtcaataaactctttcgaccgtcagtccgcgcgcatccattgccgatccacgaaagtcaaaccaattaaacatcatacaatagttacatataattaatcgtacaatcattataaaataataacaaaaaatattcatgttttcataccacattaaagttttaaacaaatattgaatgtgtcagggttacggataaggtataccctctatccttggatatacgttgtatactgatacggtatacccgcgcgtatacggatagttcctgtatacattaaggaaatctatcacgtgatagaaacagaatccacagatgcagggagtcctactcgaacaagactaggtcgttaccatatcgtgaggggtccgatattttcgagtcctacttggagatcaactgacccgcggtataaaagggaccacctgggcaggacctaacgcatcgaatctgaccgccgacacatccaccacagcctatgaagtcagagcctacaggagccaagtcgccgggagatctagtcggaccaactcgactacggtctcgccggtatcatcgagttctgttattccctttgtaatctgtagtttccatcatataatcccataccaactggatcagggctattacctaccaaggggtctgaaccagtataatgcttgtcttttgtttgcttgatgtcatactacatagatcctcgtaccagcgtaccccaataccctttatatccggtctactgtcacgcccggaatttctatccaaaattccaaacgcttacatgtgtgtgaaccctcgtccaggaatcagccgaggcacacaataacaaattgataatagagtacaattattactctaattaataagcgaatataatgtcattacagaggtagatagttcctctcaatcaataaagatctaagcagcggaaaattaagataaacggcgcagacggctccactccacaggcagcttgaccaaggctacacctaatcctccacaccatcagcatcattgtagaactcttcctctgatgaatgattgcaaggtgagtatatgacatactcagcaagccacgcagcaaatatgcaagtgcacaggataacaaagaatggcataatagggtttcatttgcaaaagcagcatttagcaaacatttgagaatttaataaaacagttaagtattaattaaacaatattaatccaacgctatacaacataccctgttgtataggcccaaccattctgaacaaccaacccggctgcacagttctatctctaaaccaggaatataccattccaaaccaggagctaatcaaattattaccaattatagcaccatttaatatggtgaaaagtgtgagactaatcacgaaagacattgttagacccgcctataaccgcgggcacctattcgaatagttttactctgatcagaggtgtaccactgtacccacaagacacagccccacatcatgtcaccatgtgcctcaataccaccacggtacctcggaaaggagttgtgacaataccccttgcataacacaatccattacagcgcacctttcctggatcataatcacccccttataaacaaggcatggactccccagcgacccccgtggacttatctccgccacttctcagtctggtgctccgcaatgaaccatgctatacaaaaggtaaagccgttgcccacgctggcttgtggttggcacggttaatgtttcacaaccgaaactcgtgaaccggtccttaattgtcatgagcacgaccatcaaaaccatgtgctcacaacccacaattatcaggttttagttggcacattaattaattaaccaatcacgattgaccatcgtgaactatcattaagccatcattaaataatagtgagtcataagttatcccaatagtgtgctaatgtttctaagcttgggtaagcaattatgtctaatatctagttgaaccagtaaatataaagctcaactagtcaagttttaataacccaaggtatcaaggaataaagtaatcaagaacaaaagggctatagcaaacaatagattaattccacccaatgacattcgaaaataaatgcattagttgaatagaaacaatagctttaaacgggatcaacatgctcaaagggttgtttgggatctgtgtgacttgccttgctggccttggaactcttcaaattcttcttctgcaaaaacggactctccggaaacgacggaatctaaacagaaagaagcaaaatcaccaaaacagcacataaacaagcatgaacagtacatgtggatatttttaacatgtagatctcaattttagaaaaacttagatacttgaaccaactaaatccgagctaagatgaattagttatgaatttttgaagattaaatcggattaaaacacttatattgattttaattgaattatgacgcaataatgaattatttttgaaaaggaaaaaaggatttattgcgtcagcggctagggtttcggtggaccgggcgcacggcggcggttcacacgaacggacggcagagatcgactcatccaaaacggacggccgagatcgatcggtctatgaccggctcacgggagagggcaacgatgacgtcggcgatgacgtcaccaccggcggcggcggctcggacggcgcacgctcgccggcgaacggcggcgcttcggcacgaacggaggacaccaacgggtagagcgcgacgcggcgaactcaccggtgaccaaaggagcggcggaagaccaacggacggcgacggtgacggcgacgaggttgaaacggcggcggagatcgggtcgacggcggcgacggtgctccggtgatcttcggcgacggcgaaggggcggacgaggacggcggcgacttggcgaccacgacggcggtcttcccgagcgatgacgatgaccggaacggcggcggcgcacgcctggagcgacggcggcgacggcggcgctagggcacacggcgctagggcgtttccgacgacgagaggcgaaggcgagggtggcggcgggtagaggagacaccggggagccttttaaaggggctaggaggcagcggcgaaggcccacggcggccggcgacgggaaggaaacttcggggttcggaggaaagaggccgatccgaatcgaactcgattccacgaacttccaaaacgaattagccgatgtttccaaaagagaaaaggaagaggagatcgagaagatcatttcccctctatcaattcggccggagaaggaaaggagcggccggatttggaaggaaacggcggcggcggcgcgctagggtttcgggcggcgacggcgcgacgaagacgacgaccctgacaggtggggcccaccagtcagcgggagagagagaggagagcggccggcggactgggccgacttgggccgaggagagagagagggttttgggccgactttcggcccaaagccaaaagaggactttttaaaacctttttcaatttaaattatttcttaaatgcaattccatttattaaaaatacttccttagctcaaataaatcccagaaaaatctaggaattatagaattaagcaaagtatttaatgaaattttatctggccccattttatattggaatttattaattaaaattagatcttctcttctaggctttttaaaaattatttctaaaaattccatttaaacaacaatttatatattttgaatttttagggtgtgacatctacgggtatctcccctggacaaaatgtgttgtacttaatttaatttaaattgacttagttttctattcttttagattaatcttctatattttacttcctcatctcttttatcacaagatttttttcaaattctaaataaactaatttgattataaattaataccacatattattcatgttttaattaacaaatatttaatgtattgtaattatttttgattttaaattaacttagttttctatcaaattaaacaagcatacaacagttatatataattattcgaacaataattataataataatagcacaaattaatcatgttttaattccacattaaagttgtaaacaaataattaatgtgttttacttaatttaaattaacttaattaagttttatattcttttagattaattttctacattacttcatccttacacaaactttctctctcatcatcacccaatccaaatttctagaggcaaaatagtatacaaaatatatctctaaatccaaatgctaacaacaaaagagaggaggatgaagttgctaacctttttgacacctccaagttgtatattatcaccaaaacaaaaaaccaaaaattttggtagcacctcccctcaaaactcaagaaaattttgatgccttctcgggctagaggaagaagaagatgacatatatggagggtaattttagtcccagttgttgttaccaaccgggtctaaaaatggccaagatttttagtcccggttggtaacacaaactgaaactaaatatcccatcttttgtccaggttggtgttaccaaccgggattaaagatccgggggacctgacacatcctgacaatcggcaaaccatctttagtcccgattggtagtaaagatcaattcttcccgttgcatttttaaaccgggagtaaaaatggtttttagtcccggttttttgttgaaccgggacaaatgtggtttttgcccgacccggcaaagatcacttctccagtagcgtattttctacttattaaattttaatcaaaataaaagtatttcttcatataccttttatatcaaccaataacaaacatccccaatttaatttcatcatctactttattttcttagccaattacaactttctcccaatcatctttaataacttttttattacccatgcttaacttacaaaatgtgtacattttactgctagccttctccgacattgcacatacaacatcacccactagattggacaggaagactcttcagatgcttttaatgggcaatttgcacattgaaacaacatgttagttcttttttttttttgcacattagcacttgtttaagcttcttccaatgtactactccctccattttctaatagataacgccgttgactttttctcacatgtttgaccattcgtcttatttaaaaaaattatgtaattataatttattttgttatgagttgttttatcactaatagtactttaagtgtgatttatactttatacatttgcataaaatttttgaataagacgaatggtcaaatatgtgagaaaaagtcaacagcgtcatctattaaaaaacggaggtagtagtattttaagcttcttccaatgtttacttttcctactacctctgtctaaaatgacttcatctctaactatgtatattggataattctcccaatagactttatttctagttatgcgtatcacatagctagtccaggtgaaatgatgaagctactactagctttttcgcagtgcgacagctagcttttttttcttcagtcttggagagcgtaacgttatttttagtacaaactacacccttcgtctcgaaatataaacataacatttttagcatagtggtaagtcaaccatttttaactttaactattaataataaagaaattaaaaatatcaatcatatagaattgatgttactagatttattattaaacaaattatcataatatgcaacactttttatttaaaacatgctatttttataaatattgttggtcaaagtagtatctcgaagactgtgtcgaagtctaaaaatacttatattttaggacgaagggagtagtaagaaacaataatgtacgagttagcagtaccatggtactagtaacgcgcatacatacatacattggtagcgctacacggcgcgacacacgggcgcagcgcgccagggaccaaaatggagcgacacacagcgggaatgtccccccactggtgcaaccaaccgaactcagagttaaaaattaacttacatacagttggtgatggattacgatgccattcgtgatgagttaaagtttaacttagatttagctagtattagtaaacgtttaagttttatacacatgggtggtcggttgtgaaggcattgttgtggagttaatgtttaacttgatacagttgggatgtggactatggtgtcgaggatattgagttaaaaaataacttggagtttttgtaccttgcaaaaatcgatagatcttttaatttctatatagaaataggggcctgctaatgtgtgtgattagaccgagccacgtatctcggatattacatatacacatgctaactaatgtttaattcatcggatagaaatcaaccccaagtcatagtaactgggaggttaaaaatgaaaatcgtaatggtccaaaaactacatgatcctagcgtgtattgattcggcattaatttgataagtggttagaggaggcccggaataaacggtattttgtactgatatttttatttcaccaaataaaattggtagtaaaaaatttcaacaatcacaacgtggataataattattttacgatgcatattattacaatcgatcatcacaacggacatcgacggtggcaagtcgtgtaggtgcccgccgctgctcctccatggatgccggaggacaagctcaccgccgcgaaggttgacaccgtacgcgtggtggcggagcagcggacggatcctccgccgtctcgcttgcagcccgccgtcgtcacctgtgcaggatccacgcccacaactgcgctggatctgcactgctgtagccggaaccacgcgcgtgggacgcggagtggcggctggatccgccgatgtgctcgttgccgctgcgcctccgcgcctcccgcctgtagtcgcccgtcatcgccacacccgtagtcacgccggatccgccccatcttggccgggtccgcgcgcatggggtgcagagcggcggccggatccgccgccacctcacctcccatccgcagccgcccgtggccacctcgcccgtcgacgctgcacctgtccacgcacctcggcgccaccaaatccgtcgctccttcccctcatcactcctcctgatccccgaacggccaccgccgctcctcctcatccccgaaccgccgccgctgctgccgctcctcctcgttgccaacccatcaccggaaccgcctcgccgccactcctcatcccttaaccgccgtcgtcgttcctcttctctccacgaggaaccgcacgccgtcgcagatccgtaaaatgtggagaaggagagtaatgagtgggtggacggtttcttcgatgggaattcgtaatatatataccagataaagtcagtatgtcgagttaaaaaataactcaatgtggaaacaccgttggatcacaagacacacattgactatctcactaaccgttaaaaaaactggcttcgtatttaacaattcattgtatggttaagttaaaaaatagctcaatgtacgaacaccgttggatcacaaagacacacattggataacatcaagtaaaaaaattacccggattatgggagtgggggaggggcgcaggggtgggattgagattggtcgtcggtgagttaaattttaacagcatgctatggatttagtgggggcagggtggggagtgtgtgagggtggggctgggggctgtatcagtaccatttagtacgtagcaccttgtcgtgccatatagtagagagtgtgtgtgttaatactgacttaatttcgtctgccatcttctccttttctaataagagcatataatcctcttgtttgtcgtcccaatacgttagggaaaagggtctgggtcattttgatctagtcaacagggactgttcgattcatcaatgtcaaagtgactgcttatttaaattctcgtacatactaacaactaattaatcttcacatcgacaggaatctctgcttttgttttccttgccctagctagcttcctcataagagaagtgatccagcataaaagaagtatcagaaggcaaaatttacaaagacaaactgatgagtattttcagcagcatggaggccagctcctgttagaaatgatgaaagtagagggcaatgtcgggttcactctcttcgacagagtgcaaattgagactgccacgggtaatttcagcaagacacacatcataggggaaggaggacagggaacagtttacaaggcagatttagacggagttgctgttgcgataaaacaatgcaaggaaattgacgagagcatgaagagggactttgtccaggagttggttatactttgtcgtgtcaaccatcccaacatagtaaagttgcttggctgttgcctgcagttcaaggggcccatgatcgtatatgagtttgtgcaaaacaaaacattgcaagagctgcttgacctccagagaagcaggaggttccatgtcacactaggaactcggttgaggattgccgcggaatccgctgaagcacttgcgcatctccattgcctaccgcatcctatactacatggcgatgtgaagccagctaatatcctacttgccgagggattgatcgcaaaggtgtctgactttgggtgctcaacaattgatgaggaaaatcaggctgtgcccaaaggcactccggggtatattgatccggactatctactcgagtaccagctcacatccaagaatgacgtatatagctttggagttatccttcttgagcttctaacaggtaagaagccactatcaaaagaaaggaggagcttgacatcaatgtttcaggaggctatagcacatgatacactccgtgagctccttgacattgacatagttgatgaagctagcatgagggtgatctatcgtgcagcgatgctagcgagtcaatgcttagttgttccaggtacaacaagaccagcaatgacggtcgtggcggaggagcttcggcggcttgccctagcagatgaagtgcagcgatgcccacagtcgccattagttcttgaggatctgagctttacggatacaggaggaagcacagtgtccatttggtacaatgggagccagaccagcggggtttacaacctcgagaaaaaggccgttctgagtacaggattcgccagatgatcgatagatcatatgctatattgttggcttccttgtgtcatttgtaggtttatgatatatttagtgttcttccacactttagaggcattcattgtgaggaataagagtacactaacatgtaaaataatgtagcattaagtgtaccgcaaaattaatgactgaaatttaattatctagtttaacttcatgcatggtagatcttctactccgatatgttgggagttaaacgtatcgtcaaggaaatccatggcggtctcttgttattccccattttgacaccaaggagggtttctgagaagtcggagctgctacgtcgagtatttgatgagcttggcaacgatgaattgaacctttcgcttggtttcaggcagggtttggttgttgtcttctagtgaagtcggagttgctgcgcttttgtgaaatcgggaacaataacccatgccaggcggaggccgagcatgcagaggagcgcggcaagctctagcttggtgagactcccatcgacatcgagcttgaatcggaggaagatcctgcgcagccactcgcgctcatagccagccagagcgggggccttccccttctccttcccatcgacaatgtcatcaccgcttgcatctgcaaggcaggcacgaagctggggttcaagaggcagggaaggaagcggcagcggagaaggcatgaatggtgggtcgatgaggggaggagaagacgtcatcatgtggggaagggtccggtgcggtggtcagaggactcttttcaatggatgtcggcggaggcaccttgggtgttgctctccatgtgcttgaagtcatcgtcaagggagacggaggcgaaggcgtggcgggaggaattagtgttgccaaagacaccggggaatggggaggcggaggcttggccgtacatgtcaaagaaaggattaggtggaagaaatgttaaccatattgtttaactaacacatgggtccacaatttttgttttaatattaaactattaaattttgcttcatgtaccacgtcaatgccacgttagatgaagaccaattcaaattagccacgtgggtgccacgacagctaaaaaccgtcatccaaactgtcctgggaccaatattgcaccggttttaatagttgaggaacccgttgtatctagtattgcggtttaagtatgaaaatcatactcactgtcacagagttggcaaagaaaaatcctcccactaggcccaaagcccttcggccgcataaaaagctgaagcgcatgtatagaccttattaggccctcttctaagggaaacgttcactttggatccattaactgttggtcgagtatcatacgttgcccctcaactataaaatcagatataaaatgtccaataactattaaagcttgtacaaactaagtctttgagacaaaaaaaaaatccttctgatcagccttcctaagtataatagtatcatcagcatactgaattattggaaagtcactttcttcatcaggctgaataggcttagaaattaaaactctattgaagcaactcagcccctagaacaaacaaaagtggagacaacgggtccccttgtctgacccttcttttgcatttgaaggatattccaggtacaccatttaaaagaactgaagtatttgctgagttaaaaatcatttctacctagtttaagcatttagcaggaaaacctatatgtctcaatatcatcaagattgcttcatgctcaattgagtcaaaagatttctcaaaatcaaggtttataataacaatttctctctttgattgctgacattgatgaatttattcaaaagcccatgctaaacaatcttgtattgttctgcctttaataaaaccatattgattttggtgaattaaatcagtgatcactccttgtaatctatcagctaaagccttagttagaagtttgagacttatattcttaaggaaatgggtctaaaattattagctgattctgggtttatcttctttggtactaaagaaatgaaagaagaatttatagactataaaaatcttgggcaacaatgggccaacatttaattcttcaagaaatacccattaaaaccatcagggtcaggagctttatcaacaggcgtccactttaccaaatcatctatctcttgagaagaaaaaggatccaccaaataggacaaatcaattgttctttgaggaaatcactcagattgaatgccatgcttgttcccagagtagagttcgacttttactctatttttatgtctagtgcaactataagttttaaactgcaaccgattttgtacctatattcggcacaaactctaacaatcttcatgttcttctcccccactatcgaaatgtgcatatgattatcattgacaattatatcaacttatttatgaaaacatcaaggggaaattggatgattgtttctaatccaatgagaaaacttgcaaagctcctaactacttgtcgaagtgtcatgtgattttatagattttatagtttgtactgaactgtaacgttgacaggttggtagaacgtggaattaattcttctgtacagatttttcgtcattttccgttagtacatttttcaaaatactaaataatatattttatgtaaaaactttatacataaaaattgttttaaaatattagataaatctatttttcaatttgtaataattaaaacttaattaatcacaggttaatatctttcttgttttgcgtgccccctttttaatcttggtctttaggagggcctatgtgtcaatttgcatttgtgtgtgatgaaacagatgttctgtggacaatggacacactctgcctctaactaactcgggaaaaaaggaagcagtattccaagcataaaagaactttgcaagaatgattatcttgggacataggccctcctaattggtttgccattgatcgatcttgggataaatggatggacttttcgttgaaaaaaaaggggaaaagcgatgaagcattcagaacaaaaaactccaggtgccaaactctgtcagactacgtgcacactgcgacacccagagattaactcgcacctgctgaggatgcgacgccgacttgccgtgggccgggagacccagcgagctcggcggtggccggacatacggcggcttgccgtgcgacgtgagcccctgcaccagcatccttcacgagttcgccatggctctacaccacgttgcctaggaacacccccgtgcagctccgcccgagcgccacctggtctaggcgccacacgttcatggtggagaagacgacacccgcgacgccgagcaggcttctcgccggagcaactaccgccttgtcctcttcaggcaactataattttgctccaatccaacagggttcagcgtgacggccatgacaagtaggcccagacatctgccacgacaagcgtaaacatgaaaatttttgggtctatactatcgtgtgaccaagttacatggttttatatagtttacagattgagatttctgctattggcgccgataagcaagcaggcagaggcgcgctcggcgcagggcgcagctacgggctgctgccatcggcaggcaaagccgcagcggcaggagcaagttgcaaaggaagcctaggagcaaggcagaaaaaaccagaaaatggaaagaatgaggaagagaatggtcttggcattgattgtttttatgattgtcacaatgaacaacatgattgtcacaatgttatgtcctacaatatcgtgcagcgtgattgtttttctcctttattattgttctgtgctagctcttgccatgagccacatctattttttttcctctgccgctgagtggcgcatatgtgtgagggagatggtgaaagtggtcgagagatgtatcggcaaaaaatgaactgtagcacaaaagcaagagctgagaactggcagctcggtggcgacggaagggtcaaccctgttggattggagcaaaattatagttgtctgaattcccttttcctctgtattaatcgtgttggttcctgacaaacatcatacattgaaaactatttattggcagaaaacatgttgcattattgtttcttacaagatagcttgtgtgttagtaatacctgatgatgtaaagcttggcacagcaatagctatcggaaaacagcgttatcaaggcctctagccaccaacctctcatttttcacaagcatgtgaacgtgcgttacaaatatgctaaaaatcaaacagcattacagcgcacaggctaacgctacatagctcgatcggaagacaatttcttatttcccatcacacgtatttgacatatccgatctgaaaaatcaagtttcaaatattttgttccagatgcaacacatagctaaacataaaggtcttttagagacagaatgaggtagcaggcgacaaccaagctagttagctagaagatgcagtacacagtataaagaagctgaaaattaagcaggatacaacaacagcgaagtagcgaacagaggacaagagctagtaaagttgggcgtccgtgcgagtgtacaccccgagcgcatcgaggtaacaccccgcgcgggcgaagaagccgacaatgcacccgtcgctctcccccggagccgtgaatggagtccctccgcctccggcgccttgcccaaacggcccgtagctgaggcattggttcgtggagaacgtgagcgaggtaatgacgactgtgtcaggtgacgctgcatccaagggaccgaacgttccggtgatcccctgaagtgattccagaggcatcagttcaatctgcgagagacaatgcaatggggtacgttacattctaccccaagataaatgtatatactctctctatccctcgacgccgttgactatttaaacatgtttaaccgtttttcttattcagaaacttttgaataagatttaataaacatgtttaaaaaaatcaacgacgtcaaatatctaggaacagagagagtatatatcgatgacagaccgattgaaaaaatatatatattcgtccactaaccttatacgcattgccaccaggaccaccccatggaccaacaacttgctcacttccgtcatggtcggcatatgagaactcaatagaatcgatgacgtcaccactacggatagtcacactcactagacgatgtggctccggtgcatcgacgtagtgggactcacctccacttctaccccatggcccaatcctggtaagcccagtctaatttaccaaaaatgaagaaaaacgaaggattagtgtgtgagcacagaggaatgagatagataggaacagcaaaattttacgctacttatatctctaggtatcacatgcattgctatattaacggccgtttggttggagagaatttttaggagggattgggagtttagagggatgagactattaagtgttttgtttggttgggagacatgggaattttgatgggatggagattgggaattgagaaaggaactccctccttttcaatacctgggtaggggcaggtaattgggagggaattcctcctttactttttctaagcaaatctcatccatccgtttttaataatgacttaatcttcaactaaactccctattaatttccatcacctctaccaaacaagatattgggattaagaatcaaattcacatcttaatctcatcatcaattccctcgtgtaaactcccaatccccttccctcgagttaccaaacaagttataagtttaatactgaaaattgtgacactccttctatttttctaaagaataatggtaaaaatagctatgttcagaatgtcaaattgtagtgctagtcatgcctatacttcttgttattgatggccaaataggctgtctggccccgcccagccaatgcacgaccaggctctgacccgagatcagttgggccagcacaatctgacctaaacatcagtctaggcccaccaacggctcagacacgacccaataagactcgggttgtaccgggccggcacgaatgcacagaagactgcagtgctcctcggtataaatctattttctccctcatctctttgggccgtatcttatatacctggaataagtatattcttgcatcctttatatcttcgggccgtgccttataaggctaaaataagtctattttgggctgtgccgtgccgagccagctcagcatgccgagacagaggcctagtcacggcctaacaatctgaccgggccggcatgaggctttggacaccagtcgagccgtgccatatctagactgaaccaaaccctgtgccctgagtcgggtcgtcgggcccgatcctttctgtcatttgtacctgtggtgccggtgcttcctgcaggtgggggttggcatagacgccaatggcatggacgaaggagtccgcgcagccgaagaagccgacgatgctgccgttgccgcgcatcgggatctggaaaggacttcctccgcctcgtccgaatggaccgcgcctacgggcgttggtgatcagcgtgagtgatgtgacgacatccctatccggtgcctcgttaaatgggcccatggtcccgcatatcccagttagaaactccaaagggccaagctctatctgcatggacaaaaaaaattgtaagaaataaaattgcatcaggcttgctctacgtcgagtctcgtggaagataaatttaaatcgtcctccgtccctagattattcttttagaaacacagaataaaataaatatagacgctcacaacgcatacatagttatctctattaactcacacgcatatcctaactctatgagcacatacgaaacactcttttaacgcatatcctaactttgactaaatttataaagagaactatattatttgatatgagatatgtatcatttttatagtttattatttgaagtgatagatgttaatacttctttttataaaagtttatcaagcatttacaaacactctaaaatcgtagattggagggagtataaggtgacaagtttcttttttttttaaagaaaatactaatccagcaataggaaaaatggactagaacttggtgggcttggtaaaatacattttaatgagttaagcatgtactcccgaatctatacaatctatctagattcattgtattaggttatgtcacatccaatcttaattaggtttgtttttttttagcgaaggaagtacgtggttagattttttgtactaggtgacgtcacatccgatctttttttgttttttgacaaatggagtgctcaccgtataagcggttccaccaagaccgccccacgggcctatcgaatgcttctgcccatcacgatcactgtaggagaactcaagtgaatcgatgacattgccactatgaatcgtcacgctttccaaacgccgtggtgccaccttgatgtcccgatgactccctccgttccaaccccatggcccaatcttcgcgagggaatcctaacgagtatataaacattcgataaaagtgagaaaaaaaataaaatcacatatagatagatggaaacaacttctcattttagaagttatatatatattgatcacctcatcatcatcgtcttctactgttttctgcttagggttaacatagataccaaaagcgtccacgtaccacccagcacgtgcaaaaaagccaacaatgctgccattgtcctgcactgggatgtggaaaggagttcctcttacttctccaaaaggtccgtagcttcccttattagtgataaacgtaagcgatgtaataacaccagcgggtgccctatcaaatggtccgattgtcccagaaacttccgttacatactctataagaccaagctgaatctgcaagaaaagtttcaaaataacataatactactagtaaacctattataaatttcactagttgtgtgcagagataatgaatgtataccaatcattttatctaaaagaaaaatgcaagaattgaataataagattcatagtcaccttagtacgtttgttccctttatttgggccatagccgccccatgtgcctgatgtgtgctgctgcccactgtggtcaatgtatgagaactcaagtgagtagatgacctcaccgctagaaattatcaagctttccaaccggcggggtgccacctcaatgtcatagtgactggaaccaccagctccaccccacagcccaatcttggctaccttagcctatgtgttaagccatcaaggggaaaaaaacacattgtgaacaccaaatatgaaaatagaagttatgtatataaatatttaaaggaattatttattggtaattttgttaatggtgtcgtgcagaccaatcatctgttactacaaagttataacccactgcttcctcaagaatacatgcaaagatgacacatcattattcactaacaattattacatttaagcatcatacaaacatgctatattgtctataatttaataatttattaaattttaaagattttaaatgtaagcatgttaaatcatcccacataatcataatatttcaatatatctctccattatttttttataacatcctatatactatatatagttcatcctcacttagttcatgtcatttttcttttatcttattaagtcatatcacatcaatggttcaaattgtctctcttcttttcttctctcatcaaaccatatcatcttacttttacatttgaatctttattctacatactatttaaatttaaatcgcatcaacttatataaaatcatgtttatataagcttatgttatttaagttatcttacacattatttttacattatttttagttattgttatcataataaattcccgtaacagcgcagggttttaccttagaattatttgactgtcccgtagataaatgtcccattacaagagaacaacaaaattacttccttcactgattcgttctcggttggttagtaaaaaagttgttcttcgtgtgtaaatgaactactagaagtgtaaaatataagagtacttctatcataacgcctcaactttcagctaggggaagatttagggggaaaaggaaatcctagagcaatcaacagtagggctaagaattttgatcccggtccaatatatatatatatatatatatatatatatatatatatatatatatatatatatatatatatatatatatagtgctccatggtgcccgggcaccattgttgaaattaagtatatacccaattcaaatgagcatgaaactttttcaattatttaggtattaatattaactactttactaactagttgaaagcaagtttgaactgaatttgaacttgtttttgttagattttgattctaggtatatagcatccatacatataattagttaggtatgtaatcatggattgtgaaataaagttaaatttgagttgttttgttgataggtataggtatgaatcgaattcttataactaggtatatactcacaatttgaaaattttgaaaaatttgagtgattttgtgcatttgaaaccatggtgcccgggcaccatggtgccccatatgagtgtcctatatatatatatatatatatatatatatatatatatatatatatatatatttcctccctttttttctagctttgacgttggttagtgcaaacaataaggggtgtatgtagtagctgagaagagaaggctttcaaaagaaaaatggtaatgtcatatggacgcatgcatagttcacaaagatactattggtaactattaatataataaacaatgggtgtgtttagttcacgccaaaattggaagtttgtgtgtgggtgtgtttagttcacgccaaaattggaagtttggttgaaattggaacaatgtgatggaaaagttggaagtttgtgtgtgtaggaaagttttgatgtgatggaaaagttggaagtttgaaaaaaatgtttggaactaaacacggcatgtgtaggaaagttttaatgtaatggaaaagttgaaagtttgaagaaaaagttaggaactaaaccaggccaatagcttgctaaggggaccgagttacacaaggattattctaaaaacatccacaatgtatgccataagggggtcttaaccaattaaggctttagggtgggtagtatacattatgaaattaatctttatagatgaccttatgatgagctagcattaggtataaggaccacccataaggaataaataattcatctctgttctctctcctgctcacttgctcacaaggttgtcagtatcccgatacgtatcctagtatcttacgatactacgatcctaccaagccgaaacgataccgatcccacctagtatcctaattttcatagtatctcgatcctactattcattagtacacgatcctacgaaatcttaggtggtatcccgattctacgatccctacgatactacaaaatattatttaaaataacatggtatgaaaataatataaataaatatgcttaaatttatataaaaatcagttaaatatatcaaaaccaacttggtttctcttaataaatgcctatatttgcatgacatataccattactacatttttttatatagaatggctacatataattaatataaatattaattaaacttaaaaaaagaaaatctcatagtatcccgatactacgatacgatcctatgatacgatattactttgagcaaaacgatactaacaagtatcccgatactgacaaccttgcttgctcaaaactctctcctacatgctagcattaggtgatatttttatatctgtggggcccaccttatttcctaacaagttcataccattgttgggtatgtaccacaactaatatcacctgttgtaggacccatctatatagaccacttgatctcatatcctaaataaacgatagaataacatacccatgcctgtttgccataggaatttaacacttatcaatcattataaaaagggaaatttagtgtgcaattgtagtggtgaaaatgggcaggtacgattggattatagcattcggatatcctaacctatattttactttaaatttggaacctgaaatgggtagtgtcggacaatatatcactcatcccgtatcctatccaatattacttccttcgaatcggcttcgggtacggatatctatttgcatctctaattcataaatattaaatataacgaaccaattatagtgtcaaaagagataaattacgggaaaattatacaatattgcacgtgagctcgtaaaatagtgattaaccaatccttttatcatgcatgtccgtaggtggacttgtaatagattttcatatgtgttctataatatgggacatatgagtggatacaagtcttcttgtatcataacccattttttttaggattcgaattcaaacttggatagtatcgggaatccttattttctcttccatattcttcccgcgagtctcagatcgggcaagctatctggaaatacccgtccattttcaccctatgcaatggtgaatgcaagtccacaattgtgaaatgtaatcaattcatgcagtagtagggatgaaaatgatcagaaacgatgtcattattttattacttttatggaatcggtcatggtatggtcgtaaatttttggtattcatgaatttaactatttagcatcaacttcgatatgatgttgataaaagttagaaaaaaatctaaattttatatatggctagaaatgaaaacgatcggaaatgatatcatttttacattagttttatgaaatggtatcggtatggtcagaaatatatgtatcattttcacccttatgcgatagtacttaccaccaaaattagtttttatggttcttttttgtacaaagtaggtataatatttctggcatttcaccaaggatgtacacatacgtatttgtaaacataaggatttcaatcatggcaagtagagtatgtattatatttctgagtgaattttttttttgcattcactgacttttatgattgtggaaatagtttcactgactttatatatgtggcattaaataactacttcctctaatattcccaattgatcatcatatatttttatgttattttcaaatgatgatcatattagtattcattcactaagtttattcaatatctctgtgtgagaataataaatatcttggtctgttagtgcactgcattgatcgagttgttaccaaattaaatatagtatggagagttattggcttttcttgattttcatgtacttctataaaatgtgtggatcaattagaaatggaattgagtatttattatctcccgcctcccgcaaagctaacatatacatacatctcaatcatcgtcataattatgaatttatcatacctggtcctgtgatgacgacacggctctagtataaatttctgtctgtttcaactcatggataatgtcatttatagcaggtctgctgtgtctatcaacctcgacgcagcgtacagctatttcaacgcattttttcacttgctggcactcttctttcgcgtgcattgatgtgtccccgatcctattcctccaattatttgcaacctacgaatcaaaatatgagcaatacatttgttgattgagtacacatagacatggttccgccatgcatgcatggtgtctgcttagatgaaaactgaacttgttcttctaagggcacccgcaatgggctctctacaagatatccatgttagtatattttcctacatggaagagattaaatgaagagagagagcaaaactatctactaacctggagatagtctatagagaaaaacgaggcaatgcattagaaagctatagatacccatgtagacatactattgaggtggtttactattaatctagtctattgctgagatgcacatgttttatagagagcaccttactttaccattgcgggtgctctaagggcagtcccaaccctccacctaggatggtgtctatggtattaactacattggcatgtaggacttttaacttatgtggcactatattaattaagagagagagtgaaaaaagaaagaaactgggtctcatgcaagatacagcttcaacacgagaacctatgcactagacactatcaagttttgtattgggagataatagtgtcttcataatagatgaagaataaatatgattgataaagaagagagatgatgtatttattaatggcccattttaagaaattacgggttatgaagtgtagtttctattgtgatgtcttattgacatggcaccatagacactacttatggacactatgggttgagactaccctaaagctacgagaggggttggcaacctatcctccccgttacgcaaaacaaagcatatattattgcatgattaattaagcattaactatttttttaaatagaattaataagattttttaaaacaactttcacatagaattttttttcaaaatacaatttagcaatttaaaaaatttgcgtgtaaaatacaagagttgtgagttggaaaagcaggggaagaacacaacctacgaatagacaagttccgctagccatgcacttcttttttacttgggatggacgacatctctctttgaaaggaaagttctccagctacaaaagacccgtgcttgttatgccttttttttattggtcacttttgactaggcacaaataactaggtaatcataacttttgcacaatatgctagtttcggcattgatatgattatttaaactagtactccctggatcctaaaatatatagtacttactccatttattttttataggtatttttttaaattaaaaaaactacttttgataggcatatttcaatctaaccacctaccatcttaatgactttctcgtatttaatgcgttgctctccattcttccacttaagattggttatatgagcatcgagaaatgtaaatataatgaattgcttgtttacgatgaataactagtagcatatttaaatggatgataagtagaattacttatccttggtcattgtgacaagaagaaatatgactatcaaaaatagatgggggagtaacttttagctactaatctgaacaaggaaaactgtttggctagattcatatctaaaatttgttatattttgggacagagtgaatacattgatgggttggtggaggtgaaattattattagataaggggtaataatatgaaaaaaattgcaaacaaattttgttgtaaaaaatgataaataaacaagaatagagggggtaatttcttacgagatcgacgaattgttgggttgatgacatttcgccatattttgagtagcctttatgtcccaccattatctggatgattataatacctaagctgaatatatcattcttatttgatattttacgttgtgccaagtattctggtgccatgtagtacctgcatcatatcatcagtgatgttaaacaaacaccatatcattcggttagtactaataagaaagaaagaggacatatctcttgacgtcctctctacttactctgaacctacgcaaactttagtggtatgtgtatgcgagccaccgaagggccttgataccccaaaatctgctatttttggcaccatgttattatctagaagtatattggccggtttcaggtccagatgcaaaattggttcttccaatcctccatgaaggtaactaagaccttcacaaatccccataattattttgtagcgtgtgcaccaatcaagcccgcgagactcttctgttaaagtggcaaaaaatattcttgaaatgtgaggattacttttttttgtttacatgttaaataattggatagagttcgcaaattaccaccatactcaccatgcagataattctccaggcttccacgcggcagatattcaaagcatagaactttgtatatcattttacaaagtacatcttccccattaacctccatgagttcatgtcttgcttcattgcaatagcctataaatcgtacgatatttttatgttgcaccctcataaggttgctgaattcattgctaaattgcacatcatcaagtcctcgcaagtcatatagcttcttcacggcaatctctgtcccatttgtcagcactccctgttgcagttgtatttcgatctcattatttcattaatatgtattactacaagggtacgccgtaagtgggttatcggagttcattattgataccacttgaaacaaagatatgagtatcatatctcacaaaccttgtaaacctgaccatagccaccactaccaactatttggtgatcggagaattttttcgtaatatcttctagaaaatgtaccggtagatcagttggcattgtacttggatggtttaacttctcctgtttacagatttgctacctcttcacctatatatacacatgaattattaaaactttcgtataagaatatttagagtttacataccttaaattaagatgagtgaattgcacgttattaacgaaattttcacccaagctagatataaaacctaaagataaatatttacatttattgtcatagtttctgggtagtcttttaattatataaataatatatatcaggattaatttaaaacaaagttgttctttttatgataatcctatctattaattaaccattttatgctgtattggtccccttccttccccagaggtctcgatttgtgtgtcattagaaactaatttggaagttcccaagcattttgaaaattttataacctttgatgctgtaacaaaatttgaaattatataaaacatgggaataatgtaagggaacattttacgaaaaataaaatatcacaggtacaaattcctattaaatttaaaaatatatttttcattcaatttttttgttagaaatattcaggatgcaaaatcttttgtacaaatataccatcggtctcgcacaaccattgcacgagaatgacgtgaaaatgacatcgtggccggtatcatacagtgaaagtgcgagaccgcgcggtctcgctcaagcaatcagcgctatcgcacaagcaaagagcgaaaccattcctagccgatttaattagcgattaattatcctgattagcgattaattaataattaattaatcactaatctggataattaatcactaactattattatttaattgttaatcaagtaattaattactaatcaaatggagccctttggacagtgtcgctgattgcttgaccgaaccgttcagtctcagctctttcattccgcgataccgtgtggtctcacgctgttgccgcgcgagaccgcgcggtcaaaattaaacgaaaagtatattttcaaatttagttcttcgtaatagtgccaaaatttccccacccgtttttttatttttttaaaaaaaatgttgtaaagaccctttttttagaactttgtaaagaccatagaaaacttactaggatgacatctttggatcatgcgtagagaaaaggtaaaatttattcagtgcatacactttatttgttcttatctttcgatcaattgatgatggtttgagatataaacatgtggtatgtggatgttgtactaaccaaagaaacaaatacacgagaccacttgcaagtaaaacagaccacacgctatctgctagctgtcatattgattcaagtgtatgttatcgaggctaactaccgttgcattagtacattttctttttgctatagagtcttttgatgacttatattttttaaaaaataatacagtaattacttaaaataaagaatatatgtatttacttgaaaatcatctctacactttgcttgtgaatttactccatatagtttcttatttcaactcaatcatgacgtaattacttctaatactatagagagttacttctattacatagcaaggttgcataaatgtttgaatatattcaagatcatcttgttttgtcacatattttaagggaagtacatggtgcaaatagatcataaaaataatatatgattaagaagatataagtcataaaaagattaaaaaaatacgtttttagctaaaagagaatttagtaggttgaagtgattgccgcattcttttcgggctattgggtttgctgattagctacacgtaaaacgagaaacatgattagcatatgattaattaaatattaattataaaattttgaaaattgaatttatttgatttttaaagcatcttttatatagaaagtttttgcacaaaatacaacatctagtagtttaaaaagtatgctaatgaaaaacgaggaatagataaggtgaactagctgtttagaacgccgccttaaccaagcaacgaccggtcgcgcgcaaactcacctgagtaagacatctcgttgtcgattaaggccctgtttagttcccacgcaaaaattttacaccatgtcacatcgaatgtttgaacacctgtatgaagtattaaatataggctaaaaataactaattatatagattacgactaatttgtgagacgaatcttttgagcctaattgctccatgatttgataatgtggtgctacagtgaacatttgctaatgacgaattaattaggcttaataaatttatctcgtggtttgatgatggattatgtcattagtttttttattaatgctcaaacaccctatgcgacaccctatataatactcgatgtgcacgccaaaactttgggcctgtttagatccctgccaaaaattttacgccctatgacttcaaaagtttgaatacctatacgaagaactaaatatatatagactaaaaaataactaattacacagattgcgactaatttgcgagacgaatcttttaagcctaattgcttcatgatttgacaatgtggtgctacagtaaacatttgctaatgatggattaggcttaataaattcgtctcatagtttactgacagattctgtaattagtttttttagtgcccaaatatctcatgtcatatcctatataatatccgatgtgatatgctgagactttacactcagtacatgtaagcaccctctaattcaatgcatctgcagctggatgtacatgcctgagcgagagccccacgccagcgcgtgcactatgcgaacacgacctgccactggtactagggtcaacaatatttgacgtcagtaaagcaatcggtttgaaaaaagaaacaccactccctttggagacttgacacttgtgatgggacgtgctccaagtctgcaaacacgtaccgtcatcatagctctcgtgacttttaaggctgtggctgtgttttgttcggtgccaacaaattttggaaatacatttaaagtattaaacatagactagtaacagaataaattatagatttgaactataaactacgagacgaatattttgaacctaattaatccatcattaggaaatgtgggttaccgtagcacttatggctaatcatggcgtaatcaggctcaaaaaattcgtctcgcaatttacatgcaagctgtgtaattggttttttcttccacatttaatgctccatacatttgtctaaacatttgatgtgacagaaaagttggatgtttgaaggaaaaaggttgaaatctaaacacagcgtgtgttcggatgccccttttcccaagctcgttttcctcacacatgttttctacactgctaaatggtgtgttttttgcgaaaagtttttatacgaaagttgtttaaaaaaatcaaattaatccatttttgaaaaaaaaactaatacttaattaatcacgcgctaatggaccactccgtttcccgttgcgcactgttccttgggaacaagcaatggtgaacacagcctaagtatattacttcaaaatataagagattttggttcgataagatatatcctagtgtttgcgtaagattcataatactaagatatatttctttcaactaaaatatcttacttcctatgtcccataatataagaatatttagagggatgtgacacaaccagtaaaatacatctatatggagagcctgtccagatataatgtactaggatgtcacatccctccaaaatcccttatattatgggatggagggagtatattttataaatttgtgcaaatgtaaaaatgaaaagttatacttaaagtactttagataataaagtaattcacaaataaaataaataataattctaatttttttataagacgaatggtcaaacagtgtaagtaaaatgtcaaaatcccttatattagaagatgcagggagattaggatggaggaagtatatggtattagtgttatttactagtttcataatatatataatctgataacaatttatttttcttctataatctgataatagaatcgtattgtgaatgttcttatgctttcctcatgtacatctttttctccagatcgaactagctagtatcttttgcattatacatctaaactaaattattttcattatagtagtctacatatttatcgatatgcatctaggtaatttaagatataccgatttagtttttcaagatgctactacaagattcctaacttttaccaagggggtttaaggtcggccacctataaaactgtcggccatacatattactgagtggttaccctcggcaacacgcacatgtggtcggtaatttatcatattgccgagggtaccctcggtaaccatgtacccgagggttacggtcggtctttttttccagagaccacgcatggttctttcttgccgacacatttcccgagcgtataccgtcggttattcttattctcaccgagaggtttattttcccgtcaaattgagaaccctcggtttctaatataccccgtcggacactaataatcatttccgagagttaaattaaacccctcatttactaatataccccgtcggccactaataatcatttccgagagttaaattaaaccccttggttattaatataccccgtcggccactaataataattttctagagttaaattaaacctctcagttactaatataccccgtcggccacttataaccatttccgagtggtatcttataactctcactcactgatatatcccgtcggccacatgctaaatagccgaatgttctcgtaactacccttattaaaatttcaaacggtcggctacctaaatcttcctgacggtctgtaggattttttgcttggacgcttggcaaatcttaggattctagtagtgagatcaataaaaaaaagagtgtatatgttaactttaataaatctgtgttcaaaagaatgcatagagttggcgtccaaggctggcatttcttttgggtgggggctcgtagtccaccgagttcatgttctttcttggcaggcacacaatcccaaaacaaatcagaactcgaaactctagctagctatgtcccatctgccgaagacattgtcgttgtcgccgtcaccgaatacccgcagctcgtcatcactatctccgtcgctactacccctccgccgctaaatctgtgcaggggagagccgccgccaccggaggagcacgggggagactattgccgccagatgcgcacgggggagggccttcgccgctagatccacgcggggcaaggctgccgccgtctatgcgccgctcctctgttgactgttggcctgcgcttgagcccgccgccgcccgctcgctcctaccgtctctgccttggccgccggagaagagaagtgggagaggggagagggaagtagaagagatgaggagagggagtggagagagatggcgtggaggagtgggggagagaagaagagagagaaaaagatgtggtagagagaaagattgtttttaatatatctgccacaccgtttacatattgattttttttaattgacgagggagtgcggtagatccgatgatcctggttcactcgtagacgatagatgaccacccaaaaagaatcttggtcgctcagaccgttcaatggaaaaacgatcaaggcagtagactttttcatgagttcttgaaagcaactattggtttttatggccaatttaatttgttgcagcaaaagtgtggctagaaattactaaggcttgccatcttaggcctggtttagttctcaatttttttcttcaaacttctaactttttcatcacatcaaaactttcctacacatacaaactttcaaattttacgtcacatcattccaatttcaattaaacttccaattttaacgtaaactaaacacccttagttaaagaatgcactaaaattggtctcatggcatgtgcaacaggcctgttaccctatacctatataataaatgagtagtctgttggaacgtaaaaattaaaaaatatatataaacaggagaaatgtagaaatagaaagtcatggcatatacaatcgccagaaattgaaacactaaattttgtcgaacaagttgtttgaatacttcatagggaattcatagtaaaattatagggatgatattatttagatagagttgagaggaaagataaagatatatagtgtatagtattggatttctcaaaggaaatcaaaaccaaggtttgagcttatatttgaaatcctaaaaaaaaaggaaatgaaggattcctatggaaaatgtctagccaaatccaacaaaattcctataaaaaatatcttgatccataggaaaattttcaatagaattttaatatattaggatagtggctagataggatttcaatcctacaaatttcctataaagtccctggaaacacagggctcttttggaacgcaacaataaaaaaacatagaaatacgatagaaatgtacatgcaaaaacataggattgaaatgttgtttcgaatacaagaataaagtaaaacacaatattctttctaaacaaagaagtgtatataggggtgtgtgtgtgtttccttaatgtgtgttcaaaccgtgatcattcgaagcgacacgcattatgtctttgacttcttacaagaaaagaaaacaagaggtcctaatgcatgctgaaatttctatgaaatcaaggccaaacgaaaattttgtctaggccccgtttagttccccaaattttttccaaaaaatcacatcaaatctttagacacatgcatgaagcattaaatatagataaataaaaaactaacataagtgctacagtaacccacatgtgccaatgactgcttaattaggctcaaaagattcgtttcgcggtttccaggcgagttatgaaattagttttttcattcgtgttcagaaaggccttccgacatccaatcaactatccgatgtgacatctaaaaattttcttttcgcgacctaaacatgccctaaattttctttaccttttccctccagttcgaaggatgcatgaatagtaactcgatcaattctgtagtaaccgagacctccaatcctagggaaatctccaattaattttcctttagaattcctccgatcgatctaaaggaggcctaatatcatgcaccatcctagctatagcatggaatgcatgttcatgaagacatcgatttaaaagcttaagtttgcacatatttacaaattacaataggttttcatatacttgacattaacctgtccttcacgacgctagctaagctctcatcacgcacatacatgcatgaataatatatatccacacagcacagatctaaatcgttgcgatccaaaagataattaggagaactcgtcaaatatagggaaacattcgatatatgaaatcaacgttcaaatatatatatttatgtacttaaaaaggaaggaaaaacaaacagatcctcaccgcttggtggagctagcaaccttggtgggcgttggcgcggaggatgatataatacggcgtgcaagctaagctaggcacggctgatcagtgagcaaaatcgatcgtcgaaattaagctgggcctctgtgccgggtgtgtatatatagagtgtacgtgtgttgtttctggttcggtcgagttgtacccccgtaccgagaatcgtaacgagcgatcgcttgcgtgaggaagtggatagcgattggttggtgggcctctcttcccagtttccactagttcctacgttgcttttttttttactgtattactttcctatttcagtaagtttatatattttaagtttacacatttaaagtttgtacggttaaactttatacacatagagtttatacgatgaaagtttatatactggatttaaactcgaattcaaatttaaatatattttaagcaatcggttggtgggcctctctttccagttcccacatcgctttcttatattttggcaccacattaattttctattttagtaagtttatatattttaagtttacatatctaaagtttgtactgttaaagtttatacacataaagtttatacgataaaagtttatatactcgatttaaatttgaattcaaatttaattatattttatataaaatatttatatacacatagtttatatgtacaaagttagcaatgtatatgtatatatatatatataaagtctatgtaaataaatagtttttagtgtaatatatttttcattctcttttttcacacttattttcaaattgattttaaatttacgaagaacccacgactaatcgcctaacgtcgttgccttttttttttttacgtgaggaaaccgcgtgcgggcgtgatttctgatcgttggcctccggcgccagcgatcgttcgcgcagtagccacggccagttgtaatgtacgagggaggggagcatcgaatgagagacgggggtaataattactagattaattagttgaccaaaaggcatggaacgagacgggagtaataatcaattaacgcatgtgcgtcagcaccgtaagagcaagtttgaaagtatagcgactgctaactctaaatcatctatagtcaatttaatatgtaatttatacaataattaccattataaatatataatcctacctaccatatacacattgtatcttagagtctatactatagatgagtataaatttgtagcccgctactcttctcccctattttatcctctcaacatttgtttatagccactactgtacctgctctaaggttgtgttcttcacccttttttctcaactcacatctatctttttctgcgcccacattttgtaaaatgataaacggtattcgccctccgcaccagaatataagaagttttagagtttgacacaggtattaaaaaagtaggtagaagtgaatggtgcagggttgtgattggatgagtagtggaggtaggtggcaaaagtgaatggtggagggttgtgattggttcggaagacaatgttaatggagaagttgttatattttgggataaatcctgagggctaaaagttgttatattttgggacggagggagtatgttttcctaaaattttctatggtagagttgctttaaaaagtcgtgttaatccatttttcatgttttcttttgactggaaatttttcaagtcttttaagctaatatttaattaatctcgctctaatcttctcctcccgaactcagccagtcagcctaggtagcatatctcgcccaagcgtattactaagcccgcgtttagcatgtactctctccgtttcacaatgcaagactttctagcattgtccacgtacatataaattttaataaatataaacacatatatatgtctagattcattaacatctaaatgaatgtgggcaatgctagaaaatcttataccgtgaaatggaggaagtaacttattataataacaaaaataatgtaaataactaagagtccaactgaaagttttaaaatattaaagtcgaaagttctgaattttgattgtttcgacagttgaattaaaaattttaaattttgagttgacagttttaaaaattcgagttaaattttcaatattttaagtaaaaaaataattttttttcaaatttagaaactttttgttgaaaaacgtcttataaattttttctcaaattttacaagtatttaaaaataattgtagagtttaaataaaactcaaattaattaaaaattaactgtgaaaaaaatgtttaaatagctttcatttattgtaaactgcttaatataaaaaaaaacacttaaagaaacgtttgcttcgtatcaggccctcaacacaaaccagcgcgtggcaacgcaagatttagtttttccggtcaagcacgacggtaccaggctagaattaagttttgtgaatgtgcaaacatccgtgttgtactgtaatttgttctaaaggaaaataataaaaatgaaaaaaaaacaagaagaaaaagaagggaaaatcgctctcgcggacagcatgttcgccgtcaagcggacggtcgatcgaaaggtacgtaccgtagaccgtgactttttttgtacggagggagcaggaaattaatatttgtaggcctcgacttgacttcgaatctttaacacgacccgcgcggcttcgcggaagcttcctcactgagtaccagtagcaatgtgggggcacattacatgtgaacgttttcctggtgtcttggcggcagtgagccgcgaagccgcgtggtcaccttgacaaggccaagtggccaacacgccgcgcccatgctgtcacgtacgaggatgattcgcggaccggcgaggcggcgacgcggacttccttgcctcgccatcgacatccgccgtgtttaggcctggtttagttactgctctaaactttttccttaaacttttaactttttcaccatgtcaaaacttttctacataggatttatttaagggctgtttgatacagctccaactcctaaatattactccaggagttaggtctggagtggagttatggagttgcctaaacccagctccataactctaatatattttatgagagagctccacccaaacagacccttagttttaatagagctgaaactgtttggctgagctccagctccaggaggggtggagctgaagctgaagatgtgccaaacaaacccttagttcacatcaaaattggaagtttgattgaaattggaatgatgtgacggaaaagttagaagtttatgtgtgtaggaaagttttgatgtgatagaaaaattggaagtttgaaaaaaaagttggaaactaaaccaggccacacgcaaacttttaacttttccgtcacatcgtttcaattttaatcaaactttcaattttgggtgtgtttagttcacgccaaaattggaagtttggttgaaattggaacgatgtgatggaaaaatttaaagtttatttatgcagaaaagatttgatgtgatggaaaatttggaaatttgaagaaaaattttggaactaaactcggcctttggcgtgaactaaacatatccttagattcaaaattttttcttcaaacttacaacttttccgttacatcaaatgttagacacatgcatggaacattaaatgtagatgaaaaaaaccaattacacagtttgcatataaatcacaagacgaatcttttgagcctaattacgccatgatttaacaatgtgtttctacaataaatatttgctaatgatggattaattaggcttaataaattcgtctcgcagtttacagcgaaatctgtaatttgttatattattagtctacgatcaatactttaaataggtgtccatatacttggcacacaaactcaacacagccatcgaagaaaaattttccattgtaacgtaaaaccttttttcttttaagaaccatagcgtaaaacaggtccgccgatagcgtggcattcgccttgcaggtataaagcggaacagtttattagcgtgtgattaattaagtattagctattttttaaaaagaaatatattaatttaattttttaactaactttcgtttagaaacttttaaaaaaatatatatcgtttagcagtttgaaaagctgaaaataagagagagtggttggaaaaaaaaaaggcatccgaacacaccaaagtaccgcacggggccggacaggggcgtcatgcagcagtggtccaggcggtatatggtcgcgacgtcgcaagcgcaggcgagcgcgccggccaacttgcagcgcgacgactcgtccctcctgcggagcaagagggtggtgcccggtgccgtggtgggcgatgtcggttgcgccgcggacgacgactttgcgcgcggaagacttcgaaaatgtgagtttttcttttctttttctttttttaacggtgggagtatagcactagctgttgcgtgtgtcacaggcccagcggcaagctatagatagccggagttgcatccatatctagagcacccaagtgcaagttttgtgttctgtacgagacaacttgcccttcttctggtcctctcaggtctcagcaggttagtcaatcgcgagaactgcattttttcccctcttccatgcatgctaatcaagctgatcttctagctttatcttctagatagcctcgccatttcttttgcatggtttcccctattttttcagattgatcatgcgagaaatccgcatccacacttttttttttgtttttctcatttctcctagtcatggcatcatgggtacaatagctccatcgtccggccttcattgatgtgcgtttcaaaaacaaatatgcatacaagtaccctatgagattgagagtgcaaccgtgtgttatcaattgtttaactatatacttcctctgttttaaaatgtttgacactgttgactttttagaacgtgtttgaccattcgtcttattcaaaaaaattaagtaattatttattttttttgtatcatttgattcattgttaaatatacatttatatacacatatagttttacatatttcacaatttttttaataagacaaacggttaaatatgtgctaaaaagtcaacggtgtcaaatattttaaaacagagagagtatcagattatccccaacatgtagttatgagaatattgctttgcaatagttatgcttacacactttatagaaggacagtaggagataaatggatgacaaggagaacacgttagagcatgcaagagtgatgcccgtggaccttacatacaaaaagttagaagaaattacaaatggtttctctgaggagcacaaagttggcagtggtgggtatggagttgtttacaaggtatggttcatacttgtatttctatttttttgtaagtaatacaatatatactaccattaatactgggccaccagaaccctgatgccatatatgaaacaaattaaagccacttcatcaaacagggagtactggaaaataacacagagattgctatcaagaagctacatcaaatggtaggactggacgatgtgcaatttaagaaagaatttaataaccttatgagggtccagcataagaatattatagggttagttggatactgctatgaaatacgacacaaacatatcaaggtggatggagattaccatttttctagaatggaagaaagagcactttgcttcgaatatttgcaccgtggaagccttgacaagtatctttctggtatgacatgcatacttctcaatctacatggactatacatgtactattttgtaggtaagaaatagtagtgccttgcatttacatatatcatatggtactattatttttgtttataattatacagatgaaacatgtggacttgattggcacacacgttacaaaataatcaaggggatttgtgagggtttagattaccttcacaatggtcgtccagaagatcaaattgttcatttggacttgaaacctgctaatatattactggatgagaacaaaatgccaaaaattgctgatttcggtttgtcaagactctttggttcaacacaaacttttacgacaagaacttttattggaacagtgtaagttatgcaagttgattcattgtgaaagttccattgatttctatacccttttctaatcattaacaacatgcagtgggtacatgccgccagaatacattgagagacgccatatctcaatgaagtttgatgtattcagtttgggtgttataatcatagagataatggcaggacaatcgggccgttctacaagtgctgaaatgtctccccaacaatttattgatactgtaagaattgttttttttttctcaaactttttatcattcactttctactttctgctttattattcactttggatttgcaaggtacaagagaaatggaaaaagaggatgcaggaaatttcgagtcatacatcatcacatgaggcagatagcctagaagtcaagacatgcatcgaaatagctgtaaggtgtgtagaacccgaccgaaagaaaaggcctactctgagggagattattgataaactgaacgagttagaaaatgtgaggaaggcacttataggccaggtaacgtgacattcgccatcacgacatcgcggttatgtctaattcaccagaaaattgcgtattttcctcctttcttcagcttatgacttaaatttaatttgtcaaattatgcggactcagcgtatataatgaacttgacatttactaaggaagaaattaaaacaatgctaggatacatttgttgattggtagctaaatatttaagtaaggacttatttggttaatctcacccacaccgcaagaggattgagaaagatttagaggggaataattccatatctattaaggccctgtttctttcagtttgggattattataatttagattattgagtcagattactataagctagattgttataatctgtagtataataagcgattagttatttctttcctagattattagagcctagattattgggtttgcaagtctaaagagggagtggggtggcatggtgggtaattttgcacccaataatctagaaaaagctcacctaaatgagcttatcagattataataagctgggctccagattataataagctgggctccagattataataagctatagcaataagttgtctgtttctttcagcttactccaaataatctggattataataatcccaatctgaaaaaaaacagggcctaaggtgtgaatttaatcatatcccctcaatccactccaactcctcccttattagggcatgtacaacagttagagataatatggtttttaatcattaatgtatccaaatactttttttttctcttctttcctttctttcactatcatgcaacaaaatttactctaataaatgctaagagtcgactctgagccgttgtcatgcataacaaccatactcctttctctttcttccatgtcatcaaattacttgcatggcaatagagagagaccactaataaaaaccgttgtacatgcacttaggattaactgaaaaaggcctaagagagattctggcaaggttccacattttgttactcagttttgctaactcactaatagagaaccgatctttcgtagattaaaaaccggtattaaagttgctttactaccggttctaaaagtccaattccctataaacaactttagtctcggttgatgttactaaccggtactaaaaatgcctccagagttaggtcaaaaggaaaacgtctctattcaagtcagatgtgtaaatatagttggtgagatggttatacgcgtgagagataaggtgagagatcttgagtttgaatcctacatcccacatattttttttctcttgctatatgcatttttagttttaaccggtactaaagatcgacatctttaatcccaatttgctcatctcggttgctaccaccggtagtaaatgtggttgtaaaccgggaaaaaaaacgtttcccctgtagcgactgtataaactacgaagtgacaagtgactgaataccaaattaagcctagacacagggactagtatgtatggcaagctaggtttcttcttgagtatatagtatgatccctctgatcgttgtgacagagctcagctgggtgtaaatcggagcgccttgtgatcgaccctctggaggtgcgcttcccatttgagaaggacagggatgtatcctgcgtgctgcagctgacgaacaggtccgccgatcgcgtggcgttcgccgtgcaggtggacgagtccaagtaccgcgcggtgccggacaggggcgtcgtgcagccgcggtccaggcggtacatcgtcgcgacgtcgcgagcgcaggcgagcgcgccgaccaacttgcagcgcgacgactcgttcctcctgcggagcaagagggtggagggcagcgccgacgacgactttgcggaagacttcgaaaagctgatgggcaaggcggtggatggggagacgatgaggctgccggttgtctatatcgcactgcctctacctcctagcagttaagcgatttatacgcagctgtctgtcctcatgtatcagagatccgctagctagtccgaataatgtccgatccgtcgacatttgcgtcttaacagcctcgtgatttatatatatgacttttgtgaaactaggaagatagcccacgcatatgtgcgggcatttgtttaatgtgtttatgtgcagttggtttttttattgaaatatcatttatactctattcaaatttatttgagatttctatgaatgttggttatgattttcttctagcttgttacccttgcaacataaaaatttggtaaaatttgctacgggacataaaaaaagtgtaattagccaggggataccggaaaaatatgtatttgctggagaacaaaaaaaaactggtaattagctgctggacactcgcggtattattttattatttcagaagaaaatagagagataaacagctgtggaattacggttttacccttcaatccagtcaagtttcactcccctgtgggacacaccagtcagggatctttttttactttttctctcctattctactccttcctttcttcttcatgtcttcttccacaatggcctgtacctccccatgaccccacccatcgcggctctcgtggcgccaccgccggagtgcgacaacacgcaggacctgccccggatgttcgtgttgctcaccccgaccgaatgcaacacgtcgctcacctacacgcagtggaaggaggcggacgcctccatgcgccaccgactctcgctcaatgctcgtgccgtgctcggctacaccgcgcagaggatctttgcgcggttcacggcagtcaccaagctcacgctcagctgcgtcggggctccgggacagacagcctctccgacgacgcggcatgccaagtggccatcgcattgctgtccgagcggctcgccaggctcaagctccgtggcctccggcacctctcggacgacaggttcgcgtcgctcgctggggccacaccggtgatccacaagttgtccatcgcgtccagcagttttgggccctaggccttcgtggcgatcctccggtcgttcgtgtcctctctgtcaagcgttcacggcgtccggctgggagcaagagctagagagtggagaccacgacgagcggccaagcattggcggtggcgtgggagaggcccacgaggccatggatgcagccggggctggagacggcgaggagcagactgggggagccgatgaggaagggagttggtgaggaagccgtaggggcaaacttatctttaatggatatttctccctctattttctccggaaataataaaataatatcgcgagtgtccagcagctaattaccggttttttacggtgtcctccggtagatatgcgttcttgcagtgtctcttagcttactacacttttttaaatgtcctgtagccaattttgcctaaaaatttgttaactaaaattgcgtgaaagcatgcaattttgaatttataagaaaatattgtgttattacaatgaagttggtttctatgaaactatatatattttgtactatgggtatttctatactttaagtaatactacctccgtttcacaatataagactttctagcatcatccacattcagataaatgttaatgaatctagactcatatataagactttctagcatcgtccacattaatacagatgttaatgaatctagacacacatatgaatctagattcattaatatctatatgaatgtgggcgatgctagaaagtcttacattgtgaaatggaggaagtaattgcttttatgctatctatgtctttgtggattttaggataaattaatttaagattttctattaaacatatagctaatagaactatgtcatataattaaagatagattatacttcgccgcataaatgcgagaaagttaaatttagcatgcagtagtgactaattaggtggaaacaaaagggggcggcgtctagcaaaatctagcatgtagtagtgactaattaggtggttcaggctctagtagaccaatttggtcccacattgcatattttctttagataatggaatagaatcctagcctttacttaaagagttacagccaattattacgccaattcgaccaaacacaaaacgcaacacaacaaaccataaaaacacaagcgtaatagaacaggagcacacgaaaactactaaaagtcaacacaagaaaagaccacaagattattgaattttatttgtgaattttcatccgaagttggcaaaaagatgcataaccattgactcaagattacaacctgcagcttttattagcttgttatctacattacacttttgcagttgagcctaggactggagccaatgtgtttcctaaaaagaacctgcatataaaatatagatggtgatttatcaaaaccaaattatttctactgaactatacagcccaacatatattggatgttcctaaaaaataagtttactggttttttttatcaatccccataagcctattctaaaaaaataagatatactaagtggaatatttaaaccagaagaaaactatagtgctctccaaagaaattttgcttaatgacactccataaataaatgatggatagttttatttttcatgcagaagcaatattttaaactatcatgccaattcctcctagccaagttatcctttattaacacaaccccttttaacaggtgttatataaaaatcttaatcttaagaggcatcctaattttctaaataaactcattcttctcaatgtagccattattaattaaagctaagtacatagaacgaatcgagaattgaccatttttatgaagattccatctaaaatatcattctcctctgtcaaatgaatatgcacaattgaaccacacaaattatgtaagttagtcaggttatgccctactagagctttctaaaaaaaaatattctgtgaaacataacacataatatttgcaaccgaggagtttctgcttcgaactatagcatataaagatgtgtatctatcattgaaggtatagtttcctacccattgcgtattttatcaagcgaaaatttgacttcgtctttttcatcattgagacggggagaaaaaagaagagaaacctagctatctgttcacctatttgttctgtttcgtgttgatacatatgaggacgataggaccacccaacaattaattaactcgactagtataacactaccagatatcccctgtttattaggttaggtgaagatcaaaaaagcagtaggaaaacagtttcgctaccaatcttttgaacaagcatgattgcaaagacccaaatgactcgtagaacagtctacccttgatgttacaaggcagctaaccaccagaattaagacgacgaaatgcaaagacctgatcgtcgaagacccgaaccatattcattgctaaacctggtcgtcgcttactcgctttccatgtctcgttgcaattatgttgggtgccgagaaaaaacttgtgcacacatatacacatggcctcctccggttaacgccacaaatcgccaatgtacgtagcggcaaacaccactcaatccatcgcacactagctagaacacaagaaaaatctcagccccgatcgatcgaaatccatggcgttccagttccacacgctactatcagccgtaacaatatggctgggcgtagcggctgctacggcgaggctccatgccgccgtcgccggagcacgagcgccgccgccgccgccgccgcccggcaactgccaaaggaagtgcggcgacgtagacatcccctacccgttcggcgtctggaacggcagcgagtccgacggctgcgccgttccaggcttctacctgaactgcgacgtcgacgacaaccacgtctacaggccgttccacgggaatgtggaggttctcagcatctccctgccgaccgggcaggcccgggtgacgaactccatctcctccgcttgctacaacaccagctcccgcgacatggactacaacgactggcagatcaacttcaccggcacgccgctgacgatctccgacgccgacaacaagttcaccgtcgtcgggtgccagacgctggcgtacatcaccgacgacgacaacatgggcaagtacacgagcgggtgcgtcgccatgtgccagggaggcgacctgacgagcctcgccaccaacgggtcgtgctccgggataggctgctgccagacagccatccccaggggtctgaagtactaccgcgtcaggttcgacacgggcttcaacacctcggagatctacaacgtcagccgctgcagctacgcggtgctgatggagtcgaaggccttcagcttccggacgagctacgtgagctcgctggaatttaacagcagcaacggtggcagggtgccgttggtggtggattgggctatcggaaacgagacttgtgataaagcccgcagaaaggttgacacctatgcatgtgtcagccacaacagcaagtgcttcaactcgtccaacggaccaggctacatctgcaactgctccgaagggtaccaaggtaacccctacctgcaggacgggcagcacggttgcacaggtatgaaaactgatccatttaagggtgagagaggaattgtatacgtgaatatatacacataaacaaatgaatcacatagccaagtgagaattggtgtggatatttcttgattttaaatgcttttacggtactcatttactagcagaattgaaatatataacagttgattatcataagcatttaaaaagtttagccaatgcaaggtaattaacattcatctactgtaatttggaatgatttttcaatttaatttattattttattactatatatttattttaagttcaattttaccactttaaaatttgtactacactaattaaattttgaaatatactttatcacaattttacgggaatttactagctagattaaaaaatatttaaatatacccgattcgcctcgagaaggtgacacctggaataaattaaaaatatatatctatctaattaacttgtttagttgtaatatcaagacagttaagatgtactatatttccctacactttttaacatagcttatgagagaaaacatgcatcagaattttttttttgcctttatcttttgattagtttagtatgagtcacagaatctgaggttcattatattattaatatatgattaatacacaaaacatcacaatttcccacaagaaaatcatattgcccatgtatatatgatagcaaatcactgtttatttttacctatgtttgattaatgcagatatagacgagtgtgcggatccgaagtacccttgttccgtgcctggaacttgccataatcttcctggcgggttcgagtgcttatgccctcgcagtcgtcccaaaggcaacgcattcaatgggacatgcgagagagatcaaacccttcatactggaggaaaagtagctattggtactccattatcctcgcttatcattccaagttctttttccttatccaaaaatcagtagctaagattttccttatgttaggccatagcatccacatgttccacaccagtttatatggattctccacaaaagaaaacaaaaactaattttaatctgtttgattagtcatggaccccaaccgatacgtcactctcagaacttttcagaaaaagaactgaaagtgtaactacatagagttctaaaccgttagtccgttacatgatgtcgacctgtaattaacttatttatttggaataggaagatgattgcatccccgcctttgcatttaggatgtacagtacacaagcatgcagtttaattttgaaagttttttcttaagataaacagtatctgtatatgcagtgctgaagcacttgtttcaattcaacctttagtctcctttacaaatattcatttctgcaggaatttccggttttgctatcgttggcctcgttgtttttcttgtacgagaagtgatccagcacaaacgaagtatcaaaagacaagctctgcagagacagactgacatgtattttcaacaacacggaggacagatcttactagaactgatgaaagtagagagcagcgctgagttcaccctctacgacagagagaagatcgaggtagccacaaacaatttcgccaaggagaacattgttggcaaaggagggcaggggaccgtttacaaggctgtcctcgacggcaccactgttgcgataaagaggtgcaacgaggttgatgagagcagaagagccgacttcgtgcaggagctggtcatactctgtcgtgtcaaccacccaaatatcgtcaaactagtcggctgctgcctgcagttcgaggcccccatgctaatctatgagttcgtgcagaacaagacactgcaagagctactggacctccaaaggagtaggaagttccacgtcacactggcgacccgcttaaggattgctgcagaatccgccaatgcacttgcacatctccactcactgccgcgcccaatactccacggcgacgtgaagccagccaacatacttcttgctgaaggattggttgcaaaggtgtctgactttggttgctcaacgattgatgagaaaacccaagctgttgtaaaaggtacaccgggatatctcgacccagactatctacttgagtaccagctcacagccaagaatgatgtatacagctttggggtcattcttcttgagctcctaacgggtaagaagccactttcaaaagaacggacgagcttgatcccaatatttcaaggggcaatggaaagtggcaaactcgttgagctcctggacagtgacatagtagatgaagccaacatgggagttatctgtcaggcagcatcactagctagtcaatgcttggctaatccaagttcatcaaggccaacaatgaggcaagtggcggagcagcttcgacgactagcattggcagatgaagtacaacaatgcccacaaccgccgctagtgctcgatggcctcatcctcacagagatggggagcacaacatcatcatggtacacaggaagtggaacaagcggggtttataaccttgagaacaatgtcgttctaagcacagaattcgctagatgatccatagaccccttgtgctttattgagtgttacaatgtgttgttttatctgtgttagattatgagttgtgttgttttatctctgtgttagattatgagttaattcttcccagttgtggtggttgacgggcttcccaatgtgtgcggctgtaaccatgcattgtgaggaacaagtgaaacaatcatgtttcacaatatataataattcaagtgcatcaaacacaagtagtggtagtcatagatcaaaacgaaattatctgcacaaagtttgagtttgctattatgagtcgaggtctagatcgtccagtgtgaagacaacaatcctgttgcaatcaattggtgaaaaagatttgatgagagtaggaaaacagaccttggacgcatgagatatactacatcccgttttcaatatatatccggctagagttaatgtaacatcctagcctagggcttaataggattactagaatactcatagttgcaacttcttttccggaagccgatttccaaagaactccagggttaagcgtgcttggcctggagcaatttggcatgggtgaccgaccgggaaattcttcccgggtgcgcatgagtgaggacaaagtgtgcagaaaagacatgtgttggtctgtgagggcagtctgtaacctatgaaagctatcagatgtaagtgggcccggcctgggggaaggcgggacgttacaaaatggtatcagagccgactctcgcggtttcacgggcgtgtgtgtcgcagttgcgcatggtctctcgcggtttcacgggcgtgtgtgtcgcagttgcgcatggctggtgtggatccggagtggtcacacagcatggcacatgcgctggcactggacacacggacgtggccaagaggggacgttcctggcctggggttgatcgacgggggcgtcgatctctcttaagggggtgaggatgtaacatcccagcctagggcttaataggattactagaatactcatatcaacaagttgcaacttcttttcaggaaaccgatttccaaagaactccagggttaagcgtgcttggcctggagcaatttgggatgggtgaccgaccgggaaattcttcccgggtgcgcacgagtgaggacaaagtgtgcacgcttaacctggagcaatttgggatgggtgaccgaccgggaaattcttcccgggtgcgcacaagtgaggataaagtgtgcagaaaagacatgtgttggtctgtgagggcagtctgtgacctataaaagctatcagatgtaagtgggcccggcctgggggaaggcgggacgttaccattaaccaatggattccttctcgtattgctaaaagttgagaatctctttatggggagaagctatacaggttaacagaagaaagtaaggcacaacctgcttttcaactgtcacaccctaaaaatcgctaaattataaattgttgtgaaaaaggaaatttttagaaattatttaataaataaagtaagtgtttgaataaaatctatgaaaaattttaacattaaattgagctagataaaattttattaaataatttgagtgtccaagtattttccggatttttcccggaattatttgagcattggaagtatttttaacaaatgaaacatcatttcagcaattatttaaaataaaagttaattgaaatcctctccctagtcttgggccgaattcggcccacgcctctcctctctcccatccttggcccgcagcccctctctctcggccgaagactgctttagcttcttcctccattccctctgacgcaaggggcccacccggcacagtgccgtcttcctccttcagccggcctcccgtcccgtgccctcgaatttcgtctcggttcttatcccgacgaactcgggataaactctaaatttccgccgccgtttcctctcgaatgcgcatcgatctcttcctcctccgcctatataaaggatgacccaggtctcctcttcgtttttcccctcttttcccatgctgccgtgccctagtcgcctctccctcagctcgccctctctctccaccatcgccgccaactccagccacgccgcgccgcccctctggtcaacgcgggcttgcgccttcgcctccctcggctccgcaaggccgagctccaccctggccgccggttcctttgcgccgaaaccccgccggaagctttcgtcgccatgaaccagtgggtcgccgccgtgtttcgatctctagccaccacccaccgtggactccatggtcgccagaccttgtcgtctcgtcctttggcatcacaaggaccccgggaagcccgtccaccccttctcctccgccggagttcgctggaacgctggtgtcgtcatcatcccgaacctcaccgccgctgtaagtgttggtaagcatcgccgtgtcctcctcttcctccccattctataggcttccgtcgtcgtgccgctgttcgccgtcgccaccgccaccgctgtccagagccaccggcgtcgatccagcgtggctgtcacgtcatcgccctgttagccgccaccgcattgccacgttgtcgttctatccacatggcatctgcgccagcgacacgtgtcaccacgtggccgctatcctaaacgctatattggatttgatctcacctgtcagatcgtggtcaaaggcctgtcaaagcaatcctagccatccatcccgtggacccgtgaactatctttgtggacttggttcatggtagacccagtctaccgcttgtatctatgacgagtgggtcccatctgacactagccctttttctctcttcctagggctgacgtcatattcctcctttatcacttctaaaataattaaatatgatgtcataaattacttagttgttttctttataggttttaattgattaaaacttcattaattcataactaattcatatgaacttggaataaggtcgttcaagtctcaagatctacctatttatgaactttcattgtactgtttatttggtttttattagtgttttacctcgttttgcgttctaggtttagttttcagtcgtttcggaggctcgttcatccattggagaagttcctgaagacgaattgaagacgcttgtttgcaaagcaagtcacacagatcctaaacacaatcctttgagtatattgaacctatatttaaattctccatttcattcaaatgtgcatttattttcaaatgtcatcgggatgtgagccttttccctatattaaggcataagatgactttattttcctacgggttataatttgactagcttgggccttacatatttgttcagctagatattagatataattgcttagccatgcttagaaacattagcacactatgggattcactctaattcagtccttaattatatcatgatgtaccgttatggtattgatttaattaaactaaatacgcttaaatggtgggttgtgggtgcatggtttgatagtcacaaccataacaattaacgtccgattctcgaaatctctggaagatatacctgtacttaccacatacctgcatgggctctaggctaaacttggagtgtagcttaacctagccaatgtaccaaggcaaggatggacgtgatggagtatggatgttccgtgctgcggtctatgctgcttccggattcacctaggcacaagagggggatgcccgctgccttttgaggagtgggggtgaaacctgaggtgtgtatgattggttaggaagggttatacaaaaggttctgtcacagtctctttcctgtatgtcgtggtggcatgttggcgcttggtaacgtgttgtgaggctgtgtcttgtgggtaaagttgtacacctctgatcaaagtaaaactattcgaatatccatgcccgcggttatgggcggtcaaccagctcaccgtgattattctcaccttaataatttgacatattgaactgagttagtacaggtggtttggttgggcctatgcaacgagtatgttgtatagcgttggattaataatgtttaattaattgctgtactattttacaaatacttaactctttgctaaatgctgctttcacaaatgaaccctatattatgccatcctttggtatccatatgtacttgcatacttgtcgtgtggcttgcggagtattccatgtactcaccttgcaataatcaatcaaacctcggttgaagaaagaggatccagaaggagaagacctttggcttaaatcccagttgagctgcttgtgggagtagtgttgaaactttgctagattttatgttctgctgtagttttctccgtggtaataactaagtacctcttatgtaagtatttatcgcattagttattatgatgaatctgtatattaagttgtcagtttgtgtacctcggttgattcctggacgaggatttaatgcacaaattagtttgaaaattacttatgaatttttgggcgtgacaagttgacatcagagccatctcgattgtaggtcaagccaaacggttaaacccataaggacatgtctttgccaaaacaaaaagtgcatgtttcgaagtcaagatggaggcccaaaccaagtcgatttcgagtacgtttcggagtcgaggaccagtatgcactaaaatgggcgcccaggtcgcattcatgcttggattggggcgttctttatgcagatggaaagctaagaaaataacctttccaatggttctagtcccatattcaaattctttcctagtcatcgggaatcgagcgagcaagttaacgtccagaatctgttccggtactgcgccgccgtatttttgcctttcggccgcgtatcgtgttggagcccattagggtttgcacgaccctaaactttatatattagtagcagcctccacctttagggtttgggttttgcttacattaatatgttaagaacagtttcatcgatccttcggtttgtaagacctcaacttgtgagcttaatcattcatatacaatttggttgtattctttcttgttctggtgtgtgttcttcgatttgcaattagggattagccttctcagcgaggccaaccgggtttcgacacggttgataaccagaggagacgtggtgctgcgattacggggctcaagagcgtgttcattcagaagccggatcaatttgtgtcgcgactccaccaaatcgactgtttatcacaacatttcggaagatcgggtaccctacatccacatcaagtggtattagagctccaggttatactaaattagtttttgttttcgccgtaatcctagagtctacagaaaagccaaaaaacaagtgtagtcattagtttcttcccatcccagacagtgtttagcctttgcataattctttttcagagtctgtagtgttgagttttagtcctagtttaagtttttgttgctggtttagtgcgtgttttagtctaggcttatgcgccatggattggatggcaaggtcgatcggttctgatgacgtgtagcagatcgatcaaaggtagagcccgactgggatatggattggattcatgttggatgagttttgatattgtcctactttgagcaggagatattcggtataaatagggagggagactatgccttgagtaaaaccatgtttgagagattagatagggtttcgtgagaaacttgtgaggggtgctaacgtgctgtggctgcaccctgtgaacaatacttgagtaataaagaacatattcaatcatcaaggcatcgacgatctcttctggtttcttaagttttacattattgttcggttttggcattaacttgtgagtctttgttttgctgcaattttgttcaagttaatccatccaaaacctttataatacttcatagatcaaatctgcaaagtttcgttgattgattcttgttagattcgactttgcttaagttttagggtttgttcagatttactgaaattctgagacagctggcttttgagggtattttctcttaaaccgtttatcagtttgcaaatccctccggtggagttgttccttggtttgtctagtttattcctaggctgacggttcgaccgcgagaggacctgtgttcagaccgatcctaataggtaggatagaccatcggacgtgtgttccattggtttttgaggatgtggcgtgttttgatctatcaagatttggatatttgacttgcgttgaaataatctaccattcaccccctctctggtatgcttgattacttgtgttcgatcctacagctgctgcagcttgcttaacatccattgcagctaatgctgggctcctgcattgggcaagattttgggatcgatttggggctagggttaagaaggtcagccggggtattttgatccctacgaaaatacacagtagacaaaaaaaatgattcatatggcgtatcaggttatacatatcatggtatggatccagcttttataatgttgaagtggcatatcgttccaatctatctattatattattaaaacaactttgaaaggaggcaccacgttcgctgtgagggctagtaaatcccacattaatcggagaaaaagaaaaaaaaaagaaaaggagagtccaagtagaagtacaatataaaaatagctgaaattcggaactaaaaataagtaatattgaaagaagtttccatatatataagaacccaatacgagattaaccataaatcgaaataaaaataaaataaaatctaaaattagaaaaggaaaggagagtccaagtaagaatacaatttaaaaatagctgaattcggaattaaaaataagaaatattgaaagaagtttccatataagaatccaatatgagattaaccaaaattcgaaacaaaaataaaataaactctaaaattagaaaaggaaaggagagtccaagtaagaatacaatttaaaaatagctgaaattcaaaattaaaaataagcgagattaaccaaatttcgaaataaaaataaaataaaatctaaaattagaaaagcaaaggagagtccagataagaatacaatttaaaaatagctaaaattcacaattaaaaataaacaataatgaaataagtttccatataagaacccaatacgagattaataaaaattcgaaataaaaacaaaataaaatccaaaattagaaaaggaaaggagagcccaagtatgaatacaatctaaaaatagctgaaattcggaattaaaaataatgaatattaaaagaagagtccatataagaagccaatatgaaattaattaaaattcggaataaaaataaaataaaatccaaaattagaaaaggaaaggagatcccaagtatgaatacaatctaaaaatagctgaaattcggaattaaaaataaggaatattaaaagaagagtccgtataagaacgcaatacgagattaattaaaattcagaataaaaataaaaatgaatccgaaattagcaaaagaaaataaaataagagttcaagtaggaatacaatttaaaattagctgaaattcggaattaaaaataaacaatattgaaagaagaatccatataagaatccaaaattagccgacggttgacgggacttctagaaaataaataaaatgaattccaacgatagttatgtttgatttttagaatcacaatgacaatgaagagtaagtggcggacgggttgtacaggggcacagtggcatcgtttgatgagacttctaaaaattataaaaaataaaactacaagtccaatttttaaaggttcagaacttctaaaaagtaaaaaaaacaattataatcatgtttgattttaaaatctcaatgacaataaagaagggaggcagcgcgcgagctgtagaggagtacaatggtaaagccgcagactgtttggcgggacttctagaaagtaaaaatgaacacaaacgataatcatgttcgatttttaaaatctcaatgacagtaaagagaagagacggtggacgggccatagaggagtataatggcaacaattgacgggacatctagaaaatatataaacgaaatccaacatgacaataaactctaaaaactataaaatctaatttttaaaggttccaagaagaataaatagaaatagtgatagatcgagtaagcaaataaatgagatgacataaggagtagcgactggtgtgacttttaaaaactatataattagaaacacgaggatgataaggtttggtcttttaaagtcttaagataatgagatagctatttaataaattttaagtaaaatcatattaaaaaatatatgattttgtttgggtgctagccgcgcaattgcgcgggccacccagctagttatacaaatactaatgatatttttcaaaacaagcaaatttacacacatgcaagaatccaattaaccattccatgtaatatagccacgtaaacttgtaattgaacaaatggatgcacgttccatcatgcaaccaaaaagacaacttgaaccgtcttgctcagatcaacctcattggctatacttctgcatcatccaattccgatctcgtgaattattgcaccaaagtctgaagtcccggccctatttcaacattgagtgtcgaattgtctatgggcctcattaagttgattccatcaacatcgatccatccatccaaactagagtagtattctgtaaactattggtctacggggtataacaataagttatttcaagcaacggtaaccatcactgatcaccaccgtgtttccaacaatgcatatattaatccttgtgcttactcggtcgtatgccgtcattagatgattcttcgatccaaaatatatattccactatcgatgacatagtcttgcgttctattttttctttgattgcatgtgcatacgacatgtataattatttttctttgattgtgcatacgacctgtaattatttttcttttattgtgcatacgacctgtcataattaattatttaaagtgcagtatacaagctatgttgtttgttttacctactaaattatggaaggcacttttaccaagacattgttaatatcccacaaaattttcgtacaatggaacatttcaacagttgctacaagaagatgcatgcatactgatcaaattaagatgcaaaagcgactttgaccggtcgcaggtctttggaccaaattgttgaaaatggtcagtgtgccatacagaaacgtagcactgttcatgcacgcatggatgatcgacactaatattatacttttcgcagttaaaagcgcgtcttaattaattacttgcgatgaattgatgtataacataactagtattccccgtttcacgaagtaagactttctagcattgccatatttgtctagattcattaacgtctatataaatagcactactacagaatgagtttttgcaaatgggcgaacacgattttcgcatctggttgggccatccgcatacgcgaaatcgtctgcaaagatcgtcatctttccatgcggccagggcacccgcaagcgaaaatccaattttcacatacgggcgcttacgccgatcgcatgcaaagagaaaaaatagggaaaaaaatttcaaaaacaacaaccctagccgcaagcggcgccaccgccgcccgatcccgccagacgcgcccgcctcctgatctgggcgggatgaggcccgtcaccaccgcccccgctcctaccgccggccgcacccgccgacgacgccccagttccgccgccggccgctctcgcctccggatctgggcgggacaaggcccgccaccgccagatccaggcaggatgaggtccatcgccgccggatccgagcgggacaaggcccgtgtcgccgcccactcgtcatcgtcgtcggggtcgccccagctgcccccacttgtgtcgtcgtcgtcgtcggggtcaacccctccttgtcgtcgtcagggtcgccaccgcggagggggcagcccgagcgatggggatgacgtggccgccgcccgccacgcgacgcgccgctctcggctgccggcgcccgcctctgccccatccccacctccgccctgcgcctctgccccgtctgctctatgccgtgagagagagagagaggagataagtgtgtgtgagagagagactcagtagagagggttgtggttggcgtaaggataaggttggggttgaaaacttttgaactgtggagagggaaagagccgacttcatttttacatgcggaccacttaaggatccgcatgcaaaaattagttttttaatttttaaatcaaatttatggcactaaattaattcttatgaaaatgttgttaaaaacaaagttgtagaactcattgagatctaccatttttctttaggttatttctccatttgaatttgattgaactatataaaatatgaattttaaaatataagaatttcaaataatttttcgagtagtaaatattttcagataaaaaaaattgtcaacaacaaagttgtaaaatgcatcaagatctacaacttttgttttggtcatttttctatatgactttgtttcaacagtttgattttgaattttaaattatgacaactttaaacaacatattcaaatagtaaatgatttgaactgaaaaagtcatcaataacaaagtggtataactcatcaagatctgtaacttttcttttggtcatttttttcatccgataaaatgatttgtaacattgttcacagaatatacatatctcttatatagttttataaactataagagagatatgtaaattttgtgaaaattttaccatcactttatcggatgaagaaatgaccaaaatagaagttatagatcttgatgagttatacaactttgttgttgatgactttttccgctgaaatcatttactccttcaaaatagtatttgaagttttaaaattcaaatttttaattgataaaacaaagtcactacaaaaagtgcccaaaataatagaagtaagaacacaataacatgacagagtatgattttagaaacattaagggaaaagaatcatccaatttaggttcatatgagtgagataatctagtttcaatttttttcaaattttatttccgcagacggctacttaacacgcccgtatggaaaaattgatttttccatgcaggcgcttaagtgagccatatgcaaaaatgacctcatttttacgtccggacctcttatgagttcctatggaaaaatcgattttttcatacgggcgtcttaagcagccatatgcgaaactgccgctcgatttttgcagatgccactagttatggtccgtttgcaaaaatcatgggggtctcgtacagaaaaaacacttttgcagtagtgtatgagccatgctagaaagtcatacattgtgaaacaaaggaagtagtattatgtatattcgtgcgagatgtatactttgctttgtttatacatggagtatgtggtagagattttttgattatggcagtattcgttatgccataatctttcgttgggttttccacgcgctaccaagcgtttatatgtatacaaaatttcagcacagtatgaacgtaatataccagtagtgaaattccatatgtatgttttatatatatactcctagctaacacagcttctttcttgctttaatagttacttcctgtagctgatctcgcccaagtgaggatcctatcacaaacaactagagctctcacgtgaagataatcaatgtaggatttagggatttttcttctcgtcaaaccatatattacctttggcatgatcgtgtaaaacaacgtatgcgcatccactagaatgtgtattcctaaacccagttgtaaactcaataactaataaccaaattacaaacattgttcgtcaacccgtgccagctattattattgctatctatgtatctatctattatattattaaaacagctttgaaaagaggcaccacgttcgctgtggggctaaaaattcccacattaatcggagaaaaataaaaaaaagaaaagaagagtccaagtagaagtacaatttaaaaatagctaaaatttggaattaaaaataagcaatattgaaagaattttccatataagaacccaatatgagattaatcaaaattcaaaataaaaataaaataaaatccaaaattagaaaaggaaacgagagtccaagtagaaatacaattttaaaatagctgaaatttgaaattaaaaataagcaatattgaaagaagttcccatatgagaatccaatacgagattaatcaaaattcgaaattaatataaaataaaatccaaaattagaaaagaaaaggagggtccaagtaggaatataatttaaaaatagctgaaatacagaattaataataagcaatattaaaaaaaatccatataagaatcaaatacgggattagttaaaattcggaataaaaataaaaataaatccgaaattagcaaaagaaaataaaataagagttcaagtaggaataaaatttaaaattagctgaaattcggaattaaaaataagtaatattgaaagaaaaattcatataagaaccaatacgagattaatttaaatttagaataaaaaataaaaataaatccaaaattagaaaaactaaaagagaattcaagtaggaatacaattttgaaacaactgaaattgaaaataaaaaataaaaacattagaaaaacgtattaactaaaattttttaaaaaaattctgaaattagaaaaagaaaaataagatttcaattatgaatacaatttataaataactaaaacttgtgataaaaatagagaatattgaaagaaaagaccatctaaaacacatgacgagataaattaagtaataggcctataaaagagtagagtggtggcggttgatacgacatataaaaattgttaataaaacaccaaatagaatcctaatgacgattaaaaggagggacgtcaggcaggccgtgaagcaaacgagtaaggcggttgctgggacttctagaatgtaaaccccattgataatcatatttgatttttaaaatctcaatgacaataaaaaggagaagcagcgggcggggtgtataggagtatagttgcagagccgctgacagttgacgggacttccacaaaatgaaaaatgaattccaatgatagttatgttagatttttagaatcacaatgacaataaagaataggcggcggacgggccgtagaggagcataatggcattgtttgacgagacttctaaaaattataaaaaatagaactacaagtccaatttttaaaggtctgaaacttctaaaaagaaaaaaaccaatgataatcatgttctattttaaaatctcaatgacaataaagaagggaggcagcgggcgaaccgtagaggagtagaatggcaaagccgctgacggtttggcgggacttgtagaaagtaaaaatgaacccaaacgataattatgttcaattttcaaaatctcaatgacaataaatagaagagatagtgaacggaccgtataggagtataatggcaatgtttgacgggacatctataaattataaaaatgaaacccaacgtgacaataaacactaaaaactataaaatccaatttttaaaggttccaagaagaatgaatagaaatagtggtagatcgagcaagcaaataaatatggagatgacataaggggtagcaaccagggtgacttttaaaaactctataattagaaacacgaggatgataaggtttgctctttcaaagtcttaagataatgatatagccatttaataaatttgaagtaaaatcatactaaaaaatatatgattttgtttttggtgctagccgcgcaattgcgcgggccacacagctagttatttaaacaacaacagttcatactaatttttttctgcggggcagttcatactaaaattagaatccatttatattacaactcgctaattattaatttcatctcaactcacatgggtccacgaccgatgacagaaacttttgaatgttttaagtagtagtgatagagatagagataaagataaagaagtaaagatagaaatagagattaatatgacattaaatttatttcttaagaagggtctatctcttacaatttgctaaaaaaatatttcaatttgttaataccacattaattttgaattctagaaactaaattagtgagtccatggtatctcgtatggcatgttttgtttaacacaaactctcgatacgatacgatctatgtgttcaaaaagatatatgattcatctaatcgatgaatttttttttctaattatgaaagcaaccgagaagtgcccaatgaatataaataaatatatattaggggaaatggtagtgcgaagactttgttgagttgcattcaagccgttgggtccttttcgtttatttaaaatttatggctggctagtgtccaacagtccaagtaagatccatcaggctccgctcctcttcatatactccctccgtcccaaaatgtagctatttctagcacagtgttttgtcccaaaatgaagctatttcttcacctacctcctcctctcaaccaatcacaaccatttttcttcacctactttctcttttcaaccaatcacacacttcctccaatcattctcacctactttcttaatactcgtgccaacctcaaaaatggctttattttgggacggaggaagtatatactagcattaattcgtcggactaaggtgcacaagtacgcgtacgatcagaagagaaacacatcgacaaataagttcatacttccatggcttcctatggtgagctaacaatatcatgtctcacggccatagctgttgctggggcggcgttgctcgccggcggcgcagaggcgcaatgcctgcacacctgcggcggcatagacatcccttacccttttggcatcggatctgacggcgactgtgcattgcctttttacaatatcgactgcaacaacaaaaaaccattctaccgagatgtggaggtcctcagcatctccctccagcttggtcagatcagggtgagcacccccatatcttcttcttgctacaaccccttctctaagaggatgtactccagcgggtgggggttcaacctgtcatacacacctttcatgctgtcggactccaacaagttcacggtcgtcgggtgccagtcattggcctacatttccgacccaaccagcaactacacgagcggctgcgcgtcctcctgcccgggtggtaaagtggtgagcgccaccaacagaacctgctccaggataggatgttgccagataaccatccccagaggcatggaattctgcaaggtgtcgttcggggagagcatgaacacatcgggaatctacgaacacaccccctgcagctatgcagcgataatggactactcgaatttcactttctcaaccagcaacttgacttctctgctagagtttaacaacacctacagtggccgagcgccggtgaagtttgactgggctatctggggtccccgagactgcgtggaagcgcagaaaaatctcacatcgtacgcgtgcaaaagcgaccatagcgtgtgcctcaattattccagtggagcaaaatcagcctacatgtgcaactgctccaaaggataccatggcaatccttaccttcaaggctcaaatggttgtgaaggtaaaatatgcctatagatttattctcatcaaagctacaagttttaaataattataggtatttcctgacagtaagtataatatagagttgtcatgtattgcaatagagtgtataaacagctatcttttttctctcaatatttaacggacacatctatacaattaatgaacccacttctggtatacaccctccgttctaaaatgaactaatgccttctgctacgagtccacattttagttattagagggacgtaggctttaaaaaatagcatagcacactgcttatttacccatctgcatttctcctcagattagagatgacaatggccccattttccgtggtgaattcacccattaggagcaggcatggttagaattggttcttcatggggacataaaggggaggaggcttgtccccgtcggttttcacgagggtggggatggttcttcattccttgtccccactccccgtggagctccacataggtatccaagtttaatgtgattatattaattattatatttgataaatgataatcatatgtttttatcgtgtgaaatagtatataatatttctagatatatgttgatatattaatataaagtgcgtatatacgttgcattgcatatataatttgacatgtgtatattgctttaagcggggacgaatatcctgcggggatttatttcctgtgcggggtggggatgggaacaaagtttccccgttgttttatcgcagggatggcgatgcattccccgacggtgaattccctgttgccatctctacctcggatccaatgtgtttctatgtactttagcctctcaactatgtgaatgcgcgttgctgctgcttcttgttatttttaaagtacagagtgctgttaataccataaaaaaattaaaatgaactccatgaaagtcatgtcgtctcggcatgcatagtcgccaagtataatttcctatagttagcatgccttttataaaccaacttttttttccatgtagctttgtcctttaatttgtgtgcatatcatcacttttttttttgcggggtgcatatcatcacgttataaatatttctataaaaggtttatatttgattgcagatattaatgaatgtgaacatcctgagagttacccgtgctatggagaatgccacaataaagacggcggatttgattgtttctgtcgtgatggtacacgaggaaatgccactattccaggagggtgccaaaaaaacttcttaacgcgaaaggcacgagttgcaattggtacgtacttactccaataccgtgttgcctcatattatgatatgctcgatcaggtatagacacacagatgttgaaatagtaccttgataaaccttttcactaatgaaaaaacattatctctcaaggtgttgttgcctgcatattatctatcctcttcggtttccttggatgggaagtgatacggcacaaaaggagcataaaaagacaagctttattaagacaaaacgatgagttttttcaacagcacggaggacagctattgctagaaatgatgaaagtagagggcaatgcagggtttacactctacggtagacaagagattgagactgccacaaataacttcaacaaagcgaacatcattggggaaggagggcagggaactgtttatagggcggtattgggtggaatcgccgtcgcaattaaaatgtgcaaggagattgacgagaacaggaagatggaatttgtgcaggaactggtcatactttgccgtgtcaaccatcccaacattgtcaagttgctcggttgttgcctgcagtttgaggcacccatgcttgtgtacgagtttgtgcaaaacaaaacactgaaagagttgttggatctccaaaggagcacgaggttccatgtcacactaggaacccgcctaagaattgctgcggaatctgccggggcatttgcgcatctgcactcattgtcgcaccctatactccatggtgatgtgaagccggccaacatcctactggctgagggattggtcgcaaaggtgtcggactttggctgctcaacaattgatgagagtactccggctgtgccaaaaggcacgccagggtatattgatccagactacctactcgagtatcaactcacagccaagaatgacgtatatagcttcggtgttattcttcttgagcttttaactggtaagaagccattctcaaaagaaaggaagagcttgaccttgatgtttcaggaggctatggtaaatggcacactccaggacctccttgacagtgacatagtcgatgaagctagcatgagagtaatccatcgagttgcagtgctggcaagtcagtgtttggttgttccaggtacaacgagaccgtcaatggctttagtggtggaggagctctggcggcttgcgctagcagatgaattgcagcgatacccgcagccaccactggtgcttgaggagttgagctttctggatacgggaagcaccagtgggatttacagccttgataataaggccgtgttaagcacaacattcgctagatgatcagtagatctatcttgattgtcttcgttgtgtcatttgtaggtttttgtatattgagtgttgttctctattttggatgtatttgttgtgaggaatgagaatataagaacctgtaaacacaataaatcatttagtgtactgtagaactactgatggtttggcagaaatgtaatgaaacaactagtagtggtaattgccgcatcaactctttgacttcttggctcctgctttatgtttctttcacccgagaatgtcgccgaagttcccatgggcgcaaggacggtggtgacgggttcttctttctcccatcaccgcggttcaaatggtggctgtggaggtggcaccatcggttgaatctggagttctggtgagttgcctcggtgtggtggtgacgtcaacaagttatacgcactcacaccaacatccacgcatattctcaaaccaatttcatcaaataaatcatttacaaaaccaattattcgttacaaaatattaatcacgacaatcattaaaaaagaaaaaagtcctgcacagcaagttctgacgcatgaaggtgacacactgacagtgcgcaccgggccaaagcggtgttgcgacggatcgcgccaaagcaggatacttgcacgatacttgcagctgaccagggcatggaaagccacacggcgtgctcgctatgtgattgggagaaatagacagcaaatcacgtgcaaaaatgatactcaaggacaaaaatgacttttcacccatctactaacggtatatgtgttaaataagcctactggaaaaggtcaataaaacataaaatttgatgatgcataatataagtgcaaaagtgaattttatcggggcaaataaggctgaattttttatttataataaataattacccttaaattaaacaattagtaaatcgtaggggggatttacaggagtaggatggacgtcactacagaaaacgtctagaactactggatgccgttttaaacaacgtccatacttggacggtgttggaaacagcgtccacctccctggtgcagccaagccacgaatagagcgagaacaatcaaaagaaaaccctgacaatgaaaagaaaacctaactgtcgcgatgagcgctgatcgcgcatgccggcagccggccacacaccgtcgtaaatcgtatacgagtttgccctctctacgactttgatccatccgcttcgtcgtacgtccaagccactctcgccgtcgacgccggtgccttcgatttgtctgtgttttacggcgccaccaatcctgcaatccggccacggcaccgtgtgcattggcatctctcgtcgtgaggcaacaggtttgccctgcaatttatatcacgcatgcatgtcttttcacttatagcatgtctctgctcacactcatctaattagcattaattgatatgtaatacattgttcatacctacttgatatatgacatgagtgttttattgaatatatatatatatatatatgtatagattattattcaactagtagacatataacctgcctttgttaattggtgagttcgtttggaagacacagccaggaaataaaatgattattgttcattaacatttttatactagtacagattctttcatctgtgacggcccctaacatgcctgaaatttgtgggccgtcacaaagaagtaatctcaatcgggcacacagacagctagatcggcataaaactagagcccgtcacgaatgacacttatgtgtgacgggccatagttgaggcccgattgagatgatggttcaatatcttaatcgggccctaaaggaagcccatcacagatgaccgtcatctgtgacgggcttcaactagagggccgattgagataagtttaatgcccgtcacagatgactctcttatttgacgggcttttattaaggccagatagagattacttctatgcccgtcacggttaattgttttagggcccttacaaatatttgttgcacagtataaataccccccaccacctagtgtaattgtatactactgttcactattttggtgggaggctatagagggcgattttttgtcttttttccaaggaaaacagaacattaccaaaagtgatcaaaatggagcactcaagtgagtaatactaatgatgaattcagcaatttcatcataacttactttagcaatactgatattataatatgtgcctctaatttatttttttattttgtagcaatggatcgaagttggatgtatgcgacaactgtgaaacgtcattttccggagtacagaaatggcgtaataaaatttatgaacgccgcagaggaggataggaaaagaagaaacaatgattacatgcgttgtccatgtgcagattgcaagaatgagaatatgtttgatagcgaagaggttgtacacgatcatctgatacaacgaggattcatgaaggactatacatgttgggtgaagcatggagagcaagaatcaggaagtggtgcagcaacagacagaagtggtgcgcataatcaggaagatgaagatgagcatgacatgtttataccttctccattgggcggtgaaatgtggatcacgatctgctacaagacatgttacgtgacgttgaagacccagcccagaatgagagagatttcatgaagtttagcaggttggtcagtgattccgagacgcttctgtacgccggatgcaaagcaaaacacacaaagttgtcagcgaccttgaacctaatgaagttgaaggcaagtagtggatggacagacaagagtttcatagatcttttaggaattttgaagactatgcttcttgttgagaacacattgcccaagacgacatacgaagtaaagcagattctatgtccactggggttagaggtccgtagaattaacgcttgtccaaacgactgcatattgtaccacaagcaatatgcggacttagatgcttgtcctatctgcaaggcttctcgatacaagcgaagagaaagtgctgacgaagcaaagaagtcaaagagtggtggtccggcaaaggttgtgcggtatctaactatcattgatcatttcaagagaatctctgccaaccccaacgaagcgaagttagtacgttggcacgccacggagagaaggaatgacggtatgcttagacacctagcggattcgattgaatggaggaatatcgatggaaaacacaaggacttagctgccgaccctagaaacatttggatatgtctgtgtacggatggcatgaatcatttcggttacatgagtagtactcacagcacttggctagttcttattgcgaagtataacctcccgccatggttgtgctttaaacggaaatatattatgttgtgcttgttaatccaaggtccaaggcaacccggcaaagatatcgatgtattcccggagcctgttatcaatgatcttgagattctttagaaagaaggtgtgaaaacttgggatgcatatggtcaggagaacttcaagctaagagttctattgttctgcaccattaatgattaccctgcactcggtaatctttccgaacaaactataaaaggaaaaaaggcatcttcgactgcaaggaacatacacgaagccggtggctgaagaaatcacgaaagatggtatacatgggtcatcggaggtggctcccgctacgtcacgcatttagaagaaagaagaatatttttaacggtaagagagaacttcagcctgcttccaaggatttgtccgaagatgacctagtgttgggggatttttcttttttcttttttccgaatcacaacgaacagcaccaggttatgaccgcaccaacctggacgtcgatccaattggtgtccacatttgtacgttaattgtaatagcgcacacatcttgacgctgtttctagtaacgtccaccttactttggtaaatgttatcctctaattactaataatttaatgtaaagaatattatttattattaattaaaaaatcggcaaataagggaaagagacctgattaatgggaagataaagaaaatcacttattactcatttttggagaagatgttgccgcaagcagtactataatacccgaaatatatatgtttgggaactcttcgtagatttcgatttcccaaccggtacgtatggggtgtacggtttgaaaaaaactagccagctcggctcagctgaagcttcaaagccaccaaaatcgaattaaaaaatccaaaaaaaattaaagagaatcaataacttcacattacggatcacagaatcaagcattcatcaacaagttcataacgcctaatcaaacattcaataaaaatggacaagtctaaaaaaccaaattaaatgcaccaatcatggtaggggatgtgacatcgcttgccgaggaatcgcttgccacttcctagctgtgacctgtcaaatctcgacgcctccacgagcaggtggaggccggatcaggctgcccccctgagccagttgtcgaggagatcttctggccgtcgccggggtcggggtcactcgggacaggccaccattgctatccgtggacacagcccaaggccaccctccacctcttcgataaggtttttgctcggctcggctcctcagatttttcttttctttttgtagctgttcgatttataagaaccgtgccaatttttatctaaccggcaccttgttgctcaaacatgtcagttttattttttttatcttgataaggtgagaattaaatgttaatagctaataagtataggttttaaatgaaccaacagaggtgatacctattttgtagtagtggcaattcgaggatgtcgtcgcctgctacccttacgctaactgactggaagcagtatgagtgcacgactagctagatggtatagctgcccacatgcgaagcggccccacgggctatatgggcttgtttagtttggtgtcaaaatcaaccttactaaaatttagcttcgtcaaaaagttggcatattttgacgttaacaaatttttggtagcattggatgtgtttaatttgttgtcaaaccaattcttggattgtttgtatgagtttctagaaataccaaattttggtaaggtatcaatggcaataaaatatttagtttgttagcttacaatgttttcgtaatacgaaaaactgctaaggtggaaagtggtaccaaactgaacaaccctacacagcctgcgagcaatgccacagtagcgtagccggctacttagtgaagaagtgaaagttgaatccaccatgatctgtgcgggaggtgaccaaaacagcggaatgggctatcctccggttgttaaaaggcctgtgattctaacacggtttaggccttggaatacaagaattttctccggtaccttcagtggggaaaaagtgcacgcaaggtccctcaacttgtcatcgagtaacaacgtcgtcccccaactataaaaccagatatctagtgtctcttaattaatcaaaaccgatcgcaatgatcctttggtggttttgaccccagttttatcctacgcggtggccgagtcagcgtgagacccacgtgagccccacatgtcaggatgccacgtcatctctctcccttcctcctctctctcactcttctcttctctcagccggtggctagggaggagcccgcctgggcgaggcgggagagaagggcgacgccgcgacggcggccgcagtggggaagcacggcggagctctgcggcagccaaagatgggtgaggggggctcatgccagcgacggcggcgcacgcgcacgaggggagtaagggtgtgggcgtggcggcggcggcgtcgatgatggagacgtgttgctgccgacggtccacttcggcgggctttccagcagcagcgcaggcccggagggcaacgtcggtgacgagacagacccaggggtggccgtcggcgggcgcgcgtgaagatgagcagttcctccaatatgtcgatggacgaaggtcaaacaaaattgttttctttagacacgatccacctggacagatcgaagacaagaagatgttatggagaggcggcgtgcgaaatcttacctccattattcttcttgacatgagacgcgagaccccgagctcagtgggtacagggtgtcatcggtctgcagggttccccacgcaagaacaggatcagggacctttcacatttagtgagaaaaaggggatgaaagcgagggcacaaatcaatggagagcaacattttgcaataactggtagcttaccaaatagcaggaagtcgaatttgggctcttggacctttgtggcagtgcttgtggtgtgggtggaaaaaaaccgaaaatttctccataatccaagaccctgtcctgctatttattcctcgccgttgtcgtcgtcatccgagcaaccggaggtggcggcagtgacgtcgaagcggcagtagcagttgctgctgccatggtgaggaagaggaagctgccaagatggcggagcgacacgctcctttgagaagcacggcggagctccgcggcggccaaagatggtagggggctcatgccgacgacggcggagaacgcgcacgagcagagtaagggtgtgggcgcgctcggcgacggcggctgtccctctcgctccacaggccggaggcggcgacgtcgctgctgatgcagcagtagcagcagcacaaccaccaccacctccaccaccagccgtcgccaccggcgggcgcggcgtcgacgtggcagctgcagcagggcgcgtggcatctccgcggctcaaggtccctcctcccgacgcagcagctcttgcaggagttctccagcctcctcgtgaagagcatcacaacccatcatcggcaagcaaggcacccaagctagccacttcgccttgctcgccagtggcggcccccccccccccccccctggcgacgccacccagctgcctgcccagcctcctcccgtgcacgcctgtcgctcgtggaaagggcaggagagaggaaggaataagaggctgacatacgggtctcacgctgactcagccgtcacgtagaacaaaacccgagtcaaaatcaccgaaggatctattgtgaccggttttgattgttaagagacgtcagatatctggttttgtggttgggggacaattttatgactcgatgataagttgagggaccttcggtgtactttttcctttcagtggaacatacacgtgcttcccaagttagagatagggggattgcagtggccgagccaaggcctggacatcatgggccagtgctcgggctctgccaaacgaacgagtgattgccccagctaaattatgagacaaaccagtgattaccctagctaggttacatggcaaatcagtaaggaatgtatgagtgcttactgcccaactaagttatatcttgaaatgttttttttctcacaaatcacaattcaatagtgttaacttttgttgcattatgtttaaaaaaatttgttgcataatgacaaatgactcataaagtagtatgaacatgtgtgttaccattagaatttcctgggctctaaaaaatttctagatggatcactaagagggaacaaagtggtacaagggcagcgtataatgccacgggaggtaaagcacaacagaacactcaaaccatacctgacgatgaccttgatacagtcacctacacactatacaagaggcgactacaatacatcacgatatagcggaacgacgactaaccttccaattattgaccatctaagacatgccagataatgatacaggaacacacgatattatttgttaacgaagttcagtcgaatcctacatctcccgagctcttattatgtacgctcgtcccaaccaatatagtacttagccgttacgagtaaatggtctcaccgccatcctcttcctgcgtgactatgctatattttagttgccatgcttatattgtagtgccttgctctctatttaagagagttgccaggttacagagttcgactctaatttcacccccgcgccacctattacaactccaagtctaactgtaaccaaacaggactagtatattcgacacataatctagcaggtacaactcaccaaattcaaaacctcaaaatgtaaagatataacatcatcattcattaacaattactacaattaaacatcatacaagtaatgttatattatctataattttataatttattaaattttagagctttaaaatgcttgcatgttaaatcatcatggcatataattcacataatatttcaatataactctctattattttttataatatccgatatacctatttagttcatcatcactcagttaatactactatttctctcctctctctaagccatatcacataattttttcagtccctagatgactaatttatggtacaaattatctccctcattttcttcacctcaattgtttttagcccttaatgattaatatatgggaaacatatcctatgcacacaagctctcacgtgtacacacgtgcacaccaactaacaaatatcaccaaaaaatctagaaaaagtcatacatgttatttcaatagtattacacccaggcataaaatcttaacctcaaattcattataatttttagccgtaacaaaaaaaaatctgataattttaaggttataattctgttagaattttgtcttttttcttactctctatgtagaatgaaattgaagatgcgactttgcacgtagatgaaatactattggaagtaaatgtatgattttttctagaattttttgtgataatttttagttgatctacacggtgtgtacacgcaagggcctgtgtgtataggatacgctccctaatatatgatctaaattatcttccccatttcttctctcataatttaactttgataaatttaaatgatcataaaccacatcaaattatattgtctagctatcttacatatctttttatttattattatcataataaattctcatacagcatcacgtggggtttcactggtacaaggaaaaaaaacggtcgagctacggaaacaatccagccatttttcagaaagtgaatcgtaccaaatcgaattatttagaatctgctggtgtcgggaaacattctgaaaaatacacgctcagtgctgccagacttttgaatgctattgcagcggatctctgtttgatgtgtcaatggcttaaagaatactatgtagagtgaatataggtggtgtttaaatttcgtgaagatgaaaataaaggtaaatattaagtggatcacgtaaaacgatgtgatgtgtgattaattgagttttaattactacaaacttaagaaatagattaatatgatattttagagcaactttcatatagaaagtttatatacgaaaagtaccgtttagccgtttaaaaaatgtatcatgagtatctaaaattttatcctccgcttgtagaagaaacgaacagagccatagtcactccaatttgccgtccacataaaaagactgcaaaggattgagccaagccccaagcataaagaaaaccgaaatttgcccacaattttgtccgtttggacacaccgtacaaaattacagacgaaaactattaatggcatcgatctcaacaggaaatgcatctaagacaattgagccccctgatgtttgcatttgacagttgacacgaccttggcgttgatatggcaaacctgtttacctgtccactgccgcggtgcaccacacccttcaccggcaattccacaacagcaagctagcgctttccaagttccagcaatgccgccgcgaggtcagacatggcgagggactagagtgtatagtggcggcaactaccacaaccgcgagagcctaggacgttgccggccggctcgccgcccgtgagctaggcctgctccggggcctagtccctcggccacacatgagctgatgaagcgtattcaagatcacctaagcacggtggactcccagttaaaataaatgattgtgaagtactctctccgtttctaaatatttaaatatttgacatcgtcaatttttagtacatgtttgatcgttcgtcttattcaaaaacttttatgaaatatgtaaaactatatgtatgcatataagtatatttaacgatgaactaaatgatacaaaaagaattaataattaactttttaataagacgaatggtcaaatatattttaaaaagtcaacggtattaaatatttagaaacggaggtggttgttgtatttagttagttcgctacatacgtacttacataaaaagttggcattacaaaagtcaatatttgtgtggtaaccgggcaagcgacgtggacatggaatctgatctgatgggcagccatgtgtgatgacatcgaaagaaatattcacttccagcctcgtggtcgtggagaggtctcacgtcgtagtcacgatcgaagatgagatgcaacggtgactttgaccggcaaagtctttggatcatcgtctttgttggaaatggtcagtgtgcattcaggcatcgatgatctgtgatccatgtgttagcttttgccagttaaaagtgcatctatattacctgttctaaatttatatggataacttaattacaaggagtatgtgctggtggatttttagataatttgatcgtcgttgtaaaatcttagcagctctacctcaaattagttttcttcaaacactcccgcataaactagtagataattaaccaatttggaacatgtgccagaaagcaagctaagctagggcaaagaaagtggtccagactaaaatttactctaaaattaacactaaagatacagtaagcgaagacttgttcaagtcgttgggtctttttcttatatttaaaagaaagtttgtctagtgtccatgttggattcatctcaaattctcaacgctggctctactcatcttcatatacaagcacaagtccataatcacctatcaagaaacagaggtttaagacacaaacagatagctaggactagctagttcatccatccaccatgactagccacagaggactaacaacaacaacgctgtgcctcgccatagcgattgctgcagagctcctcgctgggagagcagaggggcaatgccagaacaccaagtgtggcgacgttgagatcccttacccattcagcaccagcttggacaagtgcgccgcgtccgccttcgaattcgactgcaacgacaccggcaacggcgtctacaagcccttctacggaaatgtggaggtgctcagcgtctccctccagcttggccaggtccgggtgatgaatcacatctcctcttcctgctacaacttatcttctaaggagatggactccgacacgtggcagctcaacatgactggcacgccgttcatgctctccgactccaacaagttcacggtcgtcggctgccggacacaagcctacatcgccgaccaggattacgtggggaagtacatgagcgggtgcgtgtccgtgtgccggcgaggtgatgtgtggaaggcgacaaacggcacctgctccgggataggctgctgccagacggccatcccaaagggcctggattactaccaggccttcttcgacgacagcagcatgaacacgtcggggatctacaaccgcaccccctgcagctacgcggtgctaatggactcctccaacttcaccttctcgaccacctacttgactacatcggaattcaacaacacctatgatggccgggcgcctatggtgctcgattgggccatccggagcgccaacagttgtgaggaggcatggaagaagatggactcttacgcgtgcaaaagtaccaacagcgagtgcttcaactcaaccaacggacctggctacacctgcaactgctccaaagggtacgaaggcaatccttacctcgaaggacccaacggctgtcgaggtgaattttcctataatcccatcaatactacatctagaattctaaaattgtgacagttcatatgaaatagctttcagcgtgtagctttcatgattttgttttcttactccatccggctatatttttaagaaataagtttagttggtccatttataaaatttccaatacatagtctgtttatgattctgacttttttccattaatcccatttcatatttgaaattctcccacgtttccattttccagattaccaaattcttttccccacatcttacaaattcgtcatttttattttgtagatattgatgaatgtcaagattccaagactcatcattgctatggagaatgccgtaataaacctggcggttttgattgtaactgtccagcgggcagcaaaggaaatgctaccattccagatggatgccgaaaagacttccgcttgccgctaaaagcacgactggcaattggtaggcacatgttttacaatctcttttttttaagactatgttttactgctgcatatctggtcgacatccatgttaaaacctacacatgctcaaatatttccactaatgtcagatatttgtttatccaggagcggttatctgcgtattagttggcctctttagtttccttggatgggaagtgatacgccacaaaaggagcataaaaaaacaagcactattaagacagactcatgaattttttctacagcatggtggccagctacttctggaaatgatgaaagtagagggtaatgttggattcaccctctatgagagaggggagattgagactgccacaagtaacttcaacaaggaacacatcatcggtgaaggtggccagggaactgtttatagggcggccttgaacggagttaatgttgcaataaaaaagtgcaaggagatcgacgagagcagaaagatggaatttgtgcaggagttggtcatactttgccgtgtcaggcatcccaacattgtcaagctacttggatgttgcctccagtttgaggcgcccatgcttgtgtacgagttcgtgcagaacaaaacactacaagagttactagatctccataggagcaagaggttccatgtaactcttggaacccgcatgaggatcgctgcagaatctgccgaggcacttgcgcatcttcactcgttgccacaccctataatccacggcgatgtgaaaccatccaatatcctacttgctgagggattgatcgcaaaggtgtctgactttggctgctcgacaatcgatgagaatactcaagctgtacccaaaggaacaccagggtatattgatccagactacctactagagtaccaactcacatctaagaatgatgtatatagtttcggagttattcttcttgagcttctaactagtaagaagccgctgtcaaaagataggaagagcctcaccttgatgtttcaggaggcaatggcagagggcacactctttgagctccttgatagtgacatggttgatgaagctagtatgagagtgatgcatcaggcagctgttctagcaagtcaatgcttggttgttccaggtatgacaaggccgacaatggtgctggtggcagcggagctccggcgcctagcactagctgatgaagtgcaacaatgcccacaaccgccgcttgtacttgaggatttgagctttgtggagatgggaagcacaaccagtggagtttatagccttgagaagaaagctgtgttgagcatagaatttgcaagatgatctatagacagtttgttgtattgattcccgcgcgtggtttgtaggtgtgtgttagattgagttttcttcctagtgatgaactgaatctgtaaaatagcatagtagcatttaggtgcgctttagaattaaagataaacatagttgtaataaaataactagtgatggtatttatacagttccaaagtgagcacaatttaattggtttggttacactactacacaaatgttttctaggacgagcatcccaataggttgcaggcataccataaatgcccgcatctgcaaaaatcgacccccccattttcgcatacgcttcttaagaggaccgcatgcaaaaataagcctattttcacatgtggttctcttaagtaatctgcatgtgaaaaaagacccactcgttttcttttattctcccctccttgctctctcctactaagtcctcctcttcccactctcttctcctccactcctctctcggccctcctggcctcctcctcttctcccccactccatcccaacggcggtggatggctcgtgcgacaggcgcgagctctagcaacggcggtgggggagggcataggaggtgtgcaacggaggcggcggcagttccccacggggagaacagtggaggaggcacccatcggcggccctcccgccacgtggatctgaggacggcagtccccccatgcgcggatccagaggcggctgccctcccccgcgacgacgatgacctcgatagcgacaatgacgagacggcctaggtggaggcagcggtctagggtttcgagtggcggtggcgactagatggtggcaaatctagggtttcagggtagggtttggttttttttttgttttttcacagacgggtgacttaagcgcccgcacccacatggaaaaatgacgatttttgcacatacctgggtgcagatgggtcagggcccgcacgcgaaaatttgtttaggccgtctggaaaaattgtttatgtactagtgttatttatgatgggacatgcctttccgtgtctgctcattttttggctaattattatttttaatgccagtcgatgtacttattgacattgattttttttaaaaaaaagttatatagttgaaagagaattctttatctccatgttcatcactcatcagtcttgtatatcgtgtggagccaaacaagttgccgcaccagtcgtggatgcaatctgatcgaggctatacaagtttcgacgagctaacatacgcttcttgtttaggtgtgattggctttcttacctttctgcttaaaataacccgaggtaggtagcttgatggggtggccttcacagctcgttgttccacccacgttctgatttgctttgccgagaaataattgatggcttcgagaggtgcctgccgcgtactctgtctgcgtctcaagaaaagcctctagcgggcgacgacttgacttgacacgggaatgaccgtccacgcgcgccgggccaggttgacgcgcaatagtgcccaccaacactgtgacgccgaaaccgttttttttttttttttttgagaaccaggaatttattaaacttagaagcatagtacatgcttgagagtacaattaagggactcgaaatgattgaaaagaattctagcacaacagtcccttgttggataggcaatatgggaaatgttttgacaattgaagattagtgcccaccgacactgtgacgccgaaaccgctaattagcagttggctgcgcgtccttcttccgcgtggacaggaaactcgtcgctcgttagctcgttcgactcgcgacaagatggacttagcttggatcgactcgtttcatttttctgacgaaccgagctgacattttaacttgttatatataatgagccaactcgagctagctcgcgagctactagccttaacaagctagactaaccctaccttagcaggtcacaggcccacagtcacatagcacgtagggctatatttttggaagaccgagcccaatagagcatcaatcagatcaaaaccctagtcaccccatccgatcgtgcctctgtctccactctcttcatccctctgccgccctagcgtagcgccgtagctgcattgcagagcgcgaccactgcgcgcccccacatctccaccgctttgccgccacgcgcccgtgcatctccttcttgggcacatctccttcttgggtacaaaagttgtaatatgtaatgaaatggaattaatgcagggtgtcatagactggatttgtgtaaagcactcctattttctggcgtggtatgaagcaatgtagcggagcttgagccggtttggctctgcacgaattttatgtgatttgctgcttttttttccttctttcttaatgtacactatttgagttttttatttgcaagctattttcctcttgttaggtcagtatttgatgcattggctcacgagctaaatgatcaagctcgagctttgcaacgagtcgagccgagctgggtatttagctcgtgataataactacttaacgagtcgagctaagccaactcgttaattatcttaacgatttagatcgagttgagctgactcgctatccaccctacgcgcggcacagccatgtggcgcgcgaggagaccctggcggcgggagggcgcgtggtaaggtgacatgtggcggttttttctcgcttttcttttttttctaggtttttcttttttcctttttttgttttctaatatttatatatatagcacatatacaaactttgtataagtagcgttcttttggttttttaatacgtacgtatacaaattttatatacgcacataataatgcatatattttttttacacattgaaattttaccgtacaccgagttgcttgaaggcttttgaagcccaatcgtacattcgtaccgctcgagcggaggaccgaggacacgtcggcggtccagaggcccagagcacagtgttgcagcccacatgccgattgtataggccggctgagaaaaattccaactcgggcactacaaaatagacttttttctttctcctgtcccaattgagtccacttcgagctggcccagtggacgggagtgcctggagtggtccaagcagtggaatactggaatggggcgcccctaatgcgcgatcagtcgcgcggtcacgcgggcacgcgaccatcagatccactactactactcgtacactactactataactcatacactacgggttttggtacagctccaactcctaaatataactccaggagttgagtctggagtggagttgtggagctgcctaaacccagctccacaactctagcacattttgtgagagagcttcacctaactccacttccaattttggtggagctgaaactatttggctgagctccagctctaggaggggtggagctggagctggagctgtgccaaacaggccctactactgctactactacatgtatatatatatatatatatgtacatgtatatactttgtatacatacatataaatttgtattattgtatacatatgtataaattttgtattaataatataaagtttctatatatgtatacaaaatatatacatacgtgtatatataatttttatgtgtaccaaaaatcgatgtatacaaaatatacacatatacaaactttatatacacgtgtacaaactttgcatacgcgtatacaaactttacatacgtatatataaacttatataaactttgcatatatgtatacaaaccttgtatatgtacatattaaaaaccgagagaaaaaaatacgaatacaaagtttgtatacgtatgaatacaaacttggtataacacgaatacaaactttgtaatatgtacatcttaaaaaaaggggaaccaaaaacggaagagaaacgaaaaaaacaaaaaaaaagggaagagaaatgaaaaaaacaaaaaaaacggaagagaaacgaaaaaaaccaaaaaaagggaaaaatcgctcctcagtcgcggcgcgccgtccgccgacctctccgcgcgcgacacatgtccagtcgcgcggaggagggcgcgcgcaactagccgccccttagctttttcgactggaatgggctggcctcttgttggaatgcttgcttgcaactttcagcaacccactctatagctcacttgcctgtcctttctagtgtagttatcaagattggatcggatatcgacggaagatatagggtggaaacaacgtatctatagtaataacctgaaaactaccgttgaattaaaaattgaacgtctgagattcgtccacgtcataacgagtaaaaaattttactcatagatttactcatgacgtggatgaatcttagacgtttattattcgatccaacgatagttgtttccacaacatatatggtttgcactatatatattttctcggatatcgaactggtcaaaggcctcgattcatgaaaatcgatttttacttcatgaaaatatatatcgctctgcagtattgcgatcgatcaagcgacaaattaattagaaaccacttggcgcaagagtactggagatcgaaggattatgatcaattcaatgtcttttcctaagcaacaagaggaggaagcgaatcaagaactctcccaagtgatttccatgagccattccactcgaccacccgtccattcatcacacagctcagctcccaactccctgtcacagctccacgactagttccggcaacagccagctggccgtgccgatcgaccaggcgtctcgccaggccacatgttttttcccggtgtgtttactcccatttattcaaagtagcagtagcagtaaaaaaattgggttcccatctaaagcactgacgacaattaaaaaaaggggtattcaagttttcacaagggaatgaaaatctgcttgtattaattattggcacaaagtttttacatatgacagaaaattaccgtcagaaaaacgtacgaaatcataaaaatgttgcgtatacaccctaattttctaggcaagaaaaagatgcataatagtccatgtaccccctaaactcttgatataagtctatctagcatcttaaacattgaaatgagacatctaacctcctctaaactaactttgtaataccgttcaaattactctctagcattgttttggatggtagttttgggtatcttggaaactaaatgagtggttttgaatatagcaggtttacacatcatcgtcaataataggtcgccaatatatattctatagtgatgtcaccttactattatattaacatctgtctacattaaatgagaacaaaaaaataagggttaaaaagtcaaaactaaagatttaggtggatattttaacgcatatgtccaattcatatatcacgtaataaaactctcatccaacgtatacgtaaatcagatagaaagctatctataaaacctggtcaaggtgctagatggattttcaaccaaaatttagggggttatttggactttctcctatgaaaattgagtactagtacgaaactgtgaaggctcctgcagatactaaaatccactgaaagctacgttgaaggcttataccccctggcaagacttgaaaattcaagtcacgcatgctagtttgtttcacacatacactatcatcaagccgtttggtcatttccacgccagtgcgtataaacgccagtgcatataaacggtcaggaagacgccggatcatccgacaattgacgagttattgagccatgcagctccagaaattagcagcaatattgttgctaattagtataggccattcggcactgctcgccgccgttggagcgccgccgccgcctcctggcagcagcaactgctcgacggcgtgcggcggcgtcgatatcccctacccgttcggcatcggccctgcaggctgcgcgttgcccggcttcgagctcacctgccgcgacaccaacaatggcggcaagaagccattcttggggcacggcggacacttcgagctggccggcgtgtccctgtccgatggtcaggcccgcgtgtggaacaacatctcctcctactgcaacgacacctcccaaaccatcatggatgtggtgagcttcgctgatccgtacaggctctctcaggccggcaacacgttcgccgtcgtcgggtgtcaggcggtggccgtcgtcggggtcggagattccgccgataacatcgtgcgtttcctgagcgggtgcgtggcgaccaactgcgggcgacgcggcgatcgcctcgccgacggcgcctgctccggggcaggctgctgccagacaacgataacgaaggggtttaacgcctaccaggtcgagttccagaactactcgacagtgttcaacagctcgaaggatatctacaacgtcagccgctgcagctacgcggcgctgatggagtcgtcgagctttagcttcaggaggagctacgcgacatcgtcggaattcttcgacgccaacggcgggagagtgcccgtggtggtcgaatgggccgtccggaacgcgagcaactgcgtggaggcgcggaaaaaccgagaatcgtaagcctgcgtcagcatgaacagtgcgtgcgtcaactcgtccagcggaccaggctacatctgcaactgcgccaagggattcgagggcaacccttacctctagggatgcacgtgggtcgggctgggtcgacccaaggtctgacccacgatacccaaggcggtgatttgtgggtcatgggtcaagtcgacccacaaaacatgcttagcccactgacccaagagccatccatggggcggcccgcggccaacagcagcaagcaaactggaccgcatcatacaagcaaaatgacagcagcacagcagcacgcagcacagcagcgcgcaggcatcatacaaaccaaaaattcgtagatgattaatcatttgacatcagctgaaatcgaacaaatacaagcaaattgtagagctgaggatgcagagtcagttatacaggtaaatgatactattgataaaatcatcgccatcagatgcataaggggtttcttggttcataaaaaactgaaactaatcatttttcaatagcagatttgaccaaacaaatggttacaattatcattaggtcatcaacatatctattgtcaagaacatgagttgaggataagtctttgacatctcagcataaataggtgcaatgacacgacatggtccacaccaggaagcactgaaattttccacaacctacaaaacaaaacagtgagtatgtcaaaggtactagtttgcatcaagaatttaccaagtggatgagaatgcaagtgatattcagaacagctgagagtacaatataatgttgttcaacttgtttggatgagatacaaaatcaacataaaacagtcctaagtaacagacaaatgaggtttgaatcttttacaaacaaactagaacaatggaaaaaaacagttctacacatcagcataactagaaatgatgtacagggtactagatagaatatctgaatgcagttttcatggatcatttctgtcttaataactagaatatcagatttttttcactctcatccagagtcagttatacaggtgcatttcagtagcagctaattgatgccaatagtaattatatgtcaggtaaaagcctggagcacaaacagagctatcgaacagtaaaagcctcattacataacaatttccggtaaacaacacgattactaatgcactggaattacctatcaaggcatcaagtttcttcttcttgtgataagaccatcccaacagaagggcctagaacattaaaaaaacaattaactacataaactcaattggcactgtcatactaatagttttcaaagaaaaggggatagacttacaatcaacgactctcatccaatcctgtagacaaatgagagcctcaactatctcaggcgtcaatctacttctgtagtcattgattaccctccctcctgtactgaaagcattttcagatggaaccgttgatgctggaatggctaacacatcacgtgctatgtgtgagagtacaggatattttagtgagtttgccttccaccaggttaagatatcaaaatcatcaactcgaggcagtatatcttctttatagtatagcaccaacaacgatctgaggggtctccatgctttgaccaccttctgcataccaacaacataacatattgcaaaaattaatttcattattacgcacttaatcaacatcagcaaaaaaaaatacaaattgttaatgccaaggaataatacgatccatttacacacttctaccctggccaccggctaatcgagtcaccggctggcctggcaataactgaaagcatcctaccagcaaaatttagtgttgtgtaggcgtgtagcacatacttgcaaagatataactagagtttcttttggagtagtatctattaaggaggagtagtatcattgttggctctgctgccgtacaaaatcaacctaaaaccgacaaactgataggaaccaagtaccattgctagcattagtattcaaacataaggccaagcagaaatttctagatactattcaggaggtcactagagagtagagacatattaggcaggaaaagaccaatttctcattgtctgtagaaaaatcttaaggcagccaaggagacaaaatctacctctgcttaaacaggtccaaaagaaacagatcaaggtccagggcaaactgaatcacagttctcactataatctgatgatactcacgtttccttttggaacctgacttagctttcattgaatctttgcccttcaggaactgattctaaatctatgccaaattcccaatataatgcacacgtccaatcaattcctcccaatttcttgattcaaagcaaatagagaatcttgcatacctgcagcatcaacacatgttgaggtccgtcgttggcggcggcgcggcgagagtgatgctgggtgtggcgctgaaaggtggagcatccgcccatctgatccatccccttcttctatggccggttgggaggtctgctggtggcggctacgcggcaatcttgggggtgcgcatggcgctgcagggaggagaaacggagcatccaagcggcgatcttgagggtgcgcatctcgctcttccatggtagacggcaacggcggaggggcggagctccacaacatgatgcggcggaggagcggagagccccagcgcgatgcggcggcggcggagctggtcgtgccgcctggtactcgacctgaaacctagctaatgggtcggcccataatgctccatgggtcactgagggtcgacccatgatgacccatgaaatttcatgggtaagcccatgaggttttgaccccatgtttcatgggctgggtcgctgggtagctgggttaacccgacccatgtgcatccctacttacgaatttttttcgtttttagattttttttaatatttacagaaataatctatcgaccaaaaaaattgcagaaatagcccctgccgcccatacagagggcggcaaggggctaattgcaattttggccgcccataaagagcttgcggccgtactttttcatctgggtcccttgccgcctcaatagagggcggcaaaggacccagatgaaaaaagtacggccaaaagatttttctatgttatgttaataataaataaagaagtatttattggtaaaacttgttaatattgttataaaaatgtgttgaagttggttgttgcgcaatttcatatgttaagtgaggtattattttgttccttattcgacgtattagtactcggataatttatataggcctatcgcagtctgggtcgtagaaacattatatggacttaaacaaggagaattatgtaacatgaagaaatagtagtacaatttgaacatgatacaactatttgcattgcggttacatagatgatattagattcgaactaggagggaggtagtgcaatagttgaacacaacgacgatgtagtaatgggacaaggaagcatgacagtagaaatttcaatatgcccctaacatgtgaacgtggtggggtatggtgggtacgcttgattggcaccgaaagatacatgcatgatcggcgccgaaagttacattggtcgtatgcgccaaatggcgggcaaatactcgtatcacacgcgaataaaggaggctgcatcggtgcggcagaaagtagtcgtgcatgcgccgaaaggtatcgtgcatgcgccaaaaggtatcgtgcacatataacaacaacgtagtcattacacaagcatacagttctggaaagtgaagcaagtaaacaaagagaagactgctctactggcgctgccccgcgccgcgaccacgcttggtcctccgggcctgtgctcgcacgtggtcctaggagtaggtgaaacgatccggtggcacagcacgggtagcacgagtgtcccgcggaggagtggcctgcgcctgatcctgcgtctgcaccggcggtgcgcctcccaactgtgaggggccgatgacgtcctctgtcgagcctgaagcgaagtcgaagtcagtgatgtcgaagaggaaggtggaaggcagcaagcggtccgacgaggtcccagcatggtccagtggtggaccctgactcgacgtgccggctgcctgtgacgaagtcccggtgtactgccagaactgcgctgagtgcgaggtcgacacagctgcctgagacgctgaccctgcagcctgggagaagtgggcggcctgcatcatagcgaactgggcgaaacctacacatcgacaacgggacccttgtaagctaagacataaaatgcatgtaaattgattgtcgaagtaatattctttttttaagtacctgtggggggcacaacagaaggcctagccgaggaaggcggggtgctgaacggtgcacgaaaccctgaagcaatcggcaagtgaaacgactcacttatatgtgcgaggcatgtacagaaatagtaataaaaatacttacctccgtgcggagggggtctcggcctaggaacgtgcgcagctggatggggaccagtcggttcgggtggccgctgtacagctgcgtctgcccgagcaacgtcgtctgcacgacaggtgagcactcgaagaatcgagcgcatcgactccaccatccacgtgtacgtcgtcaggtgctcctctacgggtaccggaatccctgcatctaaatgttggatcgtcgttgaaccatcaacgacgacccggttgatgtcgtcgacctgcatggttaatttgttcgtaaatattcgtaaaatttgacgaagagaaagacatgaaaacataaaggaatggtgcgatgcagggtactcatagcacgagcgaagtcctggtcgcggtgcctggcatagaggtctctagtgctcgcaacgtggggctgctgctccaagggagcgaaggtgaccctagtacgggtgcgtggctggtaccagcgtaggtaggcctggtacgactcctcagtgtgtggctctccctcgtggtccacgacctcctcggttgcgagcaaccagtcctcaacaaaagtcgccaacttggcggggccagtcgccagctgactgctgacccttgcgcgagtacctgcgaattaatgtgtaatattagtgtgaaacgacagatgttacaaattattgtgaacaggcggattttaatgcaacaacggaaagcgtagtgcaagatcttaccggtgaacagcagctgggacggtggtcggaaacggtactggaaagggctgacggaagccgaactgccgcattacgcagaaaggggcgtgaggctcaacgcagatgtcgaataccatcggaaccatagtcatccagtacgcctggtccctggtgcagagtgtggacagacccaacggcgcacgagcctgggtagctgcggcactgttgggctcccacacgacgtcagtcggcagaaggcggtcgaactccataacaaactcaggatacgaccgcctaacctggacgtgagcccatcggcgctgcaatacgagacgatcgatgtgatgtacaatgaacttagcaattaacttaacaatacgataagatcgatgcaacgtacctgacgacggcaccacagagtacccatcgtagggtagtcgacctctggtcgctcctcgtacagtgactcctcgtacgcgtgctggtccacctcagggcggccgatcgcaatcctctcagctgcccagatagaaagaaagagagggcacccaccaaaggtcgcgctgggatccgtcttcatgcaagactcacaaagtgcacggtacagagccgccaacaacgcggaaccccagctccactgaggcacctcgcctaccgcggcgtcggcgatgctcctggcgtagtgcacgagtcccttgtcgaccgcgtgcccgtgaccgccacagaacatcacccagccaaaaagccagagcaagtacgcctccaaacatcggctgtaggagtactcgtcggcctccgcctgtagctgctcaacctgcaagccgtcgataaaatgttaggcaccttaactgcggactaaatatgtaatacgattgtcatttcggtacaaaaacactcacggtgaattgaagcagccacctcttcgtaggtccggtgttgcggtggtgtgccaacggctcgagcgggaggtgcggtgcgcgctgtaatagtgcgaaacgtgccgtcagatcgtcctgtcagtccacagccatggtcactggcccaacagcgtctcccgcgagcggtagccccaacaagtacgatacgtcctgtagggtaggggctatctcaccgcacggcaagtgaaaagtgtgcgtctctggcctccatcgatcgaccaaagctgctaggagggacctgtccacagtccatcgtctgggcgggtccgcgtcgccggccgcagcctccaccagccgacacatcggtaggaggccggcctcacgtagcctgcaataacaaattaatatgtaattataaaaaatattacagtgcaactaacttatagtaaaacactgttcgtacctctcgacaaaggagtcgtgaaccgtgagtagctcaccgcacgtccgtgcccggaacgtcccaagctgagccccctgcaccgcagtaaggtgagaccggtgtcggagatctatcgccgggtccaacagctgaggtgtatcctgacgtgccatctctgaaaaatatagtgtttcgtgttagaacaattcaaaaagtagtaatgtaaaacaaaagatgactcgcaaattaatgaaatactcaaaaaatcatgagaataattacgtacaacaagagtacagcttatttaaataaagcaaacgttagtaatggtacataacgatgacgtgcaatttaacatatatgtagagttcgataatataacataacataacataacattacgtgtcgaagtccgacatacatcagcatacctaaagacactatgtgccttagtctgacgttacatcacgagaactaaagacatgacaagccgaagtctgaaattacacgacgaaacataaacacatcgataagttcgaaacaaattacaagcaaacccacatgccaacatagaacataagaactacaccatgtagccagacgtggcacgacgacgcctaggacgtggtcgagtggaggtagtgccttcacccgtagggcgagctccatctgctgctgatcctgatagtcctgcctccgccgcacttggtttctccttgtctttaggacaatgcttataggtgtgcccacgttaatcgcatttgctgcaacgcttcaccctgccagcctccgactcgtccatattgttgcggatgcgacgagtcctcctccttccagccttgcctcggagcttcgatgggtcaggaatattgagtacttcatcgttagtctctgtgaactccccagctatgccgaacccgtaaatctcgccgctccatgtatgatatattgcttgcttactgaagtactgcgacacatatactgcatctggtatgccacactccgctgcggcagcaatgacatgggtgcatggcctgtggagcagcttcggctttgaacaagagcaatgacatgtgccgtcggctttgagaacacactcctgcttcactctcttgcggtagatacccctgcctgccttatcttgacatagtatctcgaacctatgttgttgggtaccttgcactagagctcgatgtttcatggcctttttacgcaactcctctagctttttctgcatgaaagttccaaacaaaatgctgttgttcggcatagagggaagaactgcctagaaccgatccctaaaatacctgcatgtcccatgtaaaatgaactccactatgccaactagtggcagtccacggacaccgcgcatcacccagttgtaaacttctgccaaatttgttgtcattattacatatctagcaccaccggtgtcatacaccttggcccatttctcttttggttcatgcagaatccactgagaaaatttccgaatctccaatccagttcttctaaccaaagttggactatctgttgggagaggtccaagagcttgaggagggtcatcaacggcagtcgatggagccgctgcacgctgattactgcatttggctgtcaactcatctaatctcttccaaagctcattgaattttttctcctggttctgattgcacagcctcttgaacatgttcatgagctccttgttcttgaattgcttgaagaaattagctcccatatgacgcatgcaccacctactctgtacatcgtcccaaacaccagggtatcctcgttccatgctcccaaacagaaactcttctatcgctcgcagaatgccagcgtgcctatcatgtatcaggcacacatttggcctcataccaacaacttttgttttaaccaatttcaggaaccagtaccagctgtcggtattctcactctcaacaaaagcaaatgccaagggcaatacctgattgttcccatctacccctattgctgtcagtatctggccccgatactttcctgtcaagaatgtcccatcaatgcagagaactggacgacagttcacgaatgccatcttgcatgcatgtagagctaagaacgccctttgcagcacactcttgccaggatgttcaattgatgggaatttcttcacttcgtaagagctcctagggtttctttcctcgataacaccaagcaggcgtggcaaattgtcatacgaggcttcgtatgttccaaatctcatctctattattttctgtttggccctccaggccttggcatagctaatagtatacttgtatgtctcctcgatgtgtcggattattgaccttggttcgtatgtgagattatcgatgacatgcgcatacatctcagatgcgacaaatgcacatgtaatgttcctgtggtatttctgaacaccaggtagaaaacatgtatgcttggtaacgactgacactgtccaataatccttccatttccccttgtacgcgtgcactctccagggacaaccatctttttccttaacacaccgaacttcatattgcgaccggttggacttggcaacccaaaactctctatgaagtgacactgcaaaatgttttaccgcctccttcatatcttctgctctactataaatcgctccctgaataacctcattttctttgtactcccatctcacactatcctcttcagagacgatcagcccagaaaaatcctgactagcccattctgctggattaatatccgtctcctcatctgacgaatcaccttcctctacacgctcgttgtcaaaatcctccctctccatttcatccacaatggctgcgacagtctccccctcgtcggccactccacctggttgaatgcccactggagctac

SEQ ID NO: 10100 - DNA, 60944 bp, Oryza sativa
cgaggtcggcggcctcgaaggtggtgccgtcgctggagaggaactgcccgagcgcgtccatggcggcctcgcgggagaagttgtagatcttgcggttgttctgccagtagctgaagtaagggttgggccagtagatgctggagaagttgccgttgtcgtagaagagggagagcatggcgtagtcgctgaacccgaggctgtagtagccggcggagagcagccggtcgcgcgacaccagccgcgtcgccgccgtcagccgctgcgccgggagcagcgtgtcggtggggaagtcgaagctctgccacagcgtcttgccgcaggcgtcctcgaccaccaggttgccggtgtcgtggagccggacgcgggcgccgccgctgccaccggcggcgggggtggaggagttccagaccacctcgccgccgtagtcggtgaggacgagcgcgccgcggcgcgcgtcgagcgtgacgcgcgcgcccttgctgtgcacggggcgcgcccgagccgcggtccagacgacggcgcggtcggcggcgcgcgcgaaccagacggagaaggtgaagacggtgggagacgcgtcgtagaagccggcggcgaacgtgccgtccggcgagcgcaggacgtcggtggcgtggtcctcgacggcgatcgaggcgccccgggcgagccactcacgcgccgcgtcgacgcgccgtggacatggacgcggcgacgagcttagcgtgatgatcacaagcaacgcgaaggttgcaaggcgagagttcatcatggcacatcaatcaggatgttgattctgacaggactgagattaggatgttgatttggactgtatagtgattacggttaatttttttgtcacacaagtcaagaattttgtgcgttccatcgcctgggcaccagtgactaccactaattaagatagtaatatggtaatagactagtgttagtgaaagcgatttgacttagatctgagtattgtatatgcataacgaggtgtacatgcacgttgcgtccaatggagtttgtgtgcatctgaactctgaaattctaaacttctgcttaaagaaagctgggtgagaagatagtagttctgttcacagcagtaattgggactacgattgattaatagaattatggggcaatttcatttttcccccactttcatctctaatattgattttgcccctactttttagggtttttgtttttgcccccactttttgaaccgaaaaatacttttgcccctgctttggatggaggagttaacggtgttaaatatgacatttataccctctcccatatctattcattaattgtgtttttgcccctattatgcatggctttggaaaattatttttgtgaatatgtttaaaattaaatgattgatttggacagattttgacattacaattgggacataatttgaatttgatggaattttgacaaaatttcggcagcattttgacagaaattgagcaaaaattttgacaaaatttcaacaacattttacacaatcatatgaagtcatatcagccttgcatcgttgacaataccacacttggcatacagattaatcagggcattgctcacatgcgaattgtccaccaacacaaccttttccgcatacacatgaaccctcctcccaagagcaagcgccccaatctctgcacaagcggttagaacactgactatggtgactccatctggcgcaaagttgacgcccagcatctcccggaagacagtgagaacctcgttagggcgcccgttggccgcaaagctgttgagcatcgaattccacgagacgaggttctgcccatgcaccggcatttcatcgaacaccttgtgcacgctctcgaacaggccacacgcgccgtagagatgaacgggcgagttttggacgaacccgttcttggcggcctcggtatggaggcactccccttcgcggagcgcgaggaggcgcgagcaagcctggagcagcgacgggtaggtgtgcgtgtcgggcggcgcgaggcggcggcggtggagctcgagcgcgacgcacgggcggaacgagcccgcagcgatgcggtgcacggtgttgagggggaacgggtctagtggcccgtgcgggaggaggcgggagagtaccgccacggcgtagcggagcggcggcgcgcggaggacggcgaggtggaagaggaggtgcttggcgaggagcgggtgggaggtgggcacaccggcccggagcgcccgcgcatggatctgcttggcggcagcgagggatggcgcggcgaggtggacgggatcgcctcgctcctccaaccaccctatcagccaccgccgccgccgcccaacctagccctctccccccagcctagccctctcgccgccgccgacccctctcctgctcgccggtgggaggagctgtgctctagccgccgccgccgcctgtagactcgagagagaagcagcgagattgggggaaagaatcggttctctgttagactagtgccaggggtaaaaaagtagaacacaaattcgaaaaaaatttattttactgccatatagctggtcccactaacttccatccaaaccagggtaaacgtctcttccggttaaaaaaaagtgagggaaaaaataaaaaccctaaaaagtagaggcataatcaatattgaagatgaaagtgggggcaaaaacgaaattgtccctagaattatagaagtaatgtttgtatcataccagcagctgtgcagtatcaaatgcaggatgagctgagcagacaggaaaggttttgactgtcagttaatgttgggtgattttttagtcaacacttggtttgatgatctgtaccgttgactttgtaaacaaatgatctatattctactgtatgataaggttgaggtgctttgcggacaagcattaatcagccatcaatcaagccaatggagaagttccatgtagtttcaggattgggacacctcacagattttcagcgagtaaatgcatcatcacagcagctacaataacagactataagaatatattttaaggagataaaatagtgagcagagctgaactcagctgcgtctggagaaatttataatatgccactcaatagaggtactctaaccgaatgtcactatttaggatgttcttataaaaatgccactcaataaagataaagactcgttcttaataaaatgtcactttaggctattttgaggcttttaatcgcaaaagatgtgcggaatgacaaaaatacccatgtgtctttccctgcggcgataacgactccttctcggcgttggcgctgcggtggggcggcgggacggcggtggcggcgtcggcccctagcgcgactgagaggaaatcggccgtgcgtggacgggcgacgccgcgacggtagcacggccggccaggggcgcgcagacgggcggcgtcggcccctagctcctctcgactgcgcgcggtcaagtgacagcgacggcagcggcagctgggcgagcgcgcgccgacagggcggcggtggcggcgtcggcccctagcgtgccaagaagaagtcgtgagaaagagaagagacgcattctccagatctaaacgatcctaagggtatttcggtcatttcgcgagcttagtgtgagaaaaaaattaaaaatataaacaaataaaaaatgtctcaaaatagcccaaagtagcattttattaagaaacagtctctattgagtggcatttttataagaacatcctagagagcggtcttctgttaaagccacatctactaagtagcatattgttaagggcatgttcactttgaagccattttcaaccttaccaaattttggtaaagttaccaaaaaagtggctacatttagtttgctgtcaaattttagtaactatataagaaatcctaccaaaattttggtaagtcaactataccaaaattttggcattaccaaaatttggtaagttttttttttcgcataaagtgaaccggcactaaatttctccacctagatctgcacctgcaccagtacctgtacttgttctacttcttgttgtgcgaagtccagacccaattccaggctcaatcgtatcggcatcggtctcaggtaatgggcctaattccaggcccaacagtaagcaatgcagttcggtcatgggctcttcctcctcctatgcgtatagccgtataggaatagtcgtgtcgcgcctggattaggaccgcgctataaaatttaaaaatcaaggggttttttcgcaaaacgacgcgccctaacaacccaccccgcaagtcggcaaccctagccaccgccgccagtcccctcctcccccgcgctctccctctccccatcacgccgccgccgccgccgtcgcgtcgccgtccccgacgcctccgcctccctctcccgccgttcgccgcctcctttgccgaccgccaccgccccgcgccgccttccccgcctccgcctccgcgcatcgcaacgcaacctcaggcgcagaggcggcgacttgactccccccctccccgccctctcgctctagggtttcctcccttccccgtcatcagccgccaccccaccccctcccccgccgggcttcgccatgtacggtcaccgcgggtaagccaagcccctcctcttctttcttattcctgattaatctccgcaattccatcccgccgattcatccattgctttctttttttcctacaatacttgcttgcttacgcgatctcatcaatttctcgattcttttagggataatttctaagtaggtcactttgctttgctaccatgatatgatatgatatcatctgcctaggatttaggatacatgtacagcttcccccttacaagaccaaacctctctccccccaataaataaataaataaatcggaggcagtaatacatccaaattgatgtttcatcaactgcaccagcatcccaactgtggtttgtaagattcttttctactgatatgtgtcatccagtagtttgagtatttcttctattcatatgctgtcaacatttaattagtttttgtttatgtccactaatgcgttcgcatttcgactccattcacctttttaagccttaagtcatgtttagattactagtatttcttatctgtgcagttatctttatgtttgggttattttatatgaaatggggattgagagatggggggatcgtctcctttttttttcttttctctttttgggactctggattatctgaagggcaatgatgggaggcgggggggtttcggatgggtacgagggatcaaagaggccacgaatgatcgaatccaatccatacttcgcagtgaccgcaggcagtcccttggatgtctcaaagagggccaggatgatggaaccagcccctccctatttcggagccatgggcagcagcgctgctggtggcaccagtgccttctaccagccctacggcaccaacttacctggtgcaggggctaacagtgccatccagaactttccaggggtccgtctacgagggctcccctttgactgcgacgatcttgacatctgcaagttctttgttgggctggacatagtggactgcctcttggttcacaagaatggccgcttcaccggcgaggcttttgtcgtattcccatcagccatgcaagcagagtttgcactgcaccgcaaccggcagaacatgggcaggaggtatgttgaggtgttcagatgcaagaagcaagagtactacagtgcaatagctgctgaagtgaaccagggcggcttcttcgactcggagtaccgtcactccccacctcctccacggcccaagaaaccagctgaagacaagagcagcatggagtatactgaggtgctcaagctccgtggcctgccctactctgctaccactgaagacatcatcaagttctttgtggagtacgagctgacggacgaaaatgtgcacatcgtgtaccgtccagatggtaaggccactggagaagcctatgtggagttcccgacagcagaggttgtgaagacagccatgtgcaaggacaagatgaccattgggacaaggtacgtggagctgttcccatcaaccccagaggaggccagcagggcgaaatcgcgagtcaggcaatgaattatttgatccagtcatctactttgccctggccttgagcagctgtgttccagtttagctttcgccttgcatgcttaaactgtatccctcgcctttaggtttgtgtgtgtgtgttttagtatgcatcatgttgctaccgtgccacaacccgttggtgtggtgactttataagaacccgaattgcatttttaaaagaagtggtggattatgagatgcctgcactttaacagcagttgcgcctggttggatgcattttatatggcaatggcatgatcattgttttccttctgagtttgcgacagatgttctactgtatccccttctttttggtgaagcaggggatgaagctcgcactaactctgttccaaaagttggttgttaattaatatgaatatgcataaacataacgaggtgtacatcagtacatgcacgttgcggcccatggattgtgtgtgcatctgggatacggttttcccgattcctatgatctatccaatatgctaactctgaaactctaagcttcagcttaaagaaagctgggtgagaagatagtagtagctttttaattctgttcacatcactaattgggactacccccggacaacgattggttaagaccctgtttagatgggactaaaactttttaagtctctatcacatcggatttttggacactaattataaatattaaacgtagactattaataaaacccattcataatcttggactaattcgcgagacgaatctgttgagcctaattaatccatgattagcctatgtaatgctacaataaatattctctaattatggattaattaggtttaaaaaatttgtctcataaattagcttttatttatataattagttttataagtagtctatatttaatactctaaattagtgtctaaatacagagactaaagttaaatctctgtatccaaacaccacctaatagaagcaatgtttgtaacataccagcaccagcagctgtgcagtgtcaaatgcaggatgggctgagcagacaggaaagattttgattgtcagttgatgctggatgatttcttaatcaacacttggtttgatgatctgtaccgttgactttgtaaacaaaatatctatattctcatgtatgataaggctgaggtgctttgcagacaagcattaatcagccatcaatcagccagtggagaagttccatgtagtttcaggattgggacacctcacagattttcagcgagtcaatgcatcatcagtcaggacaaacacagacatgaaaaattgatggagttcatcaacaatattgtaatgctagccacctcaagaatctcagttatctaaaaataattacataactgcgaaatggctatgagtaataacattcaatcaatagctacacaacctattctctataggatggatttgatacaacgtctgatctctattggatctgatacaacttatgatagaaccccctactcattgggtagtcacactctttgccagattccttggttgatcaacatcaaatcctcgaagaactgtcagatggtatgcgagcagctgaaggaacaaataacaatacactcagtaaatgaaattgtttcacaaatgataaagcataagtagaagttctggaatttgatgaaattaaacaattcaaacaatgtgcaaacctgtaacggaattatgttaatcactggctggagacagtcagcgacctctggaacttcaataaccctgcaagatccactagggcaaactgcagatgcgtctccctttgagcacatcactatcagacgccccttgcgagaaaggagctgctgaatcactgactgttgcttgctgcaagaggtgaagatgtttagaggaactccttgaaaaatgaaaagaaaatgaacgtgctctgcagtctgtccaaagcgcttacctgaagcacgcatcacgtgtagcaatgacgatgatcggaaggttttcatccactagtgcaagtggtccatgcttcatttcaccagcaagcatgccttcgctgtgcatcagagcaacctccttaactttaagagcaccctctaaggcagtggcatagttataacctctgccaaacacaaggagagactctgaatcgatcaaggaagaggaaagttccttcatctcggtatcaagttttaaaacctcgctgacattgcctgtgtagtaaaatagacaaatttggaaaacgttgttcaaaagaaacaatttcctagactaaataatgcatttgttgatctaacacgacatacttggaagattggaaagaccactgatgatagcttgacgtctaacttgggtggatatttgatcagatccaacagccaaggccaccatcaccatgactactatttgacttgtatatgcctgcaagatatgagatattgttaggaatcaagacgaccaaaaaagggttgaagcatgagaatagacagaaattaaccttggtactagcaacacctatctcacaaccagcattgatatgaactccacaatgtgttcttcttgatagtgtgcttcctacggtatttgttatgccaacacaaagtgctccattttctagtgcataatcaagagcaaggagggtatctgctgtctcccctgactggctaacgaaaactgcagtgtcttccctgtagatgggaccttgtctgtccagcaagtcacttgcaacctccatagtcacaggaatacctattgtccaaataatgcaaggaagaagtatctgggtcaagaaacaggtagctaatacatattgtcactgatgttgacatctaaaatttctacataaggagtcaggacaataagttggcataccagttaattcctccacaaaaggtcttgcagccaaggcagcattgtaacttgtaccacagccaatgaaaactaaccttctactgcgcctaatagttttgaggtactccttttcctttaatcctcctaaaagaacaccactatccttcactctacccctcatggttgttgttaatgaatgtggctgttcatggatttccttttgcatgaagtggtcataacttcctttctttatctgctcaacttccatctcaaggacagacaatgctcgttgcacagaagctggcttctctttctcatggtcaaacttaaggatagacacactgccatcctgcaatggccaaattgttaaagcttggacaaggcatcaaatgtaaggctaatgatgtcaaagaaacaaaagaactgttgcactagcgtgttcacatattatttcagtcaataaaaaaccagtgacacaataaaagtacaattgtcaaattggcagaaaaaatggtataaaggaaatagataactttaggtctagaaaagatagattgccccccattaaaaatgatctttctttctaaaaaagaaagtaaaggcaaaatagaacagataaggcaggtgaatcaacagagaaagctgaagagtaccttaatatgaacaatttcatcatcttcgatagccaaataattcttggtatgctccacaatagcaaataaatcactagagaagaataattctttgggcttcccgtttgttgtcagagctttgacatcatgaaatggtttcccactattttggccacttaattcctgaaaatagagacaacagttacaaatataaaaaaaatgtttccaagtcaaagggaagcagaatatttatagtatctataaatatgtgtaaaaaaatgattacacaaaagataacttctaaccaaaccaacatcaccataaaagaaaattatttaatctgcaagcaatctactgcacagtttctcacgtttgcatttttatagaacaaaacatgtggcagttaaccagagcaagtagttcgtagttactctattgagtgtggattttatcgcaggttccactctatgggaagaaaaaaatggtagttcttagcaccttttgacaagccaacatttgtgagaaaatgcacttcatgttttctagtttgacacttttacctaatacatgtttgaagcagatggagataagaacggtgaagagacaacagagttaaagttaacttttgatgttaggtctagtactacataataaagtcaacttgaacagcaaaagatgtagctcaagagcataacacataattcttacacaaaataaaaatcactgttttactatgcttgattagaacctagctgatagtttaagacaaaccaggatgcacttacattgacaccgagtatcagtgtgctgccccgtttgcatgcaatcaattcattggggtagtgtgggcttttaaagataagtgcgtaggctccttcaagctgcctcatgacttccataacaacttggctaaatgtcacatcacctgagaaaataataaaaagttgccttaactagaactagtacagtaagaccaacatatagaatctagttaccgatttcttttccttttgaattttgtaagaattctcctgccttgttaagagtaatgtattgcctaaataaaaatttctgagcgcgaaaagcataataaggtatatttattgcctcatctagttcttaggtggcaaatctagtttccaacatagatcatagtagtataattcttgctccaaagaaatgataatataattataacttgagaatgaaaggtttagctaaagatcagggagtacatcttgtctgttgtcaagaatataaataccttcttcatcatgcgccttatcaaaaacaaactttgccaacttagggatgacttctgtgtcagtatcagactcaaaggtgaacccgtgccggattagtgtctctttcagaacctgagcagatacatcagaaataccaagttatgatggaaatttatctgtttacatcattatcatctcttgctacattaatttgagatggtatcatgaggttacacatgatcatgaaaccaagtttgagatggttggctgattcataaatgtctaataaacttattgtgaattcagtatattgtcatttgccacttctataagataatattctctgcattacaacgacaataatctagcaaaatgagatagaactcactgatattctagttgctagttaatctacagcagttattttattccagtaaaagcatatgagctttcaactaaacggcagattatttaacaacaatagtgaggcgtctatggagattggagacagcccatgtgcagggcttggaagataacatgttggccaatagcataaatccaccatagttgcaataatgcatgtggattccccagctgtaaagatgatgagagaaatactatacaagaattctagtacaatatcagaacttcagaagagcaaggtaaacaagaacctcgtagtttgtgatgatgccattgtggacgaccaagaactcatcgccggcaccagaagattgggggtggctgttccttggggcaggcacaccatgcgtggcccacctggtgtgggcaattccagcatgcacattgaaggcggcgtccaggttcacatccttctcatcaacctctgaaaaatacacaaacatccaacatgacaaaagatagagtacaagagagcaccaaaattgtagccgagactaattgtatacggtataaatcgtcaggaaatccagagagaaaggaaatcagctctccaagtggtaaattgaataaatcaccgaaaatgccataaacccaagaagatttagagttgatccgaatgggtcaaattctaccttttctgaggagatccagaattttgggagctatgctatgccaatcccaaaaatgcaaagtgcgaacagaagaatttccctcgcaaggataactaaacccaaaatcgctaaacgacataatgatattccccaaaatgtgatatggatcccaatcaaaatccaaagcttttaccaagtgatacagccaagtcagaccacatagcacatggaaatcgtgcaaaaatccatcccaagaacccaaaattcaacccatttttcagcataatcaggagggaaaaggcactgaccggagtagacggatcgtacgaggttctcgatcttgccctcctggcggaacaccagcggggacgccccggcataggccggcaccgccgtagaagaagaagaagaagcgcaggagggaacgtcggcgtcgacggcgatgccggaggagtcgtagccgcggtactcgaggcggcggaggccattgaagaggacctcgaggatgtagcggcgctcccgcgacacattgtagttgaggtacgcgaagatcccgcacatcgtgcgccgcgccgcgctgggctgggcttctagaagcttccagaagtttccgggttcgggagagagagagagagggaggacgcggttacgacggcggcgaggagtcgccggccgaggcggaggaagaagaggagaaaaaggccgcgtttttttttttttgataggagaaggccgcgtatttgggtacgcggagtcaaagcccaaattttatactgatcgagtacagcaggacaggctgacgtgtagcctgtgacccagtagccgcacgatttggatcggacggctactgtagcgcacagctcttcgaaaggaaaaatggaaatctaggtgctccttactccctcaagttccatttctgtgcctaacaaactttgatcatatatcttatttaattttatttataattagtacttttattgttataagatgataacacataaatagtactttatgcgaaacttatgtttttaactttttttaaaaatattttaaataagacaaacaattaaagttagacacggaaaatcatggccatcctccttaaaatggaagggagtgagtgagtactcattacgggcggctgtcacttgtcatcacgtcaatgttaatacatgtgtagtacgtgttaaaaaaaatgctaatacatgtgtagatttgtcatgcttgtgccacgcgtcgcgtttctgattaatttggacgtcgatttttactcgtagttgcagtagatgacaactgagtgcgtgttttaagccatagtatggatcagatattttttggagagaaatatgcacacgtgttaggattttcagtcgtgttaatttgacactgagagattgtgtttattgctaattggagtgattaaagttgtagattagatggaatggatgcatggagtaacccaagtcagagtagcaaaggtctgggactggtcagcaaagggcagcgtggacgtagctcctctttcttttcttgcttgactcattctccctaaaaatctcctaccatctgcctaccagtttccaagaaacaaacaagtaccccccatgtttctgaaatttgatacttgtctattttgcttatgtcaagtatatagtaatgactaaactacgttctcatgcgataccacgtgattaatcaagtgtataactggtctactatttctttctctaatgggcactacccgagttctaaaaacacacacccaaatgaataatacgataattatcactggattgatgttgcttcagtttccagcctcccgaaaagaagcttccattactccaaagaactgttcactagagtacagataaacagagggaaccatacaaccagtccagagggacccaacgcagtgccaaacgtcaccatttcatgggcaatattgttacaagctctaggacagaacgtacatctctttactacatcaaaacggaaacaaagtccctagcttcacggataacaacagcatttgaaccgtcatctcataaatttgtcatccttaagagcttggaacagttagttgcttagattcggtttctgatataatctgacttgtacaaagcaaatcgccaattaagagctccaataccatagcttctgcttgtaacatatctttgtaaataaattcattgatctttcagctccttgacagcactgcatcttttatcatacacttacatggagttctgccctgcaggggatcacagagcagggcatagtacagtcaagaataatacagggaagcatatactccccttcgtcccaatttaaatgcaaccatgattttctgtgtccaactttgatcatctgtcttatttaaaaacaataaaaaaaacaaaaaaaaaacataagtcacgcataaagtaatattcatgttttataatctcataacaataaaaatactaattataaaaaaacaaatcaaataagacgaacgattaaaattaagcatggaaacttatggttgctcttaaaatggaacggatggagtatttccagcggggatcacggatggacatacatacagtacagcagatatattgggggcgccggccagtcctcagctttgtccacacctgtttctcaacatttttctatgctagttgctcctaacttggcctactgtcctccatctccaacaacacaagagtacaagacaagtactacaacggcaacaactatgcatgacatcaaaacgaaagctgggacctcgtcgatcaaagctaagcacaggcacataacaccctcaatgcaaccagcagcagcgaggaggccatgctgccatgaatcatgatcatggcgtcatcacaggagttcgaggctaatgacccacagcagctgcacgccaagcccaagaggctctaccaagtctggaagggaaacaacgtacctgctctttctttctttctttctttcttgctccagcgatctggctacagcttcttcaacttcatagcagcgaggtagactgattttccttcattttgcagatattcctgtgtggtggacgccttattattggcccggatgcagcctccctgctgctttccatgtttctcatccttggcccggccatcgtcttcagctatcagatggagtccacaatccaccgctctcaacaacggatgcatcgagctgcacagctgatagtcatcatcacaacagcagcggttagtgaatccccaaatcatttataagttgcttcttcacatataattttgattgccaatccgttctctagtgacatataccaaacaattaatccgcatggtagtcacagtgatttcagcttcaatatctgaaactgaaatcagtcaatcaggggttcaagattccacaagtctaatttccactatacaacatgtctagcactgtacagtcatgtgaatttcaccttcaaattgcaggaccttttcttcctcttcatgacatcagccagggacccagggatagtgccaaggaacacaagagcaccacctgaagtcgatgaatttcttggctcaaccacaccatcgatggagtggagctcagggagaactccgcggatgaggttccgtaggtcaaaggatgttacagtcaatggcttcacggtgaaggtgaagttttgcgagacctgcctaaggtaccgcccaccacgatcctcacattgctccatctgcaacaactgcgtcgaaaagtttgatcaccactgtccatgggtcggccaatgcattggacttgtaagtaaacaatcaatgatgcagtaatcagtatagtcatcagcctaattcaatgtgcagttccagtactatttgtttccatagtgtttttagaaatatggtagagtataaccactatgcaatgaatttctcttaaaaaaaagctctatggaatgaatgaacttactttcaagtttccataagatgctggtaaatatgccaaaagagttcttccctctccaatggttaatgtccagccaaattccttccagtcatcttcagcatttgactatttataagttattcataaagctacagagcttaacaagacatttagacttgaatttgtgagttataactttactttttagctaaaaggactcctcaatcatctaagttgaattacaccaggctcaatgtaagctattttttaattacaaaatcatcaagaatgagttgttaactagttccactgtttgactagacgtgcagataaggttaggcacctatgggaacagaacaatgaaattttcagagcaagacctaaactgtacctaacatacattttttaggactaaagcacatatttcgaaaagaatttctcgcaattaatgcagtgaacctaaggtcaaggaataacttatgtgaaagagcaggttaaccaagcactaatgatcatctgaactctatatttcagcaactcacaaatctcttatacagaaatgatgttaaagtattcttaagtgcgtgatcaatcattgcactctcggatggtttccacttgcttatcaaaatcatgccattttctattttttcttgcagaggaactaccgctacttctttctgtttgtagcgacatcgactttcctgtgcatatttgttttcatcttttcatgggtgaatgtctactatgaaaggggatacaatggcggatccatctggaaggctttgcgaaaggaagtatactcatttgtgctaatcatatatacttttatcgttgtatggtttgttggtggtctcacagtatttcatctttatctgatcagtactaatcaggtaaacctactttcttctttagctattctagagactttgctatagttactggttctcttatactgtaattcagtaaatgcattttaatgagtagacagtattaagagtttgagatagttctgataacttcaactagcagctccatacacggtgtttagttgtgtactgaatgtctaactagatccaactgcaaattctgcagacaacatatgaaaacttcagataccactacaacaaggacaacccctaccgaaagagcattgcagcaaactttgtagatgtgttcttcaccaagatccctccaccccagaacaatttccgttcatgggtaggtgagggcgcactggaagctggattttatactccatatattgcgctggatttgactgatccaagggaaaagattgatttagagatgggaaacaaggatatacttgttgggggtattcagatcccaacagtgcttcagaacatagactatggttcctttgaagataatccagatgacaagaacaggaatgaagatgatagactagtgccttttgcttcaacttgggcacaacaagcaaatgaaggtgctcgaacatctgaaatagctactgtagaatataaggacgaaataagtgaagatggtggtaaggaaattattagttcaaacacaagttcagaacaaacatcaatagaagctaatgcagcagcatctgaggatgaaagcaatgaggacaatgctggaaaaagtaacagttcagatagaagttctacccaaaatttgggggatgtgaactatagctctgtattactcatctaaattgataatctgttcatatacatggccattatgagttgacattattcttagcattacacatgataaataaaaacagaaaatgaatgactgtatgcctcagccaaaatttttagaatgtattagtttacgtctagaagcccatgttgcactgttcacgctttcctgcactatatgtttctaatttctgtagcatgtgggccgtaatgtggacataaaaagaaaagagttctgttgattgattactaccttaatgatgcaacagttcagattgctctactgcctttatggtactacaaaggtgaagctaacgatgcagatgtggagcaagtcacagaaggggcttgacattcacaaaataatccataaagcaggaccaagataatgtaaattgttaagtaatgattccattgctcattatttggtaaaaaaaaatacagctgcttacagcttacaagctaaactttccagactaactgaaatctggaatttgaaagcaaattactggtcgctaaaaggcagtaccaaagattgcacatttctgcaaaaatgaaattcctcacgcctgatagacatctggaagctgaaggcctacactggcagcagatttgttcaatatcttcttcatctcctctgatcggtccacagctatattatacgagaatagcaggtcctgggcaatcaaacatgatttacagagttaacatggtatacagtgcatgaacaaccaatctaaactaggtgtgatgtactgggaagtgggaattagcaatgaagcaactgcgagtttgtatactaaaacacaccgaaggaagttcaattcatcacgttaatcagagtttgatttggggaaaaaaatagcaaggaacccaatagaaaggggagtttcagtcaaaaaaaaatagaaaggggaaagaagccttctagccatttcatcgaacacatttatctgctaaaacaatgcgcaaaacaggagaagattatacgcatctagaaatggctccaaccttgtggtggtggacgctggcgaggaggtaggcgtaatccccggcgagccgcagccgcgctctggcgtcggcgtccgtgccagtggggcggcggaactcggaggcgacgaactcgcggaagtgcttcttggagtccccccgccgacgtgcttctgcaccgccttgagcacccgccggtagacggccgccgacgtggccaccatcgatctgtccacggatccgccgcgagaggaggcaatcggacgcggagactgcgggtcgccggcctcgccttcttggccgtgtcgatcgaactggaactgtagaggaggaggaggaggaggaataggtaggcgtccccttgccggagattctcctctgcagttgccggagttcgccggagcttctccgccttcttcaggaaggagtaaaggacagagtaaagggactgaagtaaaaaaaattgcaaagaatgaaaagggctattctgcaaatatccatcttcatcctgagcctcaatctgaccgtccatcttcgatctaacgcccaaaacatttgcaaatcagaccatggtttggtttggattggactgctacgagtttgcatataaccaaaaatgcttctcgctcgaacatttcagcataaaataacttttttctttatttgaagatggcttatcaatactttattatatctattataaagctttaagtttttccagggcggatccaggaatgaaaaatagaaggggctcaacatacgggaaaaaccgacataaacatatcatgtctcatacaatattacagtatcaacaggtacccctatatcatggtctgcaatttcgattctaaaaaatttaggaattctgcaacaccatcccccaaggaaactatcacacccaaataaaatcatttttcttgtgaagtttaacaaaatctattcaattttggtaaaaaaaaaattcaaatatcgaaaaactttcttgcctaaaaatttcgaaatttgcagtactaatcttgaattcctagctaatctaagctccctgattcaaatattggccatctttgtttaggcttaaacttattggcttagacttttaagtcagcttattggcttatatgatttataagccagtgaatttaatgtcctaagtttagtggtagagtcatacatctatcttatataagccaaaaaaagcttctccaacttagcttttggcttaatagtgtaagagtggcttataactttaagaaagccaaacgaaaaaactgcttgtttgtttaggcttagactttttggcttataagttgacttataagcctaaacaaagaggaccttaatagtggaagggatcgccaatatatcgggttttacggttatgtgatacaaatcaaatcagatttgcccaataattgagcgagtaaaaacgaactttttcctactttttgcagcacgcctgatgatgcgtttgtgatatcgtgggcctcaaccaggtgccagcactcccgtcctgaggccatcgacgcttcccatataattttggcccggaactccaattccatcacatacaatatcggcccagtatgtttgtgggcttccggcccaaatcgccttgggctgtagcctacgggtactcaggtctctgggggagtcaagggtttaacccgtcctgcgacgcggagcaccggccgccgctcgccgacgcaagacaacgacgatgccgagcttccctccgcccggcaccgtcaccatctgcgagatcaaccgcgacctaggtgtgctatccactccctgctccccctctctctgctgtctccaatccgcttcgcttgctagctgggctgctcattccaagtctgtgcgttgcagttgcggcggatgcgctgtccgacgatggagccaaggatgcctacggggatgtcctcgtcagtacactcccatcttccccccttcctcctccgcctcgcatagtttcgtctttcttctttttcacaacactaattttattaggcctctaattgaaactttaatttgggatttcttctccagggaatggtcttcagcccgattcctttccagccggatgcgattgttgccacccacgagcctcctgctgtcactgaagctgctgagattgtccccagaacaagtttagcttccaccgtagctgagtccttcaaacaaatgctattcccttcttgcgatgtgagttggttctttatcatatcttagtgactcaattgcgaataattaatatatctccatattctgtttatgtcataatatcagttggcatagtatactgttagattgaatttatttatttatttttaatataagggaggaatatgcctctggtcagcgtcatatcatgacaatgttgcatttgtgaaatctggtacctttcctagaggttctagtggccaagggatgcttgtggacattctctattgttcttctgctgaaggtagtagcctagtaggaaaggatcctatggcttacaaaatattgtatactcgcttcaacaaattatagatatcatcgtcgaaaaaagtacagatatatttttcatccatatgatttcactaaaggaggtaaaattactgaaggcgtgcagggtattgaaatgaacactcaaagtcatataatggatgaaacataatttatgtcatactgagtgcatgcactgtatcgaaatgaacactcaaagtcatataagtgaccaaacattaacttatggcatagaagggattaagtgaaaacttagtgaaacataaagaacattctcttttaaatatcggtgtccctggaaacagataagtggtattttcaccagataaaatgtagaccccagaattttgcattccaaaattagttaccagtaatcggtcagaaattttaacatgagaaaagaaaaaagatctgacatataaaatacattaatacatcacaaatagatcataatgattgtagggatataatccatagggacatgcttcacaaaaaaagtatataacatacaatagttccaccacaaatgtggcaattgatttaattctagaactggatgtgagtatttctttttccttcagaaatgtaacaacaaataaacttgaaagagaagatgaagttggcatacttccaaagttgaatttaaattgttccaatcaatttattggtactggttcattggcttaggagcggcaactgatcacttaccgctggctgtatcatgactcctctttgtgcatattcaacactgcattatttaattttgtcttctaattaacatacttgctccatttttcagttcttccttaaggaccaatgctgtgtctaatttccataccctcgaggataagtcctttcttcgagttgagctggacgatctcttgcaggttgataacaaccattccatctccttggtggttgtagaagtgccccagttgtacctccatccagccgtcaccccgttctctcggatagctcactgtctcctctgctcgtcctacttcgcttctacccatgtcaagaggtgtctcttgcgtgcgtgggtgcagagagacggtgcgcttggcagacactacttgatcgtccatggtgatatatgcctcttgtgtccggcagtcaagcccgtatgatttatctgccaatttgaagatgagatagactatgtatcgtgtgttgggtgagagctctctgcagttgatgcggccacgcaaatggaaccagcagacaaatacaagcgcagctactctttcaaacctgaaacaaggagaaactttggtttttgtttaattatcgagaaaaaaaatcaaagcaaatcaaagaatagtatgtatattgaatttaaacactatctgattgagaatgtttattatagtttatttcttaatgattttgtatttctaaaagaagtgtcatgtatatgtgattatgtttgcaaaataagtgcttcagatttatcctccacgtttgggatgcaaacctggaatcgggtaagtagatccatctccagtaccgggcatcatccccccatgctatctctaatgatctggatgatagcaagtagcatttagctccgcttgttctttccaaccaaaaactctggatgcaaatgtgcaaattagtcgcgcgcattcatttacttagcatcaagataacaagaagttagcactaatattgaacaaaataatggattttccctggcaacattgcgtggagctagattgtaatattagactttgatttaatatacaactcgtagctcctcaatacaattgtattttgtatatagtagatttaagaatatagaattgaatttgatttacaactcttagtttctactttcgtaggtacaattatttgtatacaatacaacaaaagtgggattggaactaatatacaactgttgacatttatttatgtgaatacaattattttttctttaaaaacaactatattgatgtaacgacccgcctctcccaggccaggaccgcttacatatgacagctttcataggtcatatactatgaaacgttttatgacctattttaagtgactacatatggcagctttcatgtcctcccagagagacacaagtcttttatgcacactatatatgacagctttcatagtcttttatgcacactacatatggcagctttcataggtcaagtcttttatgcacactatatatggcagctttcatagtcttttatacacactacattatgcacactacatatggcagctttcataggtcacatgtcctcacttgtgcgcacccgggaggtcttttatgcacactacatatggcagttttcataggtcatatactgtcctcatagagacacacaagtcttttatgcacactacatatggcagctttcatgtcctcacatgtcctcacttgtgcgcacccgggaggtcacccatcccctcacttgtgcgcacccgggaggaccctggagttctttggagatcagcttctggaaaagaagttgcaacttgttaatatgagtactctattaagcaacttgttgatatgagtattctattaatcctattaagccctaggctagaatgttctggcagctttcataggtcatagactactctgtgtggtatgttctagcagctttcataggtcatagactgctctgtgtggaaaagaagttgcaacttattgatatgagtattctattaattctattaagccctaggctgggatgttctggcagctttcataggtcatagactgctctgtgtggaaaagaagttgcaacttattgatatgagtattctattaatcctattaagccctaggttgggatgttctggcagctttcataggtcatagactactctgtgttgtatgttctggcagctttcataggtcatagactgctctgtgtggaaaagaagttgcaacttattgatatgagtattctattaatcctattaagccttatgctgggatgttctggcagctttcataggtcatagactgctctgttctggcagctttcataggtcatagactgctctgttctggcaactttcataggtcatagactgctctgtgtgaaaaagaagttgcaacttattgatatgagtattctattaatcctattaagccctaggcaaaattgctccaggccaagcacgtttaaccctggagttctttggagatcggcttccagaaaagaagttacaacttattgatatgagtattctattaatcctattaagccctaggctgggatgtcacaattgataattctgcaccatcataatttgaatagatcaaaatctaatggtttaaataattttcttttttcaattaatatggtacggtttctatgccttccgagtgaaactaatgattttctttttcgagctatcttaataatataaccaatgaatgtttttttctcgcaaacttttgtgcggagctagataaaagtaggattagaatttgataaacaattcatatcttatgtttctataaatatatgatttatatatgatactaaaaatagtattagatttcatatacacctttatcttatgtttccgtgcatatagttgtaatttgtataaactattttaaaagtaaaaatagatttaatatataaatcttagcttttgtttcaggtactcatattttgtatacaaatttatcaatcaatctatgcttataaggctataacttatattttgtatacaattgtgttttgtttttctctccgactaatgcgaggtgtgatggttcttttttaaccatcttaactgtatactactccattaggttacaaacgttagacatttagggtgtgtttggttgggtggataagactggatgggagatagccgcttgattttttatggtacatgtggatggggcggtctagaaaagggaatatttcctcaatatgctagatgagtgtatacggcttatttggccggatgaagccatccatgctttcgtatgggtgacgtgtcatattctgattagttgtgcttggtttgatttttttctcctaaaccgtttatctaatttataatttgattacaccattatattagttacaattaaatatttaaaacaagatctcgaatgattatattttgattaaatatatatatatgacaaatgggtcccactaaatttggcttatcccatccatgctctatccctccaactaaacaagaaatttgatcatcctatacatacaaaccaaacaaaaaaaaattagatcgtcatatccaataaaatatggatgaccatatcttatccatgcatgatcatgaaccaaatgcacacttaaggccaagattcggtcatatttttggaacttgaccatcaagtgatttctgaaatggttagtttaaaaacaaataattacggtatgtacttatttgcctcaaagagtagctagaattataaggtttaaaagtttgactaaatcatgtccaaaacaatggggagtattaacagtggtacagctgtggggggtgccggagggggccaacacctcctatccaaacaccaccaccgccaccctcacctgtttttactctatattgaggttaactaagatatgtatttatctagtttatttgtgtagcttgaaattattatcagtttagttagcaagtctaaaaaaacattagcaagaaacatgatctacaaaattagtttgtgatttctcatctttttcaaagtaaaatagaatatacttatttgtgagattattcaatagtttacattaaaaggatttaacaataaaaactagttccaaactttcaatgatattattaaagagctaattaagattcaagtttttttaaaggattagtttacacgcattgattgttattgacagtaactacttgacctcctttgctatcgatattggtaattcagtcttatggcttatccccaccccccacaccccctaatcttaaatcctaggtattatacgtaccttgctgcgttggtcgagaaggacgtggtcctgggcgaggctgaggaagagctccttgttggaagtggtgaaatccacaggatcgtcggctcgagcgaggatggagtggtagtccggcggcaggaagcgctcccacacggcgttggagctcgccgctgcttggaagtcggcggagacggcggagcagcggcaggcgtccgtgggagtggtgaaggagattgcatgagccaggcatgcctctgggaggcgtgagatgctgctgctgctgcagtatcctgcttcttcctccttcttaccaacgctcacatcgtcgtccacttcctcccttcgtgattgcttcatggccagcggcttcaacaactgtcgttggagatatcacaatctagtatactgtatattggactataggtaggcatcaggcatgtctgtacacgatagaacttgtacaatctagtatgtgaacgcatgtcttatcagtaaggaaatttcgttgttatgagtaacaactgatcttttcccacctaatttattattaatcaaccgtacgttacatcatcaacatatacaattgtatatccactcctacccaaattccacggcgcgccatcaggccacggctgccacgcgcttgtgctcgacgcgttgacgaggaggaaaagagctgcaaccatctagccctctcgtggcaggtggatggactcgtgggtccggagccattcagccaacagtttcatcagacaataggtaagtagtagaatacagaatttaggccagtgatacaggtggttcttccccaaccagacaattcctccaacagatcgacacaagccccggccgccatcgtcaaggccactcgcctgtgctatatttcatatactagaaaaagactgcgttgcaacaggcaatggcggatacataaaatcgattcgttggtgtcataacgtttctattgatgtcatagtatgctaattatgtttagatcatattgttataacatagataagcagttatgctataggttttgccgaaagtcgttggtgtcgtctgacaccagtccgcccctggcaacaggtaagtgttttttaatatacaacaactattaggagctaagcaatatattgaaacattaagatcactatacataagtggagctgcagacccagctagcatagccgatgtctcctcttgctaccaagctagacccacacgtttcattagcgtcttcaacctccggacgacagtcatgtgctactatgatgctgtagcctatcctttgcatcaaatctggccgaatctttctcgatctcccaaatttagttgtggatttttaatccactcaatcttctgtttctatttccccgtaatcgaagcgaatccataaaactgggggataaaaatgacctggggaagcttgtcggccgcattattggtgaccgttaaacgaagattaaatctggtgaattaaagccagatttataaggaaaatcattggagaaataatgagggagttctttctgtttctcaataattgaagcgaatctgcaaaattggggataaaaatgacccggggaagcttgtcggctacatcattggtgaccgttaaacgcagattaaatttgatgaattaaagctgaattaatagggaaaatcatggggaaataatgaggggggagtggggaatcgatttttgcaatcaattggaggaggaaacgtatgaggcaaatcgacgtggcaacggtgctaggatttggccggcagctagaggcgcacgtagcttgcagtggatcggacttattaaagaaaatacaaaatcctcctaaaagaaaaaggtgaaataggtgggagagaaatggaggtccggaagactgaaagggagagaaaaaggaagcagggctgactcagagtcaatgacagacgaaaaaaagctatgaaaatctttcgtatattttaattaggtatagatttgtagagagagaaagatggcggtggcaatgatgcctcgagagcaactacaattttccagagcaatgccaaggagttgcttgctgaactaaaggccaagctcaccatggtgaaggccatatccgaggcggcagacagccggctcatcaccaacaccaaccttctccactggctgatgcgcctacatgcggcggctcaggaagccaaagatgtcctcgacgaattcgaggtcgacggctcaaacatcgcccgcaagcgcaaggccagtgacctcatactgtcatcccgatctctcaagaatctggtcattgctgatgaaagcctgaaaaggttggaacatgtcgtcaagaccctcacatagctctgcgcaacctcagccactttcattgagctcatccaggggcggatctccagtgtaacggccggtgttaggcgaaatcaacaactttcgataaaacatatagttaaactatttatccatttattataacaccatggtttaagtataattagcatactatgacaccagtagatacattataacatcaacgaatcaatcttctagatccgctgaaccagtagagacatgtttcaaggaagaactgaagaacataaagtgctaaggaagaaaaaagctcagaatatatttgcatgtgcaggagatgcatatgccttttttttttccgtgtatgacttctactcggacatctatatgtgcgggttcgatctaatcgatatggtcagactctatccttctatccttgtatgactctatatgcaggagcctatatctattgtttctcctgtttccataaatacaaagttattctgtatcaatctaagaccaataaaatatggatctactataatctaacggtcaatattttttctttttcttcgattaatgtggtaatttataggctccacagtgaacgtggtatcttctttcaaagctgttttaataatataattgatagatagatagatacaaaatcctcctaaaagaaaaaggtgaaacaggtgagagataaatggaggtccggaaggctggaagggagagaaaaaggaagcggggctgactgagagtcaatgacagacgaaaaaaagctatgaaaatctttcgtatcttttaattagggttgtgtttagattgacccaaagtttggaatttggttgaaattggagacgatgtgactggaaagttgtgtgtgtatgaaaggtttgatgtgatagaaagttggaagtttggaaaaaaactttggaactaaacacaatttgcctcgagagagaaagatggcagtggcaatgatgcctcgagagcaactacaatttgccggagcgtgccaaggagttgcttgccgaactagaggccaagctcaccatggtgaaggctatctgaggcggcagacagccggctcatgaaggggcgggcctacaatgattcatgagtattcaaatgaatacccaagaattttaaacaaaaaatacatatatgaagtatatattccatatgtatatatgaaaaagaaaaaaagacctaccattcaaaagaagcccaagctaaaaacgattcatatccctcccatcatctcttcctcccactatttcacgcccattggcccaatagcaaaaaaaaaaaaaaaaaaaaaaagagcccaaacactttctaaccctgtctcctcaccacccatcccaactctccccgtctcctgactcccgatccagccaccaggacagccgagaccgacgcggcgacgcgccggcgccggcgccggtcgccctgtgcgctgcgccccatcgccagctacccgcctggcgcatcccccacgtcgccaccgccgcgtctccaccctccaggctccagccacggagccgctgcgcacggtgcatccggcatcccccgcgtctcgccctctccaagctccagccgccactcgccggcccgccgggacgccgccgcgtgccgcctggcaggctccaccgcaggtggcaggccgctggccgcattgccacaggcgctgtggctgtgcacagtgcgctgagcagctgaccgccccctgcctccctccactcaagtactccactcactaaggtaactcactaactcttcccttcaatcctcgcctagatggctagatggttaggaagtaggaacaatttggattaggaaaacaaccatacaggagattaggatttaattcatagttgaatctagcctgttggatattgttcatggttgaacattttttatttaaaatttgaatccacgaatgatttatggttgaatagagtatactgttgttttgtaggtttgaaacatgaaaaaaaggattggttacattcattaaaagggatttcttcttgcaagttcaggataaagataccatcaatcattttcaaaatatcaagaaatggaaagttcttctctaaattgtaagatttcttatcattttgccattttgtatactctataaatttgatatgttttcgcaattaatagtttagtattatactctaatatgcttaacacattcaatttatgatcaattttatccatccatctatgactttataaaatcatgtttataccgttatatattatacaattattagactctgggttgaacaattttttctatctcttctaatttcgaatacccaagttgaaaatcctgggcccgccgctcatcaccaacaccaaccttctccactggctgatgcgcctgcatgaggcggctcaggaagcgcaaggttgacggctcaaacatcacccgcaagcgcaaggccagcgacctcatactgtcatgatgtcatcccttagatctctcaagaatttggtcattcctgatgaaagcctgacaaggttggaacatgtcgtcaagacccttacacagctctgcgcaacctcagccactttcattgagctcatcaagatggatgattccaaaacaaaccagctgcacaaggcagcagaggccagctctcatctcccggtagatgtccctgtgtttggccgggatgaggtcaaggagttcatcctgaatgtgattattggatcaccgtagcatgatcatccagaatccagcattggaactggtaaagtaagagcagccaggcacaacattcttgttctcccaatagtcggtatgagtggcgtggggaagacaacacttgcccaggtcatctacaatcatgccagagtgaagcaacactttgagcatagagcttgggtctatgtttctgaggatttcaccatcaaaagaactttgcaagaaatcctgcattcgttccaaggacacggtggcgctattttcaatggcgatgaaagcatggaagctaccatcaccaagctccgtatcaagatcagtggaggatgtaaattctttttggtgctagacaacatgtgggaagagatgtgccaggaatggagcgtgctgctcacagcattatccgatgaggcacgtcagcatgggagtgtcctccttgtcacaactcagagctaaagggttgcacaatttgccgccacgatttatcccataaatttaaaagcattgccgtgggagagcttctggcctctctttcagtaccacacatttggtggtgtggaggttccccaacaagatgacaaccgaaacatgctattgatcgcccaagggattgcaaagaagctagatggattaccattagcagcaaaagtaataggaaacctgctgagatgtaggttctcctgggataattggagaagggttgccgagagtgattggtggaacttggaagaagctctccagggtattctgccatacctcagggtcagttatcagcatctgtcaccaaaacaaagacagtgcttagcctattgttcaatatttcccaggaattacctgtttgacaaggacagggtggtccagatgtggcttgcgcacgattttatccagtggaatgagattgctgacgttatgaggccagatgatgttgggaggcagttatttgatgagctcgtggaaaggtccttcttccaacccacatttgttagtaacaagtatgtcatgcctgatttggtccgtggtttagcaattcagtttctctacaccagtgcttcttccatggtgaaagatcaacaggagtatcgtccttagcaccaggaaatattcgccacctggccctgcaggttaatagcctggaacaatgccaggagctgcacaagtacagaaatctgcgtactctcctaatatttggccgttgtgagagtgatgcattttttaaccttcttgatgggatgttggagaagtcaccaagtatccgtgtgctagacttattgatacggggaaagcccgaccttctcgacgtaggatccggatacacccgtgaaacctcacgaactggatgaacaacacgctgcccgtgcaacgcacctttcaccacgaattcgcaagcatcaaattctcatatatttcacgcatagacttagagagaaacgagttcaccttatgttctgatctgcaagtaaagaacaatgtacttttgataggtagatctgcatcacttatcatacgttaaagcaccagggaaggtatggcccaaagatgctaggcccctgagaaaactgcgattccttgatctttcatttacaaagatcacaaagttgaaggatctccccaccaacctccaagtcctgcatcttcgtggatatgatgctgatcgtgtgccacaaagtatcaccaagctgaccaacctacggcatctgtatgtagatggttcagcattgtccaagattcaaagtattggacagcaaactgaacttcaagagttggagagcttcattgcacgaaagggacaaggattcatgataagagagttaaagaacatgagggagttcacggggaggctgtgcatccgtggtatcgagaatatcagaagtaaggatgaagcgatggaagctagattgatggacaagaaacatgtgggtgccttggtgatcgaagggaaaagagtgcccaagtttgcacttgaaggactgcaaccacacacaaacatacaggaactcaccatcaaattcttccaggaacaagattttcctgattgggtgtgtccagataacttggttaatctcttacaggtaaatcttgaaagctaccacttcttgtctaccattccaccattgggccatctgcctttgctaaagctcctcaccctaagaaagcttccctcagtgaagcatgccaacggcacatcattcggtggtttcccatctcttgaggagttcgagcttcattcaatggagaaatgggaggagtggacagaaccagatgcagcagctcatgcttatgggttgtcgcttttccttggacacctcaggaagctccatcttgcatactgtccatcactgagacgtttcccgcatcttccatgctttatctgcattgaaagagctgaagatctccaagcctggaagctggatcctggcattaccagcatgttctcaagtcttgtcatccctaataaccttggcagtcgagtactgcaaccacaacgttgtaatgtccgcgcaacagttcaagtccctagaaaatattgagcttatcaaaagtgaagggctacgtttggctgatggattccaatactttagcaaactgagaagcgcatgggtggagggttgtcctcaactcctaagtgccatcaccacctctgtctcagtgggctttggtcaagattgttgtgcggcacatgatgagaagcagcagcaggaagctagccttttaacccacctcagagccaatgatagcttgatgtatggtgattacttcaggaccgtgggaaagctcccatcactgcgcaatctgacaatctgcaatgaatcgaatggcactaatttctcggtcaagcaagaactgtggtttcagcaacaaaactcgctagagcacctctgcattgaaggttttcatgcattgcaacgtctcccttcattcttggttaccatgctctccattaagatactagagcttcatggcttgcgtggcttgcagtccataccagacaatgctctgcccctgactctccaagagttcaatataaacaactgtacttcgtgtttgagtactcgggtatctaaagatggtgccgattggccatatgttgctcatgttccatacatccgagttaacggaaccacggtccaaaacttatagacttttgtactgtatatatgaactcctgaaaaatctccgatacaaaaatagaagagaatggcttttggtattcagtaatccagtcaatgaattcttttacctgagccatatgtttccttgagcaggttgagtatatcctcgtagaaatgatatgtatataagcatgcctatgtaactaaagaaggtatagacaaacaaacaaaagttggaacttgatttcgattttcatatatatgatccccttgccacatctgaaagggcatcaatgccatatatgtgtttctgttattgtgtgtgcgcctcccgtgtcagtgcattatttgatttttaattttcagtcaaagcagagatcggtaaacagttctcctcatcattaggcagattcttttggtaaaagccacctacaacttccaacactgaattcattgtgcgagcatggcatctgcgattcctaaattttcactcttccctcgttgtgctccacagcaagctagcacttgcatttcttcaatggcatcctgacaaaataagacctggcattttccttcttaggttgtagacagggggctcaagcagacatcatactgtgactccccctaagcaggactgtatgtctgcctcctgttgagatgtagaaaatgtagggtgcttaagaacaaattcttgcaggtttacttccaaagcagaaggtattccgaagtgtgacaacctttcaaatggtttcatattttccgttatcaagcacaaattttcatgaagaataccagcacatttctcaagctgctcaacattgcgcattggatgtaaatcatcctactcatagatctggtaaagggaagctctgccagctcttaaacttttctcctaaaaccattccaaaaccttaaagccagtaggtaagttcattggaaaattacattttgtttcagatgcagccagccacttaatgtgtatactccttcccttccattcttcgacatggtctgctgctatatttccatccctggtgaccaacggtttggtactaaagagcaactgtagttgtcgagcagcaattcccttgcgagccacaatgcatgcatactcagagtttcatctgttgacatcatgagaagcttcttcaactctgaacaaatagcaggttcactatccccggtgacagggtctttttctaccatcaaaccagccatcttttagaccttgaaacattcgttcctttcgaaagggtgcatgtaaactttggggtaaagtgccaacctcattgttcaacctgacttcatgccacttccttgagacaaaacggagagacgtgcagcctttcccctgctgaaattaaaaagaaagaaaagaaaccccaatgaggatcgaaaccatcatcgtgttcttcataattcttctcctgctacttgtcatacttcctctgatatttgttgattatcttagccgaattcacttgaaaaccctttgcacggaccctatcggctgattggccagctgtatgtaccatattaacaggaaaaggattactatcgaccttcattggcctcttcgaatcatcaaacttgatttttcctccctcaatagccgtttggatctgctgcctgaagaccttgcagtcattagttgtatgagacccagaattatgccacttacaatacctcttcttacccaactcttcagccgatggaattgtatgtccggcaggaagttgaatctgtttttctcgaagtagcaaatcaaatatcttatcagccttggttatgtcaaagtcatacctctcctcttttcctgagttcttcacccattggcacggtataacctgtttgctcctaacccactcggctgcagctatttcggaatcatcatcctcctcatccgacccatacatataaggatagacatgattaatctccctagagttcttcctagcttccgcaaacctttgttcatgcaaagctaccttctgtgtaaggtgcgacaagctttcgaaattttcatatgagaatttttccctgatcggagcaatcatcccttgaaaagccaaatcggataactgggcatcagtcaaactcaagctgtaacacttattcctcattttcctgaacctttgaatatactcacgcaccggctcatcatgcttttgcttgattgacgtgagatcagacagtttcatctcattaatcccactatagaaataactatgaaactacttttctaaatcggcccaactattaatcgacccatgcggcagagaagaaaaccaagtaaaagccgacccagccaatgacaaccggaataacctaaccctcaaagcatctacaaccgatgcctcaccacactgagctaaaaatcggctaatgtgctcataagtcgatgtagtgtcttgtcctgaaaactttgagaaatctggtgctttgaaccggttaggtaaaggaactctttcaaaccattcaggataaggttgtcggtacaaatttccagtctcttttggtttaagcccaaattgctccctcattacatcagctatcacatcagcccatggtcgctgctgaggtgttccttgaggttgttgtggtgtgggctcaaactggttgtaaaactgaggttgaactgatcctgcctgttggtactgaacttgtggtgatggaggttgatattgataactcaaattgccccctggtaattgtgaaggttcggctgaataccacgcgccaaatgctcaggaataacttgaggtactactgaaccatctggttgcacatgatgaaccaggtgttccgggacaacctgatttgtagtgtactgcacaggctgaccaccaggcattgcaaatccagccgacgcgttcattgaggcttgctgctgaatcggctgaacgacctgctgtctcaacggtgtctgctgaatcggctgtaaagccggtcgtcttggtggcgtctgctgaactggttgcacgacctgctggattggggatgtttgttgaataggctgcacaacctgttgcctgggcggcgtttgctgattcggctgctgctgagccgaattaatagcattctgaggaggtagaaacatagatgcaaccgggtcttgtgttatctgagtcacattcggtccaggatgctgtgattgctctcttaccaatatttgaggattgactaattgacctgaggccgacgacggcactgcaggtgctggagccgatgctggtaccgtcggctgagctgatgatgtaacaggaggaactccctgagtaagtggatgaacatcggtaatcaaagtccgataatttggaaaagtacccccttgcaaataaactgggcctgcagcctgatgttcagctattgaaccatcggctaccgatttcatcatatttgacaaggtattagttaatactccagattgattgatcaaagcattatacacggcatagtcaacccgatcttgaaagttattgaaaaaatcttggaatgcattgtcattctgattaagatttcccctttgcggtccctgagtgccgtcaccttgaactccatgtacttcacgaaagtagtcaccctggttctcctgggtcgacccatctgtaacacctttgtcactcggctgggctgatccatctggaacttgtttcttttctccctctttaaaagagccgatcccaggatcatcaggaaccaccttcaccttgtacttctaaacaaatgtgcccttgcgagtctgcatgaatgaacttaaaaattgatctcgtgcttgttgcatcattgcatcgaagtctttcttctgttcgggagtgagcttctctggatcaatgggcacaacgtttccttcatggacgtcagtcaaaccgagcttctggatcgtttctttaacattactcgggctggccgacgacggcgacaatggtggtttctcagccatgagggaagctgccttctgacttctaatcagtcccaccaggcatgccaaaagcgtgttgacagaaaacacgaggcctgggagatctgcttaactccagtgcaggtccaaaactcgccttcggatgtatgagcgtgccagttgatttgatcatgcaatcaacaagaaacaaagacaaagaaaccgtgattaaatccataaatgatagccgatcggctaaatgccgatgacatatcatttatctttgagccgatgtcatatgtaaatcgatcggcatgtgttaagtaaacaaatcagaattaaatctactcgatcggctgtagatatcaataatatataatccttatatcgatatatacttgaatcaagtgattgggatagatcggtcaccttgccgagacagtataaatcacttagatcgaaatatatattaataatgagattatacatatattcatagcatagccgatcagatagatctagcatgtatcggctaatactccgataccacatcgtgttaagatattaaagcaaatagaatataccaaacataagcctaatatacttaaatgcaacaagatcttaacataaagggtagatctaacatgtcaatcgatcatataggataaaagcaattagatcagataagatcggctgaaactccgatactaccctaatcggcaaccagtaggcaggctagagattgaaattcaactgatacaacattaagtatgaaaagaagaacaatatctagacaatcaagctgctggatgtttcgtagagtggtggatatctcatataatctaagccaacgtcgttatttaacctaatcggttgccttctggtaacagatgttagccgattgtaggttagatgacgatattgtcaaggattatgcaagatataggataacttgacggattacatgaacaagattagagtatcataaagatggaagcactaatctcgagaacacaaaccgtcataacaagttttacctcatgttgaagatcgaaaccgatgcagctcaacccgaaagtaagaactcgtcgaaataaaactaaagcaaaaagggtggtgatgcgccgaaattgttttgaacgtgtgtgttctcaattacatagggctcggggactatttatacccaagaattataaaatatgtccatattggacacgactcttatccctaacaaactgtaagataccataagtctttgcggcagacttttgcccacatttatctctaagtaatttacataaaatatcctaattaatagatacaattgccttcccaggactctatccatgcgtggcaatcatcttgaagcacatcaattcgaacccgatgtcgtacacaagttgtattatcggaatcggctgtatcacttaacctaatctgactcagacttagccgatcccaatcatagtcgatccggactccagccgattcttactctgtttccgcaacaacccttatattcgattccgcttcgatcccatcttcatctccgatgctgatattaccaaatttggtcgttaacagccgcagacgccgccgccgcatctcttgggtgagagccatcgctgcctctctctctctctcgatctcgatctctctctctctccaaaccgccaccacctagctcgttgcccacgccactgccacgccacggtcaaccgccaccattgatgaccgacttcgacgcggccgccaccgccgacgacgctgtcgccactgccactccgccgtccccgcctcgagctcgccacgccgccgcccccacctcgagctcgccacgccgccgcgccacgccgccgcgacgccacgccgtcgggcccccacgccgccgccgcggcacgccgccgccacgcccgcatgccgtcgggccggcccacggcgccccgacgccgctgccgcactgccacgcccctgccgcccgcgcccaacattgccgaacgtgaacgaacgtgattgaaacgtgaccgaacgcgaacgaacgtgaacgaacgcgaacgaacgtgaccgatacgtggacgaccttgaacgaacgtgaacgaaacgttaacgaacacgaacgaacgtgcacgaaacgcgagtggacgtgaacgaaacgttaacgaacgcttaacgaacgtgaacgaaacgttgacgaacgcgaacgaacgtgaacgaaacgttaacgaacgcgaacgaacgtgcatgaaacgcgagtggatgtgaacgaaacgttaacgaacgcttacgaacgtgaatgcacttgtaataaaagtgtgagaacgaacgcgtttagactaatacattttactggtaatacatatatgattatatatgtaacttggcccgtttagactaatacattttcctggtaatgttgcagagaagacgtcgtcgtcgtccctcaagccgaagtggtagctagccatcgaaggaattcgcgcaggcaagtgatgtaaagaagtgattgttagagatttaatataagattgttagacttagcatatatgattattacaattttaatataagatttgtagcgatttaatataagtttgttagacttagcatatttgattgttagagatttaatataagattggtagacttagcatatatatatatatatatgattattacaattttaatataagattagtagcgatttaatatgagattagtagagatttaatatatgattattacaattttaatatgagattagtagagatttaatgtaagattagtagcgatttaatataagattgttagacttagcatatatgattattacaattttaatataagattattagagatttaatataagattgttagagttttaatattacggttagcaaatacatcctatagacctaataaatattttttgtatgcacagatggctgatcgcgatgaggaacagatactatacgatacaatcgcagagggaagcagccagtactggaacgaagaagaggggaacgaggatccaaaccagtacttgaacgaggaggggaacgtggagagggatgcggaggggagcgaggaggggaacgatgaggaggctagtggaagtcatccctcctacggacagaagagggcacgcggacaacgaggtgccgcgaagaagatagagggtcggcacatcataactgaggtgaacgaagacggccgacctagtgccccggcagaagcagccaagaattttgtacgccacagcggttgggttgtgagggacaacgtgcctgtcagcacggtgtactggcgcagaacaagggcacgcggggataatgacagctttgtcccggactcagagaaagagatgctgtagaccacaatgctcgagacgttcacgctacccgcgggtacggagaacatagtgaaacagtggactctgaagaaaatggcagacagttccagagcttcaagggagatctctacaagaaatacatcctgaaggggcagacaccgaacttcgacacattcccaaagctaagggatcactgggacgagttcattgcatataagacaggtcaacaagggcaggcgatgatggagagaaacaaagaaaatgctgccaagaagaagtaccatcaccacttggggtcaggcggctatagcgtcgcaatgccaaagtgggaggagatggaggcaagtttgattgagaggggtatcaaaccagccaccgctaaatggccggatcgatcgaagttctggtactatgctcacggtggaacgcttaactcagttgatggctcccttgtcttcagcgatcagatacgcgaggctgccagtcgactaacggacgcagtggtagcctcttctcagggcacatttcgacccgacagagagaaggatgagctgtcactcgccctacagactccagagcatccaggacaaacacgagggaaaggcgtgattcccaggaagattggatttaaggaggacatccacacgtacaggagttggatgaggagcaagagagataccgaggcgaatattgcagatcttgagtacagggtatcgagctacgagctcagcatgcaagaggaggtggcaaggaaggtggatgaacgtatggccgcacatcggtcctaggatccccagccgtacattaatcctgcaatggtcagtccatcaggcaatcgtagcagctgcgcctcaacggggcaggtcggatcacagagcatggacgccatgcaaacccaggacgaaaccacctgcaccgttgatgagatcacatagtggacaccatgtgagctgcatattcccttcaagaacttatcaatcaaggtatgctcgtagtttgatgatttttgacttgtacattccgcaagttgctgcttaggttgattactaatagataacctcttatcacgtgaaggtggcgtcgggaatggccatcccaacggacccttccgggacttaccactgcaggccgattccagcaggatactctagggtcgaagttgagctggtggaagccgcgtacgaggacctcaagttggactacccaggaggagacggtgagacacatctacgagacacaagccacgccattatactatggcgcaagtggtacatcatcctccctgggcgacaagcggcgtctcgtgtaccatctcctccggctccgccgtctcctccgtctcctcctgcaccatctccttcggttcctccgccacgtcctcctgcaccatctcctccggctcctccgccacctcctcctgcaccatctcctccggctcctccgcctcctccacctccacctctaccgtgtccgcctgcacctcccaagacaaggtctcgccaagctccacctcctgcccgcacaagggcaacgaagaaggtgaaagttgacgccaccaaaaataaggagccgccgtacgattgcagtcaagaggagcttgacacttatgtggcaggagaagtgaaaaggcaactcaagcctcggagtcctaaaaagaagatacctattgacctgagcgtgaagaagttcttccagggaatgtccaccgcaaacaaggatgccttaaagctatcggactatgaccgaacacttaggaaagcctattacaagaagtccaaaccagttcctcagcttggagaacagccaaaccaagaggtcaagtcgttggtgaccggcgaagactttggcataacggattttatttcggacaccggtctaacggtggatcagttggttggagccgcaccaatcccgaaggcggaagtggcatacaagtttgaactcggtaaaccgcttgtcaggcctgagcagctgcagtccctaccgacacaaatgtacaaattccatgaacggtacatggaaatgagcgccaatggtagagaggtgttcggagcgaggattagaaactccaacttcttgcaaggagaaaatgttctatggatccatttcaaggatgtcttcgatctgtaccatctggacgccctcgacgtctctcttctgagcgcatggattttgtaagtatctttgagttcgatttgtttcgttcaataattagctcctggcatatatgaaaacaataataatttcctttcatcgttgtagaatggagattcaaagggcccgacggcggggggtttacgatactgggttcatcgaccctcggaaaatcaacaccgaaatgatcgacaattacgagaaagacacagaggacaatctcgtccatctcctaacgcagcagcatttcaagacgttcatactactgccgtacaacacagagtgagtttttattgtcgtttggacaaatttcattcccatccatataacatatacattctgatatttatcttatctcacgcatattccagattccactgggtcctgttatttttcgacttggacgcatgcagagtcactgtgtacgactcaatgaataaagaggagaaggtttttgaccaggtcttccaactgatagacaggtaatataatgccatctattccaaagtggcgggactctgttgctattatgttgatctcgagtaataattaattaatcatagcttgcaactgcacatgtagggcttgggatcggttccgtcaattggtccgcgagacttgaaaagaaaaacttggacggaggtttcattttccagtgagtacatgcatgatccaaaattatattgaattgaatctctaattacagttaatataaagagtatattaaatctctcattttttctcatgtagtgtgcaaagcaggaccagggaactaacttatgcggctactacgtatgcgagtatgcccactgcctatcaaaccaaatatacaccacacgagaactcgatgtacgtatacataaaccattcaaaatttcattgcgtatcgatttgttaagttgtttattaatttcatatattgatatgtcattatttttcgaatgatagcgtattcacatgagggaaaatctcccacacaaggattttatcacggctgttcaagaacaactgatggggttcatcaacgaagaagtccttaatcccgatggtgaattctactacgacggatcgacaattcataacgtcggtccttcctcttgtgacataacgccggcgtcgaagtcgtagctatagctagcgagcaaatgaattgtactatacatgcatgtatatatatttatatatgtacgtacatttactttagtgttaatatatattttggtaacatatatgcacataaaatgttaagtgctttaaattataaatatgtgtgtaatatatgtatttatacatatacacatatgcacatatatatatacacacacacacacacacacatatatatatatatatatatatatatatatatatacatatatataagcacatatatatatatatatgtatatatatatatatatatgtatgtatatatgtaatcaaccatgcagcaaacatggccatgcaaatcaccgatctttagtcccggtccgtgttaccaaccaggactaaagatcgatctttagtcccggttatttcacccgggactaaagatcgctatctttagttccggattcgtagtcccgattggacaaccgagactaaagggggttacgaaccgggactacaaacggtttcccaggtaacatacacatacaaaaataaatatatagaaatggtaactggcacgtacggcgattccgagagcaatttggttgtcgatgttaggtggatctttgcctgggattggcgtaaattccctgactgttggactggcgatggcgaggtagctcttggagaattcagagggtcccaccccaactttccatataggaagccacgccgatgctccgtgatatggcccattcactccatatgccgctgcaatctgcgcacacatcatactaatccatcaccttatatatgtttaatttgacgattaaattaatataatcactagtactatactctcttcgtctaaaaaaaatcaacctagaagaagatttgacatttcctaatacaataaatctgagctacctttatccaaattcatgatcctataaggggtcggattgagtttttttttttcctgacggagggagtatagtagtattattacttctagattataattattattgccagcttcatcatgaatactgtttggaggaggtcggccattggagtagaagaaatggagggttcggtttgcatctgcagtagcagtagcagtagcaggtgtccttcggattgggatgcttccttcagggcacctaccgcttcgatgccatgcctgctccgcgaatttgaacgagttgtttcttcccaacaccatcatcttctcaactatcttgggacgatccacgcttggtttcaactgaacaatatatattcatcacatacatcagtactagtagctcttagactgcaattagttcttcgatcttaattctctccttaatttactactccctccgtattttaatgaatgacgtcgttgacttttcgaccaacgtttgaccattcgttttattcaaaatttttgtgcaaatatgaaaatattcatgtcatatttaaagaacatttggtgatgaatcaagtcacactaaaataaatgataattacataaattttttaaataagatgaatgatcaaacgttggaaaaaagtcaacggcgtcatacattaaaatatggaaaatatggaggtagtattactttctttctaacaattgcatacatacatatataaatggtcgcattccttaaaaaactattataatattctatatgttttatatttaaaacattttgattttgatctttccatctctcgtctaaatttgctaacatccatatatatttgggtatatatatgaaacatatacatgaatctattcagaacctaaatattttgtagttataattataacgtgaagagaaagtagtaatcgacaatgaaaatgttcagacgtatgtacagcaccaggattttatgatctttgagcaatggattcttgaggcttggttgcttgtatatgtccacgcagtcaataatatcaccgcactcgctctgtcaattagaaaccaaagtgagacttaattagcacatgaaacttttttggggggtaaggtcaatgatcactggaaaaattactacctggaccaaaatgacctcagttgttcagctatatataaattcatgaattcaaccagatcgagtatatatcaagatgaggaatattagatttgagaattcatcttgtgtgattaaaattaaacagatttatactatgatatatagttaatagatatctgccaagtagtaacctaaccaatcctaaataaagaagattaacataatgtagaaattcttacctctatggtcttgataatgtcattgggatcgatttgtacaccatgaacagtagttgtcgttgaagccaacaatatgctttgctgcaaagaatgcaagaagagacatcattctctaggagtcgatcttcaggacagtcgaggatcataccgttggcaaacaagataatatggaggctttatatagaggtgtttgtggtgcatcgataagataattatgtattaatccattgctatcatttttacattactacacggaaataaggaaaggaggaataatgcttccttgtattctgtaaaattcatgattgattaattaaataccataagtaggtctgctggtaaaattcaaatttcgaatgcaagtgtactaaccatattttggtggagaaagtccatttttctccctcaactatagggcggttttgggtcgtgtccatcaatcctaaaatcaggtataaagaccccctcaatcgttaaaaccagatcaatttaactccctaggcgatgctaatggtgaggtttcctcctctgtggtgttgagtttacgagtcactttggcctagtttttatatgacgtggcacttacctaccattccaataataaaataaaataaaatgttaaaaataggcaggacccaatgtaagtctcctggaaaaaaaatgggatcctcccctcttatctccctcctactcctctctctcaccctgcgagtatagagagagattgccaccgccactccactacaagtgtactcctccgttgcaaaaaaaaaactaaacataggaggggatgtgacattttctaatacatcgaatctggacaaagggctatccagattcattgtattagaagatgtcacatgcttgcctaggttgtgttttttgggacggagggagtacacaagcgtataggggagggccgccatggatcatctccgagtggtacatggccccgtgttttatgctactgctaggagcatgcctcctagggtgtaacctccgccacctggaagccaaccctagctcgccaaccgtcaccagaggcatgccaccgaatcatgctggcagttggaacggagagggccaaggagggttggctcacttcggaggaagagtcactcgagttcgacgtggtgatggcaagcgtggggctcgagctcgagcgagatgttgccaaggacttaaggctcggggagctgaggcaccttgccatgatgtcgatggtgcaactcgacacaaggagtagcgcggggacagagcaactgcttggaggtggccatcgagtcaagggagtatagtatggtgtccagttcccactggcacctctatcaccttctcctcaatcacatccaaagatgtcgtcgttgtcctggttaaccaccgtttgagctcaactaccaaaccgaaccccatcacttccctatctttgagaagatgccaccaccacacaggctgccttcacagtttggcgagggaaccgagagaaaaaagagtgggaagggaggagagatgtagtcacttacatgtggaccctatatttattttgttaatttctttgatcaacaaaaagccaccatagttgagggagtcattttgcatcagctttaggccatctttgtttaggcttaggcttattggcttagacttttaagtcagcttattggcttatatgatttataagccagtgaatttaatgtcctaagtttagtggtgaagtcatacatctatcttatataagcaaaaaaaagcttctccaacctagcttttggcttaatagtgtaagagtggcttatagctttaaaaaagccaaacgaaaaagctgtttgtttgtttaggcttaaactttttggcttataagttggcttataagcctaaacaaagaggaccatactctcgagctactagccctacctaccttgcaaatgtatgagctagttcatcgacctcgcgtcgtcataggatctcgccacgaagaagaaggaccctctaaccggatgtaatcatacatgacgccgaagaaggggctcaacgccctcgtctgcgtgatgaacaccacattctcctcctctccctccaccagcatgtaccccttgatcgcgaactccaagctccactgcacgccgtgtgccccgtgccgcgctatcgcgttcccgtcgccgaacgccgccgccgtcgtcaacgcctcgtccgcccggccgttcaccaccacctgcaccctcgccatctgcgccgccgccagctcgacgcggagcgtgtaggtggcgtccgccacgacgcgctccagcctgaaccggatctgcctcgtcgtcgccgcatacccgtcgccttgctttctgcacaacaaggaaagaaaacacaattggttatcttgatgattcttcagaggttaatcgatcgagaggaaattgattgattgattgattgttttgttcgttgttgtttaattaccttgtgacgtgtgcgaagaaccagtccttggagatgtcgctctcgccgatcgtgaagacgagatcgccgtcagggtatagctcagcgtacctctcccacaacccgtactgcctgtacttgtctttggtgatgaagatcttgttcaggtatttggggttgggatcagggatgaagaactctgctgcactcctgtcaggaacacccatctcccacagtgtcgggcctgatcttggaggctcgaacacaagatcaccgaggttgatgccacgtcctgcttaaattcagacaaacaatggtagttaaacagagttgttctgatccagattatcatgttaaatactccctccgtttctaaatgtttgacaccgttgactttttagcacatatttgataattcgttttattaaaaaattttataaaatatgtaaaactatatgtatacatgaaagtatattcaacaataaatcaaatgataggaaaataattaataattactttttttaataagacgaatggtcaaacatgtttaaaaagttaacgacgtcaaatatttagaacggagggagtaataccaaatgccatctgaattagtgctaacttaacctggtgttactgttacttgcgaggtgtacatgtagtccccaagaaacccaggaacccatgcgtagaggttgtacactcctgctctcacattactgatgctgaagctgccgcagggcgttgccctcgtccagaattggtagtttttgctctctgtcacccaagaaccgggttgtccaggagtggccaagccaacaaaagccatcccagctgccatgtccttactgctcatgtacctgaaataaaataataattaacatcaaaacaaacacattatcaacgtttcagagatgatgatccatgaacaatcttgacccatgaaatgcaagtcatcatgtacctgtgtggagttgaaactatgaaagtaatgaatcttacctgtctctgacaaatagcctcccggtgactgatcctctctgacttgccttgtggaagtcaggggatacagggaagctgtatggccatttcctagcttcagcttctgcctgcaacttggcatccacccaaagcgaatgcagatctcctctcctcggattggagttgaggtagatgaacaccgggcccatcaccttcttccagtactccccctcctcaatcttcagaacaatgtcattcccgacgtaatgcgtgccaagaaacatctgacacgaaccaaaatttcagttttctctctgtaccaagattccaagtgcagagttcgttattaggaatagtaattgttttttttttttgcggggaggaatagtaattagttgtagggtgaactgattgatcttactgtcagagaggtcgggccgacatgggaggtgagctctcgcttgagagggccgccgctcttgaactcgttgctgggggtgatcacccagaatcccatggggttagggtgattgctgctaatccatccatgaactctgttgtccttgttgtccagcgagtactcgtacttgtcatccacctagtacatcacaaattcagaaaatcaccagatgcatacatcaaacagtcgattaaaagatgacagcctgattaatttggcgtgcaagatgtttcagaattcggttagttaattacctctcctctgaactgtggttccttgggatcaacgagcaggacagcctccttgtatgccaatggagcaccgcgaggtgcatctctgtctgtcgcactcggcataaacctctgtatatcgtctgagatcgccatgtagttgaacctgacaaaacgttcatgaacacatgttttcaagattagactgcagatcaagcaaatattgaatgtcttcagagaacaatttttgagaaggaatactcacttgtccgtgttcagtttgaaggcgaggcgagcctctgaaatgttgagagcaggccagtccctgacatgctcaaagatggcatagcagtagaatcctgagctacctttcagcatcacaagcctgcacaaattttagagcagcaatcgtaaaatggcagtgatatttgtatactaccactatatggcaggataaattatagccaaatttattaatataggtccgaaaattctaaaggagtacctcttgtcgatgtttagcctgacactatttggacgtgatggattgtaggtgctcctgaaggaaagctccacttgatcttcacttgaggatactaccttgaattcagtactatccagcctgtgaaaattcagtcatttagttcatcctttttgagagaaaagcataattcgttcagctgtagcccgtaataaggtgcagtgcatactattttacattactgtgaaattatgttttccagaaagaaaatcatttgagctcttgtacatatcctctgtttattaggcagtaatttctgacggtgtttaacaccgtttgcttatcagaaaagaactgaagtcacagttacaggttgctcttggtactattgctattaggaggcatctttcggtgcagagtgatgaactgcaaaggcttgctcatattttactcacaacaagagcttgtttgttatctggcctgaaggcaagttcttcaatccatatgaatatgggtggttcaaaagaaataatattgattacaattaacaggctggtagctatatgttcaagtggtgttaaatcgaactagtactgttatattgtggttattgggtaggttgatcttgttaattatgttatgagctgtaacagatcaaggcaataaaacaagaacactattaactacagcaagctaggcaagtacctgctcactggctggtagtgactttcagattatgtacctacttcagttgttcagttagaacgagagtattagtttatccaactttctaactgacatttattttgcacattccaagtagaaaagtggtataaattagaaataaattgagattgaacagtagtcagatcatatatacaaatgtggaataagaacacacgcaaagatgatgattttggatgactctaattaaagtagcatatggatgcatccttttcagtttagaacaaaaaatgaattgaggaccttaaacacaggaaagatcaaagcgcatgcatatataccaagcaaagtatagttagcaggcgatatataaatgacttaatttacaataaagttaagaagtaatgacgtacatatcgatcatgcctcttggattattggatccggggaaattccataccacatcccagtacctgcagacagaccaagatcaaattaattatatatggttagatgtaactggtatgtaacataaagatggcttttcatctatcaagggaatatcatctttttttttacatgtgtcatctaagataatcacaaaaaaaaattaaaaatatgataacatagattaatataaaatatatataatttcacaaatatgtaaggctaaattcaacttttacaagttgcaatagaaacaacaaatttaactgaaaatagttatcgtaccataataattatatttgttatttttttataacatgtagaagttgaatttgaactttttgagaaaaaaattaaaaaaagacaggcaggtatgtactaagtatgttttgagaaattgaaagaactgagtaattagttaaagagcaagaaaactatatatagtagttacaccgatggagagatggatggagtgtaatataccctgcggagttgggttgtccgtcgaagcggagcaggttgcgttcgccgttgtatcggacgccggtgatgtggcccccaggttttgacagcgacacctgcacgatgccattgtccaccatcacctgcatgcatgcagatgcagtatatatcagtcagcttaattaaacaacgtacgcgtaattcggtcgaaacgcatggatgatctgatcgatagctaatactaactgcagatcgctaatataattaagcacatacgcgtatagttaattacctggcggtggtcgaggtgcaaggtaacgccgccgccgccggggcgaggtcccttctccggcacggccgcgtgctgcggcgttagtgacgacgccgacgacgctgcgacggcgacggcgacgagcaggagcagcaacggcagcttcgtgcaggccgccgccgccgccatcatggacgatcgatatatggaagtagagctagctagttggacaagtgacgactaaagcgcatgatcaatcgatcgatggatatatgcgtgtgcaaaacgcgctctatctatatatatatctatcgatcgatcggctaacttatatagtagttcttgcttccatttatcgatcgatattgaagcatgggcggctgggatttagtatcaagtgttggttacggcgccggaaagacgaactttaaaagaatgggaaataatgatggatgatgagtttggttgttctagccgtgcaagtgcggtgcgtcgtcgtcacaattcttgcctttagctcgatctcttcgcagttttgtttgttacaccaagccgttatcttgcttttgctctgcctctgatcatcgacgatgcagacactactacgcagttggatgcaggtctggcctccttaattatacgtagcagcagctaacaaatatttaatacagaaggaaattgttggtctgtgcaatttgccttcgattatattagtcgtcgttgtcatcaagtatacatgtaagtacgtgcttgactcgatcgaatcaaattaaaccacattgtgtttcagcttaaaattgctacgtacggagtagttgcagtgggattaggtacatatttaggtaaggttcgtaccgtactccactccactaatcgtcctgaaaatttctcccaaaaaaaaggactggtaatcgtcagcataagcatgcaatgcatgcagccggccgctagctacacgggctgggccttagtgggctaatgggcctagcccaaatcaaacaacggaaggactaccgctgcaagcaggctttgcctttaccggctttaaactagttaggcagtttgggctgccccaaataaaaaatactggctaactatcttacccttatacggaattgctaaccttgtcgactcgatagaaaacacatctccaaatcttacagatttttctccaaatattacagattttggaccactggataagctttatgattcgtgctccaggcattctcctccaacttcggcgacctcctctttttctccggcgtcggcaataccctaggctccggcagaggaccctacgggttagggtcccgagttggggtggtggtaggaggggtgggagagggagggggaagagggtggagttcgccagctttagagggatggtcgtgggaggcaacagtccggcggtgggcggcgaaggcggcggcggcgccgctaaagctgcggggtcggaagctggcggtgggggcaaagcggaaaggtagataggaggcggtcagtggtggcgccccaccttcggagacgaggaagacgacagcgccgccatcggcttgaggaaagaaaaggaaagggaggggaaggagagggggaaggggaggggagggggctggccgggtggcctcaccggtgccattgacgcccttcggccagtcggcgagacgggcggcggcacagtggggcgctggcggcggtggatcgagcagtggcgagatggaacacgcgagggtagcggcggcggcggaatgcgcgaagaggaggggaatgggaggaaaaagttagagttaaagctgtgcatgaatcctaaagcatattcaacggtccagaatttgaaagatgagaggtgggattttctgttaacagatgtatagacagtctcatatttataacatcacaatttctgtcacatcttctttatagagagagagagagagagttgtttttacactataaattatacgtatacatttacattgtaattgcattgtaaagtttaaaagttgccatattattataatatttatagtactcactagcataacataagagaattaagagataaaaacgattatttacctacttggaagaagaaaagatatactccaatgataggaaaatatataattatatatttatataagacagatgtagtaatcatatatatactcactccttccaaaaatctgagtcctatttacagtcactatatgctaaattaaattgttaatcagaaaacaagaagccattctagtacttattggttgaatgttcattggttttgccacatggtgagtgagttaattgctttttggttttgatgaaaaaagaaataggtctcagttttttggaaggagtgagtaataaaaatattgattgaataactgtaaaattaaagtacggatcagtagcactttttttgtacattgatgcaaatgcagagacgatcgactacaccgaacgatcgactacaccgaacgatcgatgcactgtgttttgtttgcatccatgggaccatggctgatacatggcgccatggcccagctgcatgctgctagcagactagcagtaggatgcccttatattggagtactagctagtagctagttctatcatggagatgggggcaatgcaatgttcacgtctccaatcttgtcgattaatgattaatcgttgcctcctgcaggttacttacgaccttgcattgcatgctcacgtttattactatgcacatgcataatccattatttccatcggtctccctacctgttcattcacgtttgtggctagctaggcagtatgatttatatatgctcaaatctgtatctactatctctgtttatcctgcaagctagtttcagtcaaaatcaaacgtattacctccgttctaaattagatgtcgttttgattttttttccttaaaatgtttgaccaatttgaccattcgatcatccatgttatgtaaaaaattagtgtaaataaaaaaataaatcatacttaaaatatttttaataatgaagcaagtaaaaaaataaataataatatcataatttttttaaataattacaaacagcgactcaaaagagtaagtacgacttttgcggcatgatctctctctttccggccggccggacagatagattaattagaatagatcagcatgcgtatgcatgtacttgctgcaggtcaattttccggtgtagtactgtagaatggatatccgcatctctgtactgcccagaagggaattaagcaagacagagatcacctaataataagatatcctaatatatatattctgtttgtgcatgcaactcgtgtgattttgaaaattgatatacatgcatgtatgctaatttgtttagtaggacgaagacgtactcgattatgttaaatgaatttttttagcagaaggcatttccattaaagaaatgtagctcgattatgacatgatcaacgactaatggtgattggttagctggctgaaccccagccgatcggctttatccagagcagctaaactagctaggagcgtcgacggccatgcagacacaaagcatcattgtactgtataaaaaaaaatcttcatccattttatattacaagacatttcgttcatatttatttgaatttaatcaaatttgtaaaaaataaaacactaatacgaaaactatttttcatggccgccattttgggttttcgctgacggaattcctagccgccacgaagcaaaggccagtgaaaatcaagatcttcgctagcggttatcgaccgccagcaataatttatttttgctggcggtcgtcttaagctcgccacaagacggtcgccagcgaaaatgttttttcactggcgggtttcactgtgccagccgctagtgaaaatgctggccaatttttttttaaaaaaagcgacggacggagctctatccgcctccgtcaatgctccaccattcaaaattttcacagaaatttaaccacgcattcaaaaatcaacagaaaattacatcaacaatttacattaaaaaatttccattcacccaagcattcaagcatcagaaaaaaaatttgaagtcgtcgcggcgctgcccccgtcggcgtcagcggcagatctggcctcccaggtcgtcgcggcggcggatccggcctcccaggtcgtcggcggcggcggatccggcctccccgacatcgcggcgaccggattcggccgtcccctagctagcggcagcccacggcggtggtggcgacggcagctagcggcagcggaggagggagagggagaaggagagcccaccgccggacccgtcgcccaccaccgcagccggcccccgtcccttccccgccgctatcgttgccctttgccgcagccagccgccgccccttccccgccgctgctgttgccccagatctggcaagagggcgcagccggccgccgctggggagaggtgggagggagaaggggagcttgctgccggactcgtcgcccgccaccgcagccggttgccatcccttccccgccgctgccgccacccccatatctggcaagagggcgcagccggccgctgctagggagaggtgggagggagaaggagagctcttcgccggactcatcgcctgccaccgtagccggccgacccttccccgccgctaccgtcgccctttgccgcagccagccgccgccccttccccgccactgccgtcgcccccatatctggcgagagggcgcagccggccgcaacctttctccgtttgccacaaccggccgccgctggggagaggtgggagggagaaggctaggagggagaaaggagggagtggaggaaggaggaaggagacgtgggtggtggaggaaggaggaaggagacatgggtgggtgggggagccgaggagaccgaggagacgtgggtgggtgggtgatttttaatagtgatgcgttgggcaggcggtggatttttagtagcgctgaaacatatttttttgtagcggtgctcttcacggtccgccacctaaaatcggattttccgtggcggacacttaagaggtccgcaacgaaaaatagagtttcttttatggcgaaccttttagcgtggccgccaatgaaaattggttttcgctagcggtccgtaactcccctcccctcgttatatttttgctgctggtttttgcgtatggccgccagcgaaaattatatggtaacgccatgaaaaatcgtttttctagtagtgataataatatttttaacacaaaacaaatatactatatacttcctctgttttatattataaaattttctagcattattcacattcatatatatatgttaatgaatctagatatatatattaagattatattgatgtaggtaatgctagaaaattttataatatgtaactgatggagtatttattaaagtgttttataaatatgtgatatgaaacggaaagggtgtatatattaattcgctcaagtcacattcgtaccttagcgtaccgcctaccgcttacgtttccgcgctgctggaagatagggagtgtatagtcttggacaataattgagaaactaaccgagaacagattagtagctaagctaggattagaattgatttgcaaatccctttattaataaactggggcctccgaccacaataatgcaaatgacagatggccggccacataatcggatcacacctagctttgcatgattggatcgtacctacgtacgtacatcggtcaaagatctgatcgatccaccgatcgatggataccctatcccccaccctcaatcgaaattcgtacgtacaaactagctcgcgtctcgcgacgtcgtgcataccctatccagatacgcatcgactgatgttgcaaatactaagcgcaaggtcaataagaagaaactataatcttcgatatatgtccatatcagctaaaataaactagcttatcatataaatatcatgttttctgtcttttaatgcacgtacgataccgttgatttttgacacaagttaacaattcgtcttatttaaattgtttacgtagttatcgtttattgactctggtgttgggcacaattacaaaggtgtgacgaagacggagaggtcctaaaagttgcatgccgcaagcttgagtcgacggttatgcagttttttgccaattatgagtggagattcacaaatagacttcaataatatattcaccttattatttattggttcatttttatctttccgtgatgtttgctttcttttttgaactacactcgatgtggagtgctagattgtaataatagattgtagctctcttaagcaaagaccgggatgttatatttcattatctaaaaaaaagttttgttgtgagttattttatcactgaaagtattttgagtataatttatatcatgcattttgcacaaaatttttgaataaaatgaatagtcaaacgtgtataaaaattaacactatcatctattaaaaaacaaaatagaggaagcactaactagcgtcatctagcatctcatctcacttgcacttaggcttgtggccatttctttaggctatgcctaacactccaaggtagagcatggtttcaccaattcacattggtgccgagctactatgagggagagagagagagtagaaaaagagtgtggcttgcaaaggggctatgtagcctataaggacatggtgatttgagagagaaaagtagtggtccccaaccactgccattgttgctccatacaccacatcatccgctcgaattaatattggcattcaatgtgcggtcatcggcccacaatgtctggatttgcactcatcaacgacgaagtagaacaagggttgcttcgatctgtgctagctctatccatcacagaggtcgatactgtcgcccgatctgctaaggttgagcaagtcaccgccatcgagcttctctcgtcccaccgagctcccctcccaatccgaggatgagaggatgctagtggtgatcagtgggaggagaggacgatgctagcatgggggaggacggtgtacatggcaatggttgggtgccgacgcatagaggagagagagagtgagtgatgcagatagaataggagtgggagatagattttatatacttttaaattttaggaagccacaaaaaattggactttcacaaaggtaagaaaatgaggactaaataaaaaactatcagaggtaaaataaaaaaaaatagaagttacctataaggctactttgtattgtggaaaaaacccagactttagcctaggtgacctttgggatcactcattgaagctttaggttgtatcgctaatcgcagcttgtatgtttttcttttcgtttggagctcgtgtattgctgatgactaaataggtagctgtgctccaaccaattttttcctatctccatctctactgacgttaacttcggctttttcaaaatagtcattcatcatagatgattacaacctctaataacataatgcacatgtagaaaagataaacaactttgtaagttcattcttttatgataaactatcgataccggtcttctataacttccttaaatatgaaacatagattctaacaatgcaacgtagttgattctcatgaggatccaatattttattttcaggagaaagtctctctaatccccactgagaggatgtttggttgatgctt

SEQ ID NO: 10101 - DNA, 4229 bp, Oryza sativa
gcagaggcggcgacttgactccccccctccccgccctctcgctatagggtttcctcccttccccgtcatcagccgccaccccaccccctcccccgccgggcttcgccatgtacggtcaccgcgggtaagccaagcccctcctcttctctcttattcctgattaatctccgcaattccatcccgccgattcatccattgctttctttttttcctacaatacttgcttgcttacgcgatctcatcaatttctcgattcttttagggataatttctaagtaggtcactttgctttgctaccatgatatgatatgatatcatctgcctaggatttaggatacatgtacagcttcccccttacaagaccaaacctctctccccccaataaataaataaataaatcggaggcagtaatacatccaaattgatgtttcatcaactgcaccagcatcccaactgtggtttgtaagattcttttctactgatatgtgtcatccagtagtttgagtatttcttctattcatatgctgtcaacatttaattagtttttgtttatgtccactaatgcgttcgcatttcgactccattcacctttttaagccttaagtcatgtttagattactagtatttcttatctgtgcagttatctttatgtttgggttattttatatgaaatggggattgagagatggggggatcgtctcctttttttttcttttctctttttgggactctggattatctgaagggcaatgatgggaggcgggggggtttcggatgggtacgagggatcaaagaggccacgaatgatcgaatccaatccatacttcgcagtgaccgcaggcagtcccttggatgtctcaaagagggccaggatgatggaaccagcccctccctatttcggagccatgggcagcagcgctgctggtggcaccagtgccttctaccagccctacggcaccaacttacctggtgcaggggctaacagtgccatccagaactttccaggggtccgtctacgagggctcccctttgactgcgacgatcttgacatctgcaagttctttgttgggctggacatagtggactgcctcttggttcacaagaatggccgcttcaccggcgaggcttttgtcgtattcccatcacccatgcaagcagagtttgcactgcaccgcaaccggcagaacatgggcaggaggtatgttgaggtgttcagatgcaagaagcaagagtactacagtgcaatagctgctgaagtgaaccagggcggcttcttcgactcggagtaccgtcactccccacctcctccacggcccaagaaaccagctgaagacaagagcagcatggagtatactgaggtgctcaagctccgtggcctgccctactctgctaccactgaagacatcatcaagttctttgtggagtacgagctgacggacgaaaatgtgcacatcgtgtaccgtccagatggtaaggccactggagaagcctatgtggagttcccgacagcagaggttgtgaagacagccatgtgcaaggacaagatgaccattgggacaaggtacgtggagctgttcccatcaaccccagaggaggccagcagggcgaaatcgcgagtcaggcaatgaattatttgatccagtcatctactttgccctggccttgagcagctgtgttccagtttagctttcgccttgcatgcttaaactgtatccctcgcctttaggtttgtgtgtgtgtgttttagtatgcatcatgttgctaccgtgccacaacccgttggtgtggtgactttataagaacccgaattgcatttttaaaagaagtggtggattatgagatgcctgcactttaacagcagttgcgcctggttggatgcattttatatggcaatggcatgatcattgttttccttctgagtttgcgacagatgttctactgtatccccttctttttggtgaagcaggggatgaagctcgcactaactctgttccaaaagttggttgttaattaatatgaatatgcataaacataacgaggtgtacatcagtacatgcacgttgcggcccatggattgtgtgtgcatctgggatacggttttcccgattcctatgatctatccaatatgctaactctgaaactctaagcttcagcttaaagaaagctgggtgagaagatagtagtagctttttaattctgttcacatcactaattgggactacccccggacaacgattggttaagaccctgtttagatgggactaaaactttttaagtctctatcacatcggatttttggacactaattataaatattaaacgtagactattaataaaacccattcataatcttggactaattcgcgagacgaatctgttgagcctaattaatccatgattagcctatgtaatgctacaataaatattctctaattatggattaattaggtttaaaaaatttgtctcataaattagcttttatttatataattagttttataagtagtctatatttaatactctaaattagtgtctaaatacagagactaaagttaaatctctgtatccaaacaccacctaatagaagcaatgtttgtaacataccagcaccagcagctgtgcagtgtcaaatgcaggatgggctgagcagacaggaaaggttttgactgtcagttaatgttgggtgattttttagtcaacacttggtttgatgatctgtaccgttgactttgtaaacaaatgatctatattctactgtatgataaggttgaggtgctttgcggacaagcattaatcagccatcaatcaagccaatggagaagttccatgtagtttcaggattgggacacctcacagattttcagcgagtaaatgcatcatcacagcagctacaataacagactataagaatatattttaaggagataaaatagtgagcagagctgaactcagctgcgtctggagaaatttataatatgccactcaatagaggtactctaaccgaatgtcactatttaggatgttcttataaaaatgccactcaataaagataaagactcgttcttaataaaatgtcactttaggctattttgaggcttttaatcgcaaaagatgtgcggaatgacaaaaatacccatgtgtctttccctgcggcgataacgactccttctcggcgttggcgctgcggtggggcggcgggacggcggtggcggcgtcggcccctagcgcgactgagaggaaatcggccgtgcgtggacgggcgacgccgcgacggtagcacggccggccaggggcgcgcagacggggcggcgtcggcccctagctcctctcgactgcgcgcggtcaagtgacagcgacggcagcggcagctgggcgagcgcgcgccgacagggcggcggtggcggcgtcggcccctagcgtgccaagaagaagtcgtgagaaagagaagagacgcattctccagatctaaacgatcctaagggtatttcggtcatttcgcgagcttagtgtgagaaaaaaattaaaaatataaacaaataaaaaatgtctcaaaatagcccaaagtagcattttattaagaaacagtctctattgagtggcatttttataagaacatcctagagagcggtcttctgttaaagccacatctactaagtagcatattgttaagggcatgttcactttgaagccattttcaaccttaccaaattttggtaaagttaccaaaaaagtggctacatttagtttgctgtcaaattttagtaactatataagaaatcctaccaaaattttggtaagtcaactataccaaaattttggcattaccaaaatttggtaagttttttttttcgcataaagtgaaccggcactaaatttctccacctagatctgcacctgcaccagtacctgtacttgttctacttcttgttgtgcgaagtccagacccaattccaggctcaatcgtatcggcatcggtctcaggtaatgggcctaattccaggcccaacagtaagcaatgcagttcggtcatgggctcttcctcctcctatgcgtatagccgtataggaatagtcgtgtcgcgcctggattaggaccgcgctataaaatttaaaaatcaaggggttttttcgcaaaacgacgcgccctaacaacccaccccgcaagtcggcaaccctagccaccgccgccagtcccctcctcccccgcgctctccctcttcccataacgcc

SEQ ID NO: 10102 - DNA, 8757 bp, Oryza sativa
cccctgactggctaacgaaaactgcagtgtcttccctgtagatgggaccttgtctgtccagcaagtcacttgcaacctccatagtcacaggaatacctattgtccaaataatgcaaggaagaagtatctgggtcaagaaacaggtagctaatacatattgtcactgatgttgacatctaaaatttctacataaggagtcaggacaataagttggcataccagttaattcctccacaaaaggtcttgcagccaaggcagcattgtaacttgtaccacagccaatgaaaactaaccttctactgcgcctaatagttttgaggtactccttttcctttaatcctcctaaaagaacaccactatccttcactctacccctcatggttgttgttaatgaatgtggctgttcatggatttccttttgcatgaagtggtcataacttcctttctttatctgctcaacttccatctcaaggacagacaatgctcgttgcacagaagctggcttctctttctcatggtcaaacttaaggatagacacactgccatcctgcaatggccaaattgttaaagcttggacaaggcatcaaatgtaaggctaatgatgtcaaagaaacaaaagaactgttgcactagcgtgttcacatattatttcagtcaataaaaaaccagtgacacaataaaagtacaattgtcaaattggcagaaaaaatggtataaaggaaatagataactttaggtctagaaaagatagattgccccccattaaaaatgatctttctttctaaaaaagaaagtaaaggcaaaatagaacagataaggcaggtgaatcaacagagaaagctgaagagtaccttaatatgaacaatttcatcatcttcgatagccaaataattcttggtatgctccacaatagcaaataaatcactagagaagaataattctttgggcttcccgtttgttgtcagagctttgacatcatgaaatggtttcccactattttggccacttaattcctgaaaatagagacaacagttacaaatataaaaaaaatgtttccaagtcaaagggaagcagaatatttatagtatctataaatatgtgtaaaaaaatgattacacaaaagataacttctaaccaaaccaacatcaccataaaagaaaattatttaatctgcaagcaatctactgcacagtttctcacgtttgcatttttatagaacaaaacatgtggcagttaaccagagcaagtagttcgtagttactctattgagtgtggattttatcgcaggttccactctatgggaagaaaaaaatggtagttcttagcaccttttgacaagccaacatttgtgagaaaatgcacttcatgttttctagtttgacacttttacctaatacatgtttgaagcagatggagataagaacggtgaagagacaacagagttaaagttaacttttgatgttaggtctagtactacataataaagtcaacttgaacagcaaaagatgtagctcaagagcataacacataattcttacacaaaataaaaatcactgttttactatgcttgattagaacctagctgatagtttaagacaaaccaggatgcacttacattgacaccgagtatcagtgtgctgccccgtttgcatgcaatcaattcattggggtagtgtgggcttttaaagataagtgcgtaggctccttcaagctgcctcatgacttccataacaacttggctaaatgtcacatcacctgagaaaataataaaaagttgccttaactagaactagtacagtaagaccaacatatagaatctagttaccgatttcttttccttttgaattttgtaagaattctcctgccttgttaagagtaatgtattgcctaaataaaaatttctgagcgcgaaaagcataataaggtatatttattgcctcatctagttcttaggtggcaaatctagtttccaacatagatcatagtagtataattcttgctccaaagaaatgataatataattataacttgagaatgaaaggtttagctaaagatcagggagtacatcttgtctgttgtcaagaatataaataccttcttcatcatgcgccttatcaaaaacaaactttgccaacttagggatgacttctgtgtcagtatcagactcaaaggtgaacccgtgccggattagtgtctctttcagaacctgagcagatacatcagaaataccaagttatgatggaaatttatctgtttacatcattatcatctcttgctacattaatttgagatggtatcatgaggttacacatgatcatgaaaccaagtttgagatggttggctgattcataaatgtctaataaacttattgtgaattcagtatattgtcatttgccacttctataagataatattctctgcattacaacgacaataatctagcaaaatgagatagaactcactgatattctagttgctagttaatctacagcagttattttattccagtaaaagcatatgagctttcaactaaacggcagattatttaacaacaatagtgaggcgtctatggagattggagacagcccatgtgcagggcttggaagataacatgttggccaatagcataaatccaccatagttgcaataatgcatgtggattccccagctgtaaagatgatgagagaaatactatacaagaattctagtacaatatcagaacttcagaagagcaaggtaaacaagaacctcgtagtttgtgatgatgccattgtggacgaccaagaactcatcgccggcaccagaagattgggggtggctgttccttggggcaggcacaccatgcgtggcccacctggtgtgggcaattccagcatgcacattgaaggcggcgtccaggttcacatccttctcatcaacctctgaaaaatacacaaacatccaacatgacaaaagatagagtacaagagagcaccaaaattgtagccgagactaattgtatacggtataaatcgtcaggaaatccagagagaaaggaaatcagctctccaagtggtaaattgaataaatcaccgaaaatgccataaacccaagaagatttagagttgatccgaatgggtcaaattctaccttttctgaggagatccagaattttgggagctatgctatgccaatcccaaaaatgcaaagtgcgaacagaagaatttccctcgcaaggataactaaacccaaaatcgctaaacgacataatgatattccccaaaatgtgatatggatcccaatcaaaatccaaagcttttaccaagtgatacagccaagtcagaccacatagcacatggaaatcgtgcaaaaatccatcccaagaacccaaaattcaacccatttttcagcataatcaggagggaaaaggcactgaccggagtagacggatcgtacgaggttctcgatcttgccctcctggcggaacaccagcggggacgccccggcataggccggcaccgccgtagaagaagaagaagaagcgcaggagggaacgtcggcgtcgacggcgatgccggaggagtcgtagccgcggtactcgaggcggcggaggccattgaagaggacctcgaggatgtagcggcgctcccgcgacacattgtagttgaggtacgcgaagatcccgcacatcgtgcgccgcgccgcgctgggctgggcttctagaagcttccagaagtttccgggttcgggagagagagagagagggaggacgcggttacgacggcggcgaggagtcgccggccgaggcggaggaagaagaggagaaaaaggccgcgtttttttttttttgataggagaaggccgcgtatttgggtacgcggagtcaaagcccaaattttatactgatcgagtacagcaggacaggctgacgtgtagcctgtgacccagtagccgcacgatttggatcggacggctactgtagcgcacagctcttcgaaaggaaaaatggaaatctaggtgctccttactccctcaagttccatttctgtgcctaacaaactttgatcatatatcttatttaattttatttataattagtacttttattgttataagatgataacacataaatagtactttatgcgaaacttatgtttttaactttttttaaaaatattttaaataagacaaacaattaaagttagacacggaaaatcatggccatcctccttaaaatggaagggagtgagtgagtactcattacgggcggctgtcacttgtcatcacgtcaatgttaggccagtcacaatgggggtttcactggtgtgtcatgcacatttaataggggtaagactgaataaaaaatgattatttgcatgaaatggggatgagagagaaggaaagagtttcatcctggtgaaactcgtcagcgtcgtttccaagtcctcggtaacagagtgaaacccccgttgaggccgattcgtttcattcaccggatctcttgcgtccgcctccgccgtgcgacctccgcattctcccgcgccgcgccggattttgggtacaaatgatcccagcaacttgtatcaattaaatgctttgcttagtcttggaaacgtcaaagtgaaacccctccactgtggggattgtttcataaaagatttcatttgagagaagatggtataatattttgggtagccgtgcaatgacactagccattgtgactggccttaatacatgtgtagtacgtgttaaaaaaaatgctaatacatgtgtagatttgtcatgcttgtgccacgcgtcgcgtttctgattaatttggacgtcgatttttactcgtagttgcagtagatgacaactgagtgcgtgttttaagccatagtatggatcagatattttttggagagaaatatgcacacgtgttaggattttcagtcgtgttaatttgacactgagagattgtgtttattgctaattggagtgattaaagttgtagattagatggaatggatgcatggagtaacccaagtcagagtagcaaaggtctgggactggtcagcaaagggcagcgtggacgtagctcctctttcttttcttgcttgactcattctccctaaaaatctcctaccatctgcctaccagtttccaagaaacaaacaagtaccccccatgtttctgaaatttgatacttgtctattttgcttatgtcaagtatatagtaatgactaaactacgttctcatgcgataccacgtgattaatcaagtgtataactggtctactatttctttctctaatgggcactacccgagttctaaaaacacacacccaaatgaataatacgataattatcactggatgatgttgcttcagtttccagcctcccgaaaagaagcttccattactccaaagaactgttcactagagtacagataaacagagggaaccatacaaccagtccagagggacccaacgcagtgccaaacgtcaccatttcatgggcaatattgttacaagctctaggacagaacgtacatctctttactacatcaaaacggaaacaaagtccctagcttcacggataacaacagcatttgaaccgtcatctcataaatttgtcatccttaagagcttggaacagttagttgcttagattcggtttctgatataatctgacttgtacaaagcaaatcgccaattaagagctccaataccatagcttctgcttgtaacatatctttgtaaataaattcattgatctttcagctccttgacagcactgcatcttttatcatacacttacatggagttctgccctgcaggggatcacagagcagggcatagtacagtcaagaataatacagggaagcatatactccccttcgtcccaatttaaatgcaaccatgattttctgtgtccaactttgatcatctgtcttatttaaaaacaataaaaaaaacaaaaaaaaaacataagtcacgcataaagtaatattcatgttttataatctcataacaataaaaatactaattataaaaaaacaaatcaaataagacgaacgattaaaattaagcatggaaacttatggttgctcttaaaatggaacggatggagtatttccagcggggatcacggatggacatacatacagtacagcagatatattgggggcgccggccagtcctcagctttgtccacacctgtttctcaacatttttctatgctagttgctcctaacttggcctactgtcctccatctccaacaacacaagagtacaagacaagtactacaacggcaacaactatgcatgacatcaaaacgaaagctgggacctcgtcgatcaaagctaagcacaggcacataacaccctcaatgcaaccagcagcagcgaggaggccatgctgccatgaatcatgatcatggcgtcatcacaggagttcgaggctaatgacccacagcagctgcacgccaagcccaagaggctctaccaagtctggaagggaaacaacgtacctgctctttctttctttctttctttcttgctccagcgatctggctacagcttcttcaacttcatagcagcgaggtagactgattttccttcattttgcagatattcctgtgtggtggacgccttattattggcccggatgcagcctccctgctgctttccatgtttctcatccttggcccggccatcgtcttcagctatcagatggagtccacaatccaccgctctcaacaacggatgcatcgagctgcacagctgatagtcatcatcacaacagcagcggttagtgaatccccaaatcatttataagttgcttcttcacatataattttgattgccaatccgttctctagtgacatataccaaacaattaatccgcatggtagtcacagtgatttcagcttcaatatctgaaactgaaatcagtcaatcaggggttcaagattccacaagtctaatttccactatacaacatgtctagcactgtacagtcatgtgaatttcaccttcaaattgcaggaccttttcttcctcttcatgacatcagccagggacccagggatagtgccaaggaacacaagagcccacctgaagtcgatgaatttcttggctcaaccacaccatcgatggagtggagctcagggagaactccgcggatgaggttccgtaggtcaaaggatgttacagtcaatggcttcacggtgaaggtgaagttttgcgagacctgcctaaggtaccgcccaccacgatcctcacattgctccatctgcaacaactgcgtcgaaaagtttgatcaccactgtccatgggtcggccaatgcattggacttgtaagtaaacaatcaatgatgcagtaatcagtatagtcatcagcctaattcaatgtgcagttccagtactatttgtttccatagtgtttttagaaatatggtagagtataaccactatgcaatgaatttctcttaaaaaaaagctctatgaatgaatgaacttactttcaagtttccataagatgctggtaaatatgccaaaagagttcttcctctccaatggttaatgtccagccaaattccttccagtcatcttcagcatttgactatttataagttattcataaagctacagagcttaacaagacatttacgcttgaatttgtgagttataactttactttttagctaaaaggactcctcaatcatctaagttgaattacaccaggctcaatgtaagctattttttaattacaaaatcatcaagaatgagttgttaactagttccactgtttgactagacgtgcagataaggttaggcacctatgggaacagaacaatgaaattttcagagcaagacctaaactgtacctaacatacattttttaggactaaagcacatatttcgaaaagaatttctcgcaattaatgcagtgaacctaaggtcaaggaataacttatgtgaaagagcaggttaaccaagcactaatgatcatctgaactctatatttcagcaactcacaaatctcttatacagaaatgatgttaaagtattcttaagtgcgtgatcaatcattgcactctcggatggtttccacttgcttatcaaaatcatgccattttctattttttcttgcagaggaactaccgctacttctttctgtttgtagcgacatcgactttcctgtgcatatttgttttcatcttttcatgggtgaatgtctactatgaaaggggatacaatggcggatccatctggaaggctttgcgaaaggaagtatactcatttgtgctaatcatatatacttttatcgttgtatggtttgttggtggtctcacagtatttcatctttatctgatcagtactaatcaggtaaacctactttcttctttagctattctagagactttgctatagttactggttctcttatactgtaattcagtaaatgcattttaatgagtagacagtattaagagtttgagatagttctgataacttcaactagcagctccatacacggtgtttagttgtgtactgaatgtctaactagatccaactgcaaattctgcagacaacatatgaaaacttcagataccactacaacaaggacaacccctaccgaaagagcattgcagcaaactttgtagatgtgttcttcaccaagatccctccaccccagaacaatttccgttcatgggtaggtgagggcgcactggaagctggattttatactccatatattgcgctggatttgactgatccaagggaaaagatt

SEQ ID NO: 10103 - DNA, 14015 bp, Oryza sativa
tttttaatagatgatagtgttaatttttatacacgtttgactattcattttattcaaaaattttgtgcaaaatgcatgatataaattatactcaaaatactttcagtgataaaataactcacaacaaaacttttttttagataatgaaatataacatcccggtctttgcttaagagagctacaatctattattacaatctagcactccacatcgagtgtagttcaaaaaagaaagcaaacatcacggaaagataaaaatgaaccaataaataataaggtgaatatattattgaagtctatttgtgaatctccactcataattggcaaaaaactgcataaccgtcgactcaagcttgcggcatgcaacttttaggacctctccgtcttcgtcacacctttgtaattgtgcccaacaccagagtcaataaacgataactacgtaaacaatttaaataagacgaattgttaacttgtgtcaaaaatcaacggtatcgtacgtgcattaaaagacagaaaacatgatatttatatgataagctagtttattttagctgatatggacatatatcgaagattatagtttcttcttattgaccttgcgcttagtatttgcaacatcagtcgatgcgtatctggatagggtatgcacgacgtcgcgagacgcgagctagtttgtacgtacgaatttcgattgagggtgggggatagggtatccatcgatcggtggatcgatcagatctttgaccgatgtacgtacgtaggtacgatccaatcatgcaaagctaggtgtgatccgattatgtggccggccatctgtcatttgcattattgtggtcggaggccccagtttattaataaagggatttgcaaatcaattctaatcctagcttagctactaatctgttctcggttagtttctcaattattgtccaagactatacactccctatcttccagcagcgcggaaacgtaagcggtaggcggtacgctaaggtacgaatgtgacttgagcgaattaatatatacaccctttccgtttcatatcacatatttataaaacactttaataaatactccatcagttacatattataaaattttctagcattacctacatcaatataatcttaatatatatatctagattcattaacatatatatatgaatgtgaataatgctagaaaattttataatataaaacagaggaagtatatagtatatttgttttgtgttaaaaatattattatcactactagaaaaacgatttttcatggcgttaccatataattttcgctggcggccatacgcaaaaaccagcagcaaaaatataacgaggggaggggagttacggaccgctagcgaaaaccaattttcattggcggccacgctaaaaggttcgccataaaagaaactctatttttcgttgcggacctcttaagtgtccgccacggaaaatccgattttaggtggcggaccgtgaagagcaccgctacaaaaaaatatgtttcagcgctactaaaaatccaccgcctgcccaacgcatcactattaaaaatcacccacccacccacgtctcctcggtctcctcggctcccccacccacccatgtctccttcctccttcctccaccacccacgtctccttcctccttcctccactccctcctttctccctcctagccttctccctcccacctctccccagcggcggccggttgtggcaaacggagaaaggttgcggccggctgcgccctctcgccagatatgggggcgacggcagtggcggggaaggggcggcggctggctgcggcaaagggcgacggtagcggcggggaagggtcggccggctacggtggcaggcgatgagtccggcgaagagctctccttctccctcccacctctccctagcagcggccggctgcgccctcttgccagatatgggggtggcggcagcggcggggaagggatggcaaccggctgcggtggcgggcgacgagtccggcagcaagctccccttctccctcccacctctccccagcggcggccggctgcgccctcttgccagatctggggcaacagcagcggcggggaaggggcggcggctggctgcggcaaagggcaacgatagcggcggggaagggacgcggccggctgcggtggtgggcgacgggtccggcggtgggctctccttctccctctccctcctccgctgccgctagctgccgtcgccaccaccgccgtgggctgccgctagctaggggacggccgaatccggtcgccgcgatgtcggggaggccggatccgccgccgccgacgacctgggaggccggatccgccgccgcgacgacctgggaggccagatctgccgctgacgccgacgggggcagcgccgcgacgacttcaaattttttttctgatgcttgaatgcttgggtgaatggaaattttttaatgtaaattgttgatgtaattttctgttgatttttgaatgcgtggttaaatttctgtgaaaattttgaatggtggagcattgacggaggcggatagagctccgtccgtcgctttttttaaaaaaaaattggccagcattttcactagcggctggcacagtgaaacccgccagtgaaaaaacattttcgctggcgaccgtcttgtggcgagcttaagacgaccgccagcaaaaataaattattgctggcggtcgataaccgctagcgaagatcttgattttcactggcctttgcttcgtggcggctaggaattccgtcagcgaaaacccaaaatggcggccatgaaaaatagttttcgtattagtgttttattttttacaaatttgattaaattcaaataaatatgaacgaaatgtcttgtaatataaaatggatgaagatttttttttatacagtacaatgatgctttgtgtctgcatggccgtcgacgctcctagctagtttagctgctctggataaagccgatcggctggggttcagccagctaaccaatcaccattagtcgttgatcatgtcataatcgagctacatttctttaatggaaatgccttctgctaaaaaaattcatttaacataatcgagtacgtcttcgtcctactaaacaaattagcatacatgcatgtatatcaattttcaaaatcacacgagttgcatgcacaaacagaatatatatattaggatatcttattattaggtgatctctgtcttgcttaattcccttctgggcagtacagagatgcggatatccattctacagtactacaccggaaaattgacctgcagcaagtacatgcatacgcatgctgatctattctaattaatctatctgtccggccggccggaaagagagagatcatgccgcaaaagtcgtacttactcttttgagtcgctgtttgtaattatttaaaaaaattatgatattattatttatttttttacttgcttcattattaaaaatattttaagtatgatttatttttttatttacactaattttttacataacatggatgatcgaatggtcaaattggtcaaacattttaaggaaaaaaaatcaaaacgacatctaatttagaacggaggtaatacgtttgattttgactgaaactagcttgcaggataaacagagatagtagatacagatttgagcatatataaatcatactgcctagctagccacaaacgtgaatgaacaggtagggagaccgatggaaataatggattatgcatgtgcatagtaataaacgtgagcatgcaatgcaaggtcgtaagtaacctgcaggaggcaacgattaatcattaatcgacaagattggagacgtgaacattgcattgcccccatctccatgatagaactagctactagctagtactccaatataagggcatcctactgctagtctgctagcagcatgcagctgggccatggcgccatgtatcagccatggtcccatggatgcaaacaaaacacagtgcatcgatcgttcggtgtagtcgatcgttcggtgtagtcgatcgtctctgcatttgcatcaatgtacaaaaaaagtgctactgatccgtactttaattttacagttattcaatcaatatttttattactcactccttccaaaaaactgagacctatttcttttttcatcaaaaccaaaaagcaattaactcactcaccatgtggcaaaaccaatgaacattcaaccaataagtactagaatggcttcttgttttctgattaacaatttaatttagcatatagtgactgtaaataggactcagatttttggaaggagtgagtatatatatgattactacatctgtcttatataaatatataattatatattttcctatcattggagtatatcttttcttcttccaagtaggtaaataatcgtttttatctcttaattctcttatgttatgctagtgagtactataaatattataataatatggcaacttttaaactttacaatgcaattacaatgtaaatgtatacgtataatttatagtgtaaaaacaactctctctctctctctctataaagaagatgtgacagaaattgtgatgttataaatatgagactgtctatacatctgttaacagaaaatcccacctctcatctttcaaattctggaccgttgaatatgctttaggattcatgcacagctttaactctaactttttcctcccattcccctcctcttcgcgcattccgccgccgccgctaccctcgcgtgttccatctcgccactgctcgatccaccgccgccagcgccccactgtgccgccgcccgtctcgccgactggccgaagggcgtcaatggcaccggtgaggccacccggccagccccctcccctccccttccccctgtccttcccctccctttccttttctttcctcaagccgatggcggcgctgtcgtcttcctcgtctccgaaggtggggcgccaccactgaccgcctcctatctacctttccgctttgcccccaccgccagcttccgaccccgcagctttagcggcgccgccgccgccttcgccgcccaccgccggactgttgcctcccacgaccatccctctaaagctggcgaactccaccctcttccccctccctctcccacccctcctaccaccaccccaactcgggaccctaacccgtagggtcctctgccggagcctagggtattgccgacgccggagaaaaagaggaggtcgccgaagttggaggagaatgcctggagcacgaatcataaagcttatccagtggtccaaaatctgtaatatttggagaaaaatctgtaagatttggagatgtgttttctatcgagtcgacaaggttagcaattccgtataagggtaagatagttagccagtattttttatttggggcagcccaaactgcctaactagtttaaagccggtaaaggcaaagcctgcttgcagcggtagtccttccgttgtttgatttgggctaggcccattagcccactaaggcccagcccgtgtagctagcggccggctgcatgcattgcatgcttatgctgacgattaccagtccttttttttgggagaaattttcaggacgattagtggagtggagtacggtacgaaccttacctaaatatgtacctaatcccactgcaactactccgtacgtagcaattttaagctgaaacacaatgtggtttaatttgattcgatcgagtcaagcacgtacttacatgtatacttgatgacaacgacgactaatataatcgaaggcaaattgcacagaccaacaatttccttctgtattaaatatttgttagctgctgctacgtataattaaggaggccagacctgcatccaactgcgtagtagtgtctgcatcgtcgatgatcagaggcagagcaaaagcaagataacggcttggtgtaacaaacaaaactgcgaagagatcgagctaaaggcaagaattgtgacgacgacgcaccgcacttgcacggctagaacaaccaaactcatcatccatcattatttcccattcttttaaagttcgtctttccggcgccgtaaccaacacttgatactaaatcccagccgcccatgcttcaatatcgatcgataaatggaagcaagaactactatataagttagccgatcgatcgatagatatatatatagatagagcgcgttttgcacacgcatatatccatcgatcgattgatcatgcgctttagtcgtcacttgtccaactagctagctctacttccatatatcgatcgtccatgatggcggcggcggcggcctgcacgaagctgccgttgctgctcctgctcgtcgccgtcgccgtcgcagcgtcgtcggcgtcgtcactaacgccgcagcacgcggccgtgccggagaagggacctcgccccggcggcggcggcgttaccttgcacctcgaccaccgccaggtaattaactatacgcgtatgtgcttaattatattagcgatctgcagttagtattagctatcgatcagatcatccatgcgtttcgaccgaattacgcgtacgttgtttaattaagctgactgatatatactgcatctgcatgcatgcaggtgatggtggacaatggcatcgtgcaggtgtcgctgtcaaaacctgggggccacatcaccggcgtccgatacaacggcgaacgcaacctgctccgcttcgacggacaacccaactccgcagggtatattacactccatccatctctccatcggtgtaactactatatatagttttcttgctctttaactaattactcagttctttcaatttctcaaaacatacttagtacatacctgcctgtctttttttaatttttttctcaaaaagttcaaattcaacttctacatgttataaaaaaataacaaatataattattatggtacgataactattttcagttaaatttgttgtttctattgcaacttgtaaaagttgaatttagccttacatatttgtgaaattatatatattttatattaatctatgttatcatatttttaatttttttttgtgattatcttagatgacacatgtaaaaaaaaagatgatattcccttgatagatgaaaagccatctttatgttacataccagttacatctaaccatatataattaatttgatcttggtctgtctgcaggtactgggatgtggtatggaatttccccggatccaataatccaagaggcatgatcgatatgtacgtcattacttcttaactttattgtaaattaagtcatttatatatcgcctgctaactatactttgcttggtatatatgcatgcgctttgatctttcctgtgtttaaggtcctcaattcattttttgttctaaactgaaaaggatgcatccatatgctactttaattagagtcatccaaaatcatcatctttgcgtgtgttcttattccacatttgtatatatgatctgactactgttcaatctcaatttatttctaatttataccacttttctacttggaatgtgcaaaataaatgtcagttagaaagttggataaactaatactctcgttctaactgaacaactgaagtaggtacataatctgaaagtcactaccagccagtgagcaggtacttgcctagcttgctgtagttaatagtgttcttgttttattgccttgatctgttacagctcataacataattaacaagatcaacctacccaataaccacaatataacagtactagttcgatttaacaccacttgaacatatagctaccagcctgttaattgtaatcaatattatttcttttgaaccacccatattcatatggattgaagaacttgccttcaggccagataacaaacaagctcttgttgtgagtaaaatatgagcaagcctttgcagttcatcactctgcaccgaaagatgcctcctaatagcaatagtaccaagagcaacctgtaactgtgacttcagttcttttctgataagcaaacggtgttaaacaccgtcagaaattactgcctaataaacagaggatatgtacaagagctcaaatgattttctttctggaaaacataatttcacagtaatgtaaaatagtatgcactgcaccttattacgggctacagctgaacgaattatgcttttctctcaaaaaggatgaactaaatgactgaattttcacaggctggatagtactgaattcaaggtagtatcctcaagtgaagatcaagtggagctttccttcaggagcacctacaatccatcacgtccaaatagtgtcaggctaaacatcgacaagaggtactcctttagaattttcggacctatattaataaatttggctataatttatcctgccatatagtggtagtatacaaatatcactgccattttacgattgctgctctaaaatttgtgcaggcttgtgatgctgaaaggtagctcaggattctactgctatgccatctttgagcatgtcagggactggcctgctctcaacatttcagaggctcgcctcgccttcaaactgaacacggacaagtgagtattccttctcaaaaattgttctctgaagacattcaatatttgcttgatctgcagtctaatcttgaaaacatgtgttcatgaacgttttgtcaggttcaactacatggcgatctcagacgatatacagaggtttatgccgagtgcgacagacagagatgcacctcgcggtgctccattggcatacaaggaggctgtcctgctcgttgatcccaaggaaccacagttcagaggagaggtaattaactaaccgaattctgaaacatcttgcacgccaaattaatcaggctgtcatcttttaatcgactgtttgatgtatgcatctggtgattttctgaatttgtgatgtactaggtggatgacaagtacgagtactcgctggacaacaaggacaacagagttcatggatggattagcagcaatcaccctaaccccatgggattctgggtgatcacccccagcaacgagttcaagagcggcggccctctcaagcgagagctcacctcccatgtcggcccgacctctctgacagtaagatcaatcagttcaccctacaactaattactattcctccccgcaaaaaaaaaaaacaattactattcctaataacgaactctgcacttggaatcttggtacagagagaaaactgaaattttggttcgtgtcagatgtttcttggcacgcattacgtcgggaatgacattgttctgaagattgaggagggggagtactggaagaaggtgatgggcccggtgttcatctacctcaactccaatccgaggagaggagatctgcattcgctttgggtggatgccaagttgcaggcagaagctgaagctaggaaatggccatacagcttccctgtatcccctgacttccacaaggcaagtcagagaggatcagtcaccgggaggctatttgtcagagacaggtaagattcattactttcatagtttcaactccacacaggtacatgatgacttgcatttcatgggtcaagattgttcatggatcatcatctctgaaacgttgataatgtgtttgttttgatgttaattattattttatttcaggtacatgagcagtaaggacatggcagctgggatggcttttgttggcttggccactcctggacaacccggttcttgggtgacagagagcaaaaactaccaattctggacgagggcaacgccctgcggcagcttcagcatcagtaatgtgagagcaggagtgtacaacctctacgcatgggttcctgggtttcttggggactacatgtacacctcgcaagtaacagtaacaccaggttaagttagcactaattcagatggcatttggtattactccctccgttctaaatatttgacgtcgttaactttttaaacatgtttgaccattcgtcttattaaaaaaagtaattattaattattttcctatcatttgatttattgttgaatatactttcatgtatacatatagttttacatattttataaaattttttaataaaacgaattatcaaatatgtgctaaaaagtcaacggtgtcaaacatttagaaacggagggagtatttaacatgataatctggatcagaacaactctgtttaactaccattgtttgtctgaatttaagcaggacgtggcatcaacctcggtgatcttgtgttcgagcctccaagatcaggcccgacactgtgggagatgggtgttcctgacaggagtgcagcagagttcttcatccctgatcccaaccccaaatacctgaacaagatcttcatcaccaaagacaagtacaggcagtacgggttgtgggagaggtacgctgagctataccctgacggcgatctcgtcttcacgatcggcgagagcgacatctccaaggactggttcttcgcacacgtcacaaggtaattaaacaacaacgaacaaaacaatcaatcaatcaatcaatttcctctcgatcgattaacctctgaagaatcatcaagataaccaattgtgttttctttccttgttgtgcagaaagcaaggcgacgggtatgcggcgacgacgaggcagatccggttcaggctggagcgcgtcgtggcggacgccacctacacgctccgcgtcgagctggcggcggcgcagatggcgagggtgcaggtggtggtgaacggccgggcggacgaggcgttgacgacggcggcggcgttcggcgacgggaacgcgatagcgcggcacggggcacacggcgtgcagtggagcttggagttcgcgatcaaggggtacatgctggtggagggagaggaggagaatgtggtgttcatcacgcagacgagggcgttgagccccttcttcggcgtcatgtatgattacatccggttagagggtccttcttcttcgtggcgagatcctatgacgacgcgaggtcgatgaactagctcatacatttgcaaggtaggtagggctagtagctcgagagtatggtcctctttgtttaggcttataagccaacttataagccaaaaagtttaagcctaaacaaacaaacagctttttcgtttggcttttttaaagctataagccactcttacactattaagccaaaagctaggttggagaagcttttttttgcttatataagatagatgtatgacttcaccactaaacttaggacattaaattcactggcttataaatcatataagccaataagctgacttaaaagtctaagccaataagcctaagcctaaacaaagatggcctaaagctgatgcaaaatgactccctcaactatggtggctttttgttgatcaaagaaattaacaaaataaatatagggtccacatgtaagtgactacatctctcctcccttcccactctttttctctcggttccctcgccaaactgtgaaggcagcctgtgtggtggtggcatcttctcaaagatagggaagtgatggggttcggtttggtagttgagctcaaacggtggttaaccaggacaacgacgacatctttggatgtgattgaggagaaggtgatagaggtgccagtgggaactggacaccatactatactcccttgactcgatggccacctccaagcagttgctctgtccccgcgctactccttgtgtcgagttgcaccatcgacatcatggcaaggtgcctcagctccccgagccttaagtccttggcaacatctcgctcgagctcgagccccacgcttgccatcaccacgtcgaactcgagtgactcttcctccgaagtgagccaaccctccttggccctctccgttccaactgccagcatgattcggtggcatgcctctggtgacggttggcgagctagggttggcttccaggtggcggaggttacaccctaggaggcatgctcctagcagtagcataaaacacggggccatgtaccactcggagatgatccatggcggccctcccctatacgcttgtgtactccctccgtcccaaaaaacacaacctaggcaagcatgtgacatcttctaatacaatgaatctggatagccctttgtccagattcgatgtattagaaaatgtcacatcccctcctatgtttagttttttttttgcaacggaggagtacacttgtagtggagtggcggtggcaatctctctctatactcgcagggtgagagagaggagtaggagggagataagaggggaggatcccattttttttccaggagacttacattgggtcctgcctatttttaacattttattttattttattattggaatggtaggtaagtgccacgtcatataaaaactaggccaaagtgactcgtaaactcaacaccacagaggaggaaacctcaccattagcatcgcctagggagttaaattgatctggttttaacgattgagggggtctttatacctgattttaggattgatggacacgacccaaaaccgccctatagttgagggagaaaaatggactttctccaccaaaatatggttagtacacttgcattcgaaatttgaattttaccagcagacctacttatggtatttaattaatcaatcatgaattttacagaatacaaggaagcattattcctcctttccttatttccgtgtagtaatgtaaaaatgatagcaatggattaatacataattatcttatcgatgcaccacaaacacctctatataaagcctccatattatcttgtttgccaacggtatgatcctcgactgtcctgaagatcgactcctagagaatgatgtctcttcttgcattctttgcagcaaagcatattgttggcttcaacgacaactactgttcatggtgtacaaatcgatcccaatgacattatcaagaccatagaggtaagaatttctacattatgttaatcttctttatttaggattggttaggttaccacttcgcagatatctattaactatatatcatagtataaatctgtttaattttaatcacacaagatgaattctcaaatctaatattcctcatcttgatatatattcgatctggttgaattcatgaatttatatatagctgaacaactgaggtcattttggtccaggtagtaatttttccagtgatcattgaccttaccccccaaaaaagtttcatgtgctaattaagtctcactttggtttctaattgacagagcgagtgcggtgatattattgactgcgtggacatatacaagcaaccaagcctcaagaatccattgctcaaagatcataaaatcctggtgctgtacatacgtctgaacattttcattgtcgattactactttctcttcacgttataattataactacaaaatatttaggttctgaatagattcatgtatatgtttcatatatatacccaaatatatatggatgttagcaaatttagacgagagatggaaagatcaaaatcaaaatgttttaaatataaaacatatagaatattataatagttttttaaggaatgcgaccatttatatatgtatgtatgcaattgttagaaagaaagtaatactacctccatattttccatattttaatgtatgacgccgttgacttttttccaacgtttgatcattcatcttatttaaaaaatttatgtaattatcatttattttagtgtgacttgattcatcaccaaatgttctttaaatatgacatgaatattttcatatttgcacaaaaattttgaataaaacgaatggtcaaacgttggtcgaaaagtcaacgacgtcattcattaaaatacggagggagtagtaattaaggagagaattaagatcgaagaactaattgcagtctaagagctactagtactgatgtatgtgatgaatatatattgttcagttgaaaccaagcgtggatcgtcccaagatagttgagaagatgatggtgttgggaagaaacaactcgttcaaattcgcggagcaggcatggcatcgaagcggtaggt

SEQ ID NO: 10104 - DNA, 14969 bp, Oryza sativa
tcccaacagtgcttcagaacatagactatggttcctttgaagataatccagatgacaagaacaggaatgaagatgatagactagtgccttttgcttcaacttgggcacaacaagcaaatgaaggtgctcgaacatctgaaatagctactgtagaatataaggacgaaataagtgaagatggtggtaaggaaattattagttcaaacacaagttcagaacaaacatcaatagaagctaatgcagcagcatctgaggatgaaagcaatgaggacaatgctggaaaaagtaacagttcagatagaagttctacccaaaatttgggggatgtgaactatagctctgtattactcatctaaattgataatctgttcatatacatggccattatgagttgacattattcttagcattacacatgataaataaaaacagaaaatgaatgactgtatgcctcagcaaaatttttagaatgtattagtttacgtctagaagcccatgttgcactgttcacgctttcctgcactatatgtttctaatttctgtagcatgtgggccgtaatgtggacataaaaagaaaagagttctgttgattgattactaccttaatgatgcaacagttcagattgctctactgcctttatggtactacaaaggtgaagctaacgatgcagatgtggagcaagtcacagaaggggcttgacattcacaaaataatccataaagcaggaccaagataatgtaaattgttaagtaatgattccattgctcattatttggtaaaaaaaaatacagctgcttacagcttacaagctaaactttccagactaactgaaatctggaatttgaaagcaaattactggtcgctaaaaggcagtaccaaagattgcacatttctgcaaaaatgaaattcctcacgcctgatagacatctggaagctgaaggcctacactggcagcagatttgttcaatatcttcttcatctcctctgatcggtccacagctatattatacgagaatagcaggtcctgggcaatcaaacatgatttacagagttaacatggtatacagtgcatgaacaaccaatctaaactaggtgtgatgtactgggaagtgggaattagcaatgaagcaactgcgagtttgtatactaaaacacaccgaaggaagttcaattcatcacgttaatcagagtttgatttggggaaaaaaatagcaaggaacccaatagaaaggggagtttcagtcaaaaaaaaatagaaaggggaaagaagccttctagccatttcatcgaacacatttatctgctaaaacaatgcgcaaaacaggagaagattatacgcatctagaaatggctccaaccttgtggtggtggacgctggcgaggaggtaggcgtaatccccggcgagccgcagccgcgctctggcgtcggcgtccgtgccagtggggcggcggaactcggaggcgacgaactcgcggaagtgcttcttggagtccccccgccgacgtgcttctgcaccgccttgagcacccgccggtagacggccgccgacgtggccaccatcgatctgtccacggatccgccgcgagaggaggcaatcggacgcggagactgcgggtcgccggcctcgccttcttggccgtgtcgatcgaactggaactgtagaggaggaggaggaggaggaataggtaggcgtccccttgccggagattctcctctgcagttgccggagttcgccggagcttctccgccttcttcaggaaggagtaaaggacagagtaaagggactgaagtaaaaaaaattgcaaagaatgaaaagggctattctgcaaatatccatcttcatcctgagcctcaatctgaccgtccatcttcgatctaacgcccaaaacatttgcaaatcagaccatggtttggtttggattggactgctacgagtttgcatataaccaaaaatgcttctcgctcgaacatttcagcataaaataacttttttctttatttgaagatggcttatcaatactttattatatctattataaagctttaagtttttccagggcggatccaggaatgaaaaatagaaggggctcaacatacgggaaaaaccgacataaacatatcatgtctcatacaatattacagtatcaacaggtacccctatatcatggtctgcaatttcgattctaaaaaatttaggaattctgcaacaccatcccccaaggaaactatcacacccaaataaaatcatttttcttgtgaagtttaacaaaatctattcaattttggtaaaaaaaaaattcaaatatcgaaaaactttcttgcctaaaaatttcgaaatttgcagtactaatcttgaattcctagctaatctaagctccctgattcaaatattggccatctttgtttaggcttaaacttattggcttagacttttaagtcagcttattggcttatatgatttataagccagtgaatttaatgtcctaagtttagtggtagagtcatacatctatcttatataagccaaaaaaagcttctccaacttagcttttggcttaatagtgtaagagtggcttataactttaagaaagccaaacgaaaaaactgcttgtttgtttaggcttagactttttggcttataagttgacttataagcctaaacaaagaggaccttaatagtggaagggatcgccaatatatcgggttttacggttatgtgatacaaatcaaatcagatttgcccaataattgagcgagtaaaaacgaactttttcctactttttgcagcacgcctgatgatgcgtttgtgatatcgtgggcctcaaccaggtgccagcactcccgtcctgaggccatcgacgcttcccatataattttggcccggaactccaattccatcacatacaatatcggcccagtatgtttgtgggcttccggcccaaatcgccttgggctgtagcctacgggtactcaggtctctgggggagtcaagggtttaacccgtcctgcgacgcggagcaccggccgccgctcgccgacgcaagacaacgacgatgccgagcttccctccgcccggcaccgtcaccatctgcgagatcaaccgcgacctaggtgtgctatccactccctgctccccctctctctgctgtctccaatccgcttcgcttgctagctgggctgctcattccaagtctgtgcgttgcagttgcggcggatgcgctgtccgacgatggagccaaggatgcctacggggatgtcctcgtcagtacactcccatcttccccccttcctcctccgcctcgcatagtttcgtctttcttctttttcacaacactaattttattaggcctctaattgaaactttaatttgggatttcttctccagggaatggtcttcagcccgattcctttccagccggatgcgattgttgccacccacgagcctcctgctgtcactgaagctgctgagattgtccccagaacaagtttagcttccaccgtagctgagtccttcaaacaaatgctattcccttcttgcgatgtgagttggttctttatcatatcttagtgactcaattgcgaataattaatatatctccatattctgtttatgtcataatatcagttggcatagtatactgttagattgaatttatttatttatttttaatataagggaggaatatgcctctggtcagcgtcatatcatgacaatgttgcatttgtgaaatctggtacctttcctagaggttctagtggccaagggatgcttgtggacattctctattgttcttctgctgaaggtagtagcctagtaggaaaggatcctatggcttacaaaatattgtatactcgcttcaacaaattatagatatcatcgtcgaaaaaagtacagatatatttttcatccatatgatttcactaaaggaggtaaaattactgaaggcgtgcagggtattgaaatgaacactcaaagtcatataatggatgaaacataatttatgtcatactgagtgcatgcactgtatcgaaatgaacactcaaagtcatataagtgaccaaacattaacttatggcatagaagggattaagtgaaaacttagtgaaacataaagaacattctcttttaaatatcggtgtccctggaaacagataagtggtattttcaccagataaaatgtagaccccagaattttgcattccaaaattagttaccagtaatcggtcagaaattttaacatgagaaaagaaaaaagatctgacatataaaatacattaatacatcacaaatagatcataatgattgtagggatataatccatagggacatgcttcacaaaaaaagtatataacatacaatagttccaccacaaatgtggcaattgatttaattctagaactggatgtgagtatttctttttccttcagaaatgtaacaacaaataaacttgaaagagaagatgaagttggcatacttccaaagttgaatttaaattgttccaatcaatttattggtactggttcattggcttaggagcggcaactgatcacttaccgctggctgtatcatgactcctctttgtgcatattcaacactgcattatttaattttgtcttctaattaacatacttgctccatttttcagttcttccttaaggaccaatgctgtgtctaatttccataccctcgaggataagtcctttcttcgagttgagctggacgatctcttgcaggttgataacaaccattccatctccttggtggttgtagaagtgccccagttgtacctccatccagccgtcaccccgttctctcggatagctcactgtctcctctgctcgtcctacttcgcttctacccatgtcaagaggtgtctcttgcgtgcgtgggtgcagagagacggtgcgcttggcagacactacttgatcgtccatggtgatatatgcctcttgtgtccggcagtcaagcccgtatgatttatctgccaatttgaagatgagatagactatgtatcgtgtgttgggtgagagctctctgcagttgatgcggccacgcaaatggaaccagcagacaaatacaagcgcagctactctttcaaacctgaaacaaggagaaactttggtttttgtttaattatcgagaaaaaaaatcaaagcaaatcaaagaatagtatgtatattgaatttaaacactatctgattgagaatgtttattatagtttatttcttaatgattttgtatttctaaaagaagtgtcatgtatatgtgattatgtttgcaaaataagtgcttcagatttatcctccacgtttgggatgcaaacctggaatcgggtaagtagatccatctccagtaccgggcatcatccccccatgctatctctaatgatctggatgatagcaagtagcatttagctccgcttgttctttccaaccaaaaactctggatgcaaatgtgcaaattagtcgcgcgcattcatttacttagcatcaagataacaagaagttagcactaatattgaacaaaataatggattttccctggcaacattgcgtggagctagattgtaatattagactttgatttaatatacaactcgtagctcctcaatacaattgtattttgtatatagtagatttaagaatatagaattgaatttgatttacaactcttagtttctactttcgtaggtacaattatttgtatacaatacaacaaaagtgggattggaactaatatacaactgttgacatttatttatgtgaatacaattattttttctttaaaaacaactatattgatgtaacgacccgcctctcccaggccaggaccgcttacatatgacagctttcataggtcatatactatgaaacgttttatgacctattttaagtgactacatatggcagctttcatgtcctcccagagagacacaagtcttttatgcacactatatatgacagctttcatagtcttttatgcacactacatatggcagctttcataggtcaagtcttttatgcacactatatatggcagctttcatagtcttttatacacactacattatgcacactacatatggcagctttcataggtcacatgtcctcacttgtgcgcacccgggaggtcttttatgcacactacatatggcagttttcataggtcatatactgtcctcatagagacacacaagtcttttatgcacactacatatggcagctttcatgtcctcacatgtcctcacttgtgcgcacccgggaggtcacccatcccctcacttgtgcgcacccgggaggaccctggagttctttggagatcagcttctggaaaagaagttgcaacttgttaatatgagtactctattaagcaacttgttgatatgagtattctattaatcctattaagccctaggctagaatgttctggcagctttcataggtcatagactactctgtgtggtatgttctagcagctttcataggtcatagactgctctgtgtggaaaagaagttgcaacttattgatatgagtattctattaattctattaagccctatgctgggatgttctggcagctttcataggtcatagactgctctgttctggcagctttcataggtcatagactctctgttctggcaactttcataggtcatagactgctctgtgtgaaaaagaagttgcaacttattgatatgagtattctattaatcctattaagccctaggcaaaattgctccaggccaagcacgtttaaccctggagttctttggagatcggcttccagaaaagaagttacaacttattgatatgagtattctattaatcctattaagccctaggctgggatgtcacaattgataattctgcaccatcataatttgaatagatcaaaatctaatggtttaaataattttcttttttcaattaatatggtacggtttctatgccttccgagtgaaactaatgattttctttttcgagctatcttaataatataaccaatgaatgtttttttctcgcaaacttttgtgcggagctagataaaagtaggattagaatttgataaacaattcatatcttatgtttctataaatatatgatttatatatgatactaaaaatagtattagatttcatatacacctttatcttatgtttccgtgcatatagttgtaatttgtataaactattttaaaagtaaaaatagatttaatatataaatcttagcttttgtttcaggtactcatattttgtatacaaatttatcaatcaatctatgcttataaggctataacttatattttgtatacaattgtgttttgtttttctctccgactaatgcgaggtgtgatggttcttttttaaccatcttaactgtatactactccattaggttacaaacgttagacatttagggtgtgtttggttgggtggataagactggatgggagatagccgcttgattttttatggtacatgtggatggggcggtctagaaaagggaatatttcctcaatatgctagatgagtgtatacggcttatttggccggatgaagccatccatgctttcgtatgggtgacgtgtcatattctgattagttgtgcttggtttgatttttttctcctaaaccgtttatctaatttataatttgattacaccattatattagttacaattaaatatttaaaacaagatctcgaatgattatattttgattaaatatatatatatgacaaatgggtcccactaaatttggcttatcccatccatgctctatccctccaactaaacaagaaatttgatcatcctatacatacaaaccaaacaaaaaaaaattagatcgtcatatccaataaaatatggatgaccatatcttatccatgcatgatcatgaaccaaatgcacacttaaggccaagattcggtcatatttttggaacttgaccatcaagtgatttctgaaatggttagtttaaaaacaaataattacggtatgtacttatttgcctcaaagagtagctagaattataaggtttaaaagtttgactaaatcatgtccaaaacaatggggagtattaacagtggtacagctgtggggggtgccggagggggccaacacctcctatccaaacaccaccaccgccaccctcacctgtttttactctatattgaggttaactaagatatgtatttatctagtttatttgtgtagcttgaaattattatcagtttagttagcaagtctaaaaaaacattagcaagaaacatgatctacaaaattagtttgtgatttctcatctttttcaaagtaaaatagaatatacttatttgtgagattattcaatagtttacattaaaaggatttaacaataaaaactagttccaaactttcaatgatattattaaagagctaattaagattcaagtttttttaaaggattagtttacacgcattgattgttattgacagtaactacttgacctcctttgctatcgatattggtaattcagtcttatggcttatccccaccccccacaccccctaatcttaaatcctaggtattatacgtaccttgctgcgttggtcgagaaggacgtggtcctgggcgaggctgaggaagagctccttgttggaagtggtgaaatccacaggatcgtcggctcgagcgaggatggagtggtagtccggcggcaggaagcgctcccacacggcgttggagctcgccgctgcttggaagtcggcggagacggcggagcagcggcaggcgtccgtgggagtggtgaaggagattgcatgagccaggcatgcctctgggaggcgtgagatgctgctgctgctgcagtatcctgcttcttcctccttcttaccaacgctcacatcgtcgtccacttcctcccttcgtgattgcttcatggccagcggcttcaacaactgtcgttggagatatcacaatctagtatactgtatattggactataggtaggcatcaggcatgtctgtacacgatagaacttgtacaatctagtatgtgaacgcatgtcttatcagtaaggaaatttcgttgttatgagtaacaactgatcttttcccacctaatttattattaatcaaccgtacgttacatcatcaacatatacaattgtatatccactcctacccaaattccacggcgcgccatcaggccacggctgccacgcgcttgtgctcgacgcgttgacgaggaggaaaagagctgcaaccatctagccctctcgtggcaggtggatggactcgtgggtccggagccattcagccaacagtttaatcaggcgataggtaagtagtagaatacagcatttaggccagcgttcaggtggttcttccccaaccagacaattcctccaacagatcgacacaagccccggccgccatcgtcaaggccactcgcctgtgctatatttcatatactagaaaaagactgcgttgcaacaggcaatggcggatacataaaatcgattcgttggtgtcataacgtttctattgatgtcatagtatgctaattatgtttagatcatattgttataacatagataagcagttatgctataggttttgccgaaagtcgttggtgtcgtctgacaccagtccgcccctggcaacaggtaagtgttttttaatatacaacaactattaggagctaagcaatatattgaaacattaagatcactatacataagtggagctgcagacccagctagcatagccgatgtctcctcttgctaccaagctagacccacacgtttcattagcgtcttcaacctccggacgacagtcatgtgctactatgatgctgtagcctatcctttgcatcaaatctggccgaatctttctcgatctcccaaatttagttgtggatttttaatccactcaatcttctgtttctatttccccgtaatcgaagcgaatccataaaactgggggataaaaatgacctggggaagcttgtcggccgcattattggtgaccgttaaacgaagattaaatctggtgaattaaagccagatttataaggaaaatcattggagaaataatgagggagttctttctgtttctcaataattgaagcgaatctgcaaaattggggataaaaatgacccggggaagcttgtcggctacatcattggtgaccgttaaacgcagattaaatttgatgaattaaagctgaattaatagggaaaatcatggggaaataatgaggggggagtggggaatcgatttttgcaatcaattggaggaggaaacgtatgaggcaaatcgacgtggcaacggtgctaggatttggccggcagctagaggcgcacgtagcttgcagtggatcggacttattaaagaaaatacaaaatcctcctaaaagaaaaaggtgaaataggtgggagagaaatggaggtccggaagactgaaagggagagaaaaaggaagcagggctgactcagagtcaatgacagacgaaaaaaagctatgaaaatctttcgtatattttaattaggtatagatttgtagagagagaaagatggcggtggcaatgatgcctcgagagcaactacaattttccagagcaatgccaaggagttgcttgctgaactaaaggccaagctcaccatggtgaaggccatatccgaggcggcagacagccggctcatcaccaacaccaaccttctccactggctgatgcgcctacatgcggcggctcaggaagccaaagatgtcctcgacgaattcgaggtcgacggctcaaacatcgcccgcaagcgcaaggccagtgacctcatactgtcatcccgatctctcaagaatctggtcattgctgatgaaagcctgaaaaggttggaacatgtcgtcaagaccctcacatagctctgcgcaacctcagccactttcattgagctcatccaggggcggatctccagtgtaacggccggtgttaggcgaaatcaacaactttcgataaaacatatagttaaactatttatccatttattataacaccatggtttaagtataattagcatactatgacaccagtagatacattataacatcaacgaatcaatcttctagatccgctgaaccagtagagacatgtttcaaggaagaactgaagaacataaagtgctaaggaagaaaaaagctcagaatatatttgcatgtgcaggagatgcatatgccttttttttttccgtgtatgacttctactcggacatctatatgtgcgggttcgatctaatcgatatggtcagactctatccttctatccttgtatgactctatatgcaggagcctatatctattgtttctcctgtttccataaatacaaagttattctgtatcaatctaagaccaataaaatatggatctactataatctaacggtcaatattttttctttttcttcgattaatgtggtaatttataggctccacagtgaacgtggtatcttctttcaaagctgttttaataatataattgatagatagatagatacaaaatcctcctaaaagaaaaaggtgaaacaggtgagagataaatggaggtccggaaggctggaagggagagaaaaaggaagcggggctgactgagagtcaatgacagacgaaaaaaagctatgaaaatctttcgtatcttttaattagggttgtgtttagattgacccaaagtttggaatttggttgaaattggagacgatgtgactggaaagttgtgtgtgtatgaaaggtttgatgtgatagaaagttggaagtttggaaaaaaactttggaactaaacacaatttgcctcgagagagaaagatggcagtggcaatgatgcctcgagagcaactacaatttgccggagcgtgccaaggagttgcttgccgaactagaggccaagctcaccatggtgaaggctatctgaggcggcagacagccggctcatgaaggggcgggcctacaatgattcatgagtattcaaatgaatacccaagaattttaaacaaaaaatacatatatgaagtatatattccatatgtatatatgaaaaagaaaaaaagacctaccattcaaaagaagcccaagctaaaaacgattcatatccctcccatcatctcttcctcccactatttcacgcccattggcccaatagcaaaaaaaaaaaaaaaaaaaaaaagagcccaaacactttctaaccctgtctcctcaccacccatcccaactctccccgtctcctgactcccgatccagccaccaggacagccgagaccgacgcggcgacgcgccggcgccggcgccggtcgccctgtgcgctgcgccccatcgccagctacccgcctggcgcatcccccacgtcgccaccgccgcgtctccaccctccaggctccagccacggagccgctgcgcacggtgcatccggcatcccccgcgtctcgccctctccaagctccagccgccactcgccggcccgccgggacgccgccgcgtgccgcctggcaggctccaccgcaggtggcaggccgctggccgcattgccacaggcgctgtggctgtgcacagtgcgctgagcagctgaccgccccctgcctccctccactcaagtactccactcactaaggtaactcactaactcttcccttcaatcctcgcctagatggctagatggttaggaagtaggaacaatttggattaggaaaacaaccatacaggagattaggatttaattcatagttgaatctagcctgttggatattgttcatggttgaacattttttatttaaaatttgaatccacgaatgatttatggttgaatagagtatactgttgttttgtaggtttgaaacatgaaaaaaaggattggttacattcattaaaagggatttcttcttgcaagttcaggataaagataccatcaatcattttcaaaatatcaagaaatggaaagttcttctctaaattgtaagatttcttatcattttgccattttgtatactctataaatttgatatgttttcgcaattaatagtttagtattatactctaatatgcttaacacattcaatttatgatcaattttatccatccatctatgactttataaaatcatgtttataccgttatatattatacaattattagactctgggttgaacaattttttctatctcttctaatttcgaatacccaagttgaaaatcctgggcccgccgctcatcaccaacaccaaccttctccactggctgatgcgcctgcatgaggcggctcaggaagcgcaaggttgacggctcaaacatcacccgcaagcgcaaggccagcgacctcatactgtcatgatgtcatcccttagatctctcaagaatttggtcattcctgatgaaagcctgacaaggttggaacatgtcgtcaagacccttacacagctctgcgcaacctcagccactttcattgagctcatcaagatggatgattccaaaacaaaccagctgcacaaggcagcagaggccagctctcatctcccggtagatgtccctgtgtttggccgggatgaggtcaaggagttcatcctgaatgtgattattggatcaccgtagcatgatcatccagaatccagcattggaactggtaaagtaagagcagccaggcacaacattcttgttctcccaatagtcggtatgagtggcgtggggaagacaacacttgcccaggtcatctacaatcatgccagagtgaagcaacactttgagcatagagcttgggtctatgtttctgaggatttcaccatcaaaagaactttgcaagaaatcctgcattcgttccaaggacacggtggcgctattttcaatggcgatgaaagcatggaagctaccatcaccaagctccgtatcaagatcagtggaggatgtaaattctttttggtgctagacaacatgtgggaagagatgtgccaggaatggagcgtgctgctcacagcattatccgatgaggcacgtcagcatgggagtgtcctccttgtcacaactcagagctaaagggttgcacaatttgccgccacgatttatcccataaatttaaaagcattgccgtgggagagcttctggcctctctttcagtaccacacatttggtggtgtggaggttccccaacaagatgacaaccgaaacatgctattgatcgcccaagggattgcaaagaagctagatggattaccattagcagcaaaagtaataggaaacctgctgagatgtaggttctcctgggataattggagaagggttgccgagagtgattggtggaacttggaagaagctctccagggtattctgccatacctcagggtcagttatcagcatctgtcaccaaaacaaagacagtgcttagcctattgttcaatatttcccaggaattacctgtttgacaaggacagggtggtccagatgtggcttgcgcacgattttatccagtggaatgagattgctgacgttatgaggccagatgatgttgggaggcagttatttgatgagctcgtggaaaggtccttcttccaacccacatttgttagtaacaagtatgtcatgcctgatttggtccgtggtttagcaattcagtttctctacaccagtgcttcttccatggtgaaagatcaacaggagtatcgtccttagcaccaggaaatattcgccacctggccctgcaggttaatagcctggaacaatgccaggagctgcacaagtacagaaatctgcgtactctcctaatatttggccgttgtgagagtgatgcattttttaaccttcttgatgggatgttggagaagtcaccaagtatccgtgtgctagacttattgatacggggaaagcccgaccttctcgacgtaggatccggatacacccgtgaaacctcacgaactggatgaacaacacgctgcccgtgcaacgcacctttcaccacgaatt

SEQ ID NO: 10105 - DNA, 12225 bp, Oryza sativa
agtatcaccaagctgaccaacctacggcatctgtatgtagatggttcagcattgtccaagattcaaagtattggacagcaaactgaacttcaagagttggagagcttcattgcacgaaagggacaaggattcatgataagagagttaaagaacatgagggagttcacggggaggctgtgcatccgtggtatcgagaatatcagaagtaaggatgaagcgatggaagctagattgatggacaagaaacatgtgggtgccttggtgatcgaagggaaaagagtgcccaagtttgcacttgaaggactgcaaccacacacaaacatacaggaactcaccatcaaattcttccaggaacaagattttcctgattgggtgtgtccagataacttggttaatctcttacaggtaaatcttgaaagctaccacttcttgtctaccattccaccattgggccatctgcctttgctaaagctcctcaccctaagaaagcttccctcagtgaagcatgccaacggcacatcattcggtggtttcccatctcttgaggagttcgagcttcattcaatggagaaatgggaggagtggacagaaccagatgcagcagctcatgcttatgggttgtcgcttttccttggacacctcaggaagctccatcttgcatactgtccatcactgagacgtttcccgcatcttccatgctttatctgcattgaaagagctgaagatctccaagcctggaagctggatcctggcattaccagcatgttctcaagtcttgtcatccctaataaccttggcagtcgagtactgcaaccacaacgttgtaatgtccgcgcaacagttcaagtccctagaaaatattgagcttatcaaaagtgaagggctacgtttggctgatggattccaatactttagcaaactgagaagcgcatgggtggagggttgtcctcaactcctaagtgccatcaccacctctgtctcagtgggctttggtcaagattgttgtgcggcacatgatgagaagcagcagcaggaagctagccttttaacccacctcagagccaatgatagcttgatgtatggtgattacttcaggaccgtgggaaagctcccatcactgcgcaatctgacaatctgcaatgaatcgaatggcactaatttctcggtcaagcaagaactgtggtttcagcaacaaaactcgctagagcacctctgcattgaaggttttcatgcattgcaacgtctcccttcattcttggttaccatgctctccattaagatactagagcttcatggcttgcgtggcttgcagtccataccagacaatgctctgcccctgactctccaagagttcaatataaacaactgtacttcgtgtttgagtactcgggtatctaaagatggtgccgattggccatatgttgctcatgttccatacatccgagttaacggaaccacggtccaaaacttatagacttttgtactgtatatatgaactcctgaaaaatctccgatacaaaaatagaagagaatggcttttggtattcagtaatccagtcaatgaattcttttacctgagccatatgtttccttgagcaggttgagtatatcctcgtagaaatgatatgtatataagcatgcctatgtaactaaagaaggtatagacaaacaaacaaaagttggaacttgatttcgattttcatatatatgatccccttgccacatctgaaagggcatcaatgccatatatgtgtttctgttattgtgtgtgcgcctcccgtgtcagtgcattatttgatttttaattttcagtcaaagcagagatcggtaaacagttctcctcatcattaggcagattcttttggtaaaagccacctacaacttccaacactgaattcattgtgcgagcatggcatctgcgattcctaaattttcactcttccctcgttgtgctcgacagcaagctagcacttgcatttcttcaatggcatcctgacaaaataagacctggcattttccttcttaggttgtagacagggggctcaagcagacatcatactgtgactccccctaagcaggactgtatgtctgcctcctgttgagatgtagaaaatgtagggtgcttaagaacaaattcttgcaggtttacttccaaagcagaaggtattccgaagtgtgacaacctttcaaatggtttcatattttccgttatcaagcacaaattttcatgaagaataccagcacatttctcaagctgctcaacattgcgcattggatgtaaatcatcctactcatagatctggtaaagggaagctctccagctcttaaacttttctcctaaaaccattccaaaaccttaaagccagtaggtaagttcattggaaaattacattttgtttcagatgcagccagccacttaatgtgttactccttcccttccattcttcgacatggtctgctgctatatttccatccctggtgaccaacggttggtactaaagagcaactgtagttgtcgagcagcaattcccttgcgagccacaatgcatgcatactcagagtttcatctgttgacatcatgagaagcttcttcaactctgaacaaatagcaggttcactatccccggtgacagggtctttttctaccatcaaaccagccatcttttagaccttgaaacattcgttcctttcgaaagggtgcatgtaaactttggggtaaagtgccaacctcattgttcaacctgacttcatgccacttccttgagacaaaacggagagacgtgcagcctttcccctgctgaaattaaaaagaaagaaaagaaaccccaatgaggatcgaaaccatcccgtgttcttcataattcttctcctgctacttgtcatacttcctctgatatttgttgattatcttagccgaattcacttgaaaaccctttgcacggaccctatcggctgattggccagctgtatgtaccatattaacaggaaaaggattactatcgaccttcattggcctcttcgaatcatcaaacttgatttttcctccctcaatagccgtttggatctgctgcctgaagaccttgcagtcattagttgtatgagacccagaattatgccacttacaatacctcttcttacccaactcttcagccgatggaattgtatgtccggcaggaagttgaatctgtttttctcgaagtagcaaatcaaatatcttatcagccttggttatgtcaaagtcatacctctcctcttttcctgagttcttcacccattggcacggtataacctgtttgctcctaacccactcggctgcagctatttcggaatcatcatcctcctcatccgacccatacatataaggatagacatgattaatctccctagagttcttcctagcttccgcaaacctttgttcatgcaaagctaccttctgtgtaaggtgcgacaagctttcgaaattttcatatgagaatttttccctgatcggagcaatcatcccttgaaaagccaaatcggataactggcatcagtcaaactcaagctgtaacacttattcctcattttcctgaacctttgaatatactcaccaccggctcatcatgcttttgcttgattgacgtgagatcagacagtttcatctcattaatcccactatagaaataactatgaaactacttttctaaatcggcccaactattaatcgacccatgcggcagagaagaaaaccaagtaaaagccgacccagccaatgacaaccggaataacctaaccctcaaagcatctacaaccgatgcctcaccacactgagctaaaaatcggctaatgtgctcataagtcgatgtagtgtcttgtcctgaaaactttgagaaatctggtgctttgaaccggttaggtaaaggaactctttcaaaccattcaggataaggttgtcggtacaaatttccagtctcttttggtttaagcccaaattgctccctcattacatcagctatcacatcagcccatggtcgctgctgaggtgttccttgaggttgttgtggtgtgggctcaaactggttgtaaaactgaggttgaactgatcctgcctgttggtactgaacttgtggtgatggaggttgatattgataactcaaattgccccctggtaattgtgaaggttcggctgaataccacgcgccaaatgctcaggaataacttgaggtactactgaaccatctggttgcacatgatgaaccaggtgttccgggacaacctgatttgtagtgtactgcacaggctgaccaccaggcattgcaaatccagccgacgcgttcattgaggcttgctgctgaatcggctgaacgacctgctgtctcaacggtgtctgctgaatcggctgtaaagccggtcgtcttggtggcgtctgctgaactggttgcacgacctgctggattggggatgtttgttgaataggctgcacaacctgttgcctgggcggcgtttgctgattcggctgctgctgagccgaattaatagcattctgaggaggtagaaacatagatgcaaccgggtcttgtgttatctgagtcacattcggtccaggatgctgtgattgctctcttaccaatatttgaggattgactaattgacctgaggccgacgacggcactgcaggtgctggagccgatgctggtaccgtcggctgagctgatgatgtaacaggaggaactccctgagtaagtggatgaacatcggtaatcaaagtccgataatttggaaaagtacccccttgcaaataaactgggcctgcagcctgatgttcagctattgaaccatcggctaccgatttcatcatatttgacaaggtattagttaatactccagattgattgatcaaagcattatacacggcatagtcaacccgatcttgaaagttattgaaaaaatcttggaatgcattgtcattctgattaagatttcccctttgcggtccctgagtgccgtcaccttgaactccatgtacttcacgaaagtagtcaccctggttctcctgggtcgacccatctgtaacacctttgtcactcggctgggctgatccatctggaacttgtttcttttctccctctttaaaagagccgatcccaggatcatcaggaaccaccttcaccttgtacttctaaacaaatgtgcccttgcgagtctgcatgaatgaacttaaaaattgatctcgtgcttgttgcatcattgcatcgaagtctttcttctgttcgggagtgagcttctctggatcaatgggcacaacgtttccttcatggacgtcagtcaaaccgagcttctggatcgtttctttaacattactcgggctggccgacgacggcgacaatggtggtttctcagccatgagggaagctgccttctgacttctaatcagtcccaccaggcatgccaaaagcgtgttgacagaaaacacgaggcctgggagatctgcttaactccagtgcaggtccaaaactcgccttcggatgtatgagcgtgccagttgatttgatcatgcaatcaacaagaaacaaagacaaagaaaccgtgattaaatccataaatgatagccgatcggctaaatgccgatgacatatcatttatctttgagccgatgtcatatgtaaatcgatcggcatgtgttaagtaaacaaatcagaattaaatctactcgatcggctgtagatatcaataatatataatccttatatcgatatatacttgaatcaagtgattgggatagatcggtcaccttgccgagacagtataaatcacttagatcgaaatatatattaataatgagattatacatatattcatagcatagccgatcagatagatctagcatgtatcggctaatactccgataccacatcgtgttaagatattaaagcaaatagaatataccaaacataagcctaatatacttaaatgcaacaagatcttaacataaagggtagatctaacatgtcaatcgatcatataggataaaagcaattagatcagataagatcggctgaaactccgatactaccctaatcggcaaccagtaggcaggctagagattgaaattcaactgatacaacattaagtatgaaaagaagaacaatatctagacaatcaagctgctggatgtttcgtagagtggtggatatctcatataatctaagccaacgtcgttatttaacctaatcggttgccttctggtaacagatgttagccgattgtaggttagatgacgatattgtcaaggattatgcaagatataggataacttgacggattacatgaacaagattagagtatcataaagatggaagcactaatctcgagaacacaaaccgtcataacaagttttacctcatgttgaagatcgaaaccgatgcagctcaacccgaaagtaagaactcgtcgaaataaaactaaagcaaaaagggtggtgatgcgccgaaattgttttgaacgtgtgtgttctcaattacatagggctcggggactatttatacccaagaattataaaatatgtccatattggacacgactcttatccctaacaaactgtaagataccataagtctttgcggcagacttttgcccacatttatctctaagtaatttacataaaatatcctaattaatagatacaattgccttcccaggactctatccatgcgtggcaatcatcttgaagcacatcaattcgaacccgatgtcgtacacaagttgtattatcggaatcggctgtatcacttaacctaatctgactcagacttagccgatcccaatcatagtcgatccggactccagccgattcttactctgtttccgcaacaacccttatattcgattccgcttcgatcccatcttcatctccgatgctgatattaccaaatttggtcgttaacagccgcagacgccgccgccgcatctcttgggtgagagccatcgctgcctctctctctctctcgatctcgatctctctctctctccaaaccgccaccacctagctcgttgcccacgccactgccacgccacggtcaaccgccaccattgatgaccgacttcgacgcggccgccaccgccgacgacgctgtcgccactgccactccgccgtccccgcctcgagctcgccacgccgccgcccccacctcgagctcgccacgccgccgcgccacgccgccgcgacgccacgccgtcgggcccccacgccgccgccgcggcacgccgccgccacgcccgcatgccgtcgggccggcccacggcgccccgacgccgctgccgcactgccacgcccctgccgcccgcgcccaacattgccgaacgtgaacgaacgtgattgaaacgtgaccgaacgcgaacgaacgtgaacgaacgcgaacgaacgtgaccgatacgtggacgaccttgaacgaacgtgaacgaaacgttaacgaacacgaacgaacgtgcacgaaacgcgagtggacgtgaacgaaacgttaacgaacgcttaacgaacgtgaacgaaacgttgacgaacgcgaacgaacgtgaacgaaacgttaacgaacgcgaacgaacgtgcatgaaacgcgagtggatgtgaacgaaacgttaacgaacgcttacgaacgtgaatgcacttgtaataaaagtgtgagaacgaacgcgtttagactaatacattttactggtaatacatatatgattatatatgtaacttggcccgtttagactaatacattttcctggtaatgttgcagagaagacgtcgtcgtcgtccctaagccgaagtggtagctagccatcgaaggaattcgcgcaggcaagtgatgtaaagaagtgattgttagagatttaatataagattgttagacttagcatatatgattattacaattttaatataagatttgtagcgatttaatataagtttgttagacttagcatatttgattgttagagatttaatataagattggtagacttagcatatatatatatatatatgattattacaattttaatataagattagtagcgatttaatatgagattagtagagatttaatatatgattattacaattttaatatgagattagtagagatttaatgtaagattagtagcgatttaatataagattgttagacttagcatatatgattattacaattttaatataagattattagagatttaatataagattgttagagttttaatattacggttagcaaatacatcctatagacctaataaatattttttgtatgcacagatggctgatcgcgatgaggaacagatactatacgatacaatcgcagagggaagcagccagtactggaacgaagaagaggggaacgaggatccaaaccagtacttgaacgaggaggggaacgtggagagggatgcggaggggagcgaggaggggaacgatgaggaggctagtggaagtcatccctcctacggacagaagagggcacgcggacaacgaggtgccgcgaagaagatagagggtcggcacatcataactgaggtgaacgaagacggccgacctagtgccccggcagaagcagccaagaattttgtacgccacagcggttgggttgtgagggacaacgtgcctgtcagcacggtgtactggcgcagaacaagggcacgcggggataatgacagctttgtcccggactcagagaaagagatgctgtagaccacaatgctcgagacgttcacgctacccgcgggtacggagaacatagtgaaacagtggactctgaagaaaatggcagacagttccagagcttcaagggagatctctacaagaaatacatcctgaaggggcagacaccgaacttcgacacattcccaaagctaagggatcactgggacgagttcattgcatataagacaggtcaacaagggcaggcgatgatggagagaaacaaagaaaatgctgccaagaagaagtaccatcaccacttggggtcaggcggctatagcgtcgcaatgccaaagtgggaggagatggaggcaagtttgattgagaggggtatcaaaccagccaccgctaaatggccggatcgatcgaagttctggtactatgctcacggtggaacgcttaactcagttgatggctcccttgtcttcagcgatcagatacgcgaggctgccagtcgactaacggacgcagtggtagcctcttctcagggcacatttcgacccgacagagagaaggatgagctgtcactcgccctacagactccagagcatccaggacaaacacgagggaaaggcgtgattcccaggaagattggatttaaggaggacatccacacgtacaggagttggatgaggagcaagagagataccgaggcgaatattgcagatcttgagtacagggtatcgagctacgagctcagcatgcaagaggaggtggcaaggaaggtggatgaacgtatggccgcacatcggtcctaggatccccagccgtacattaatcctgcaatggtcagtccatcaggcaatcgtagcagctgcgcctcaacggggcaggtcggatcacagagcatggacgccatgcaaacccaggacgaaaccacctgcaccgttgatgagatcacatagtggacaccatgtgagctgcatattcccttcaagaacttatcaatcaaggtatgctcgtagtttgatgatttttgacttgtacattccgcaagttgctgcttaggttgattactaatagataacctcttatcacgtgaaggtggcgtcgggaatggccatcccaacggacccttccgggacttaccactgcaggccgattccagcaggatactctagggtcgaagttgagctggtggaagccgcgtacgaggacctcaagttggactacccaggaggagacggtgagacacatctacgagacacaagccacgccattatactatggcgcaagtggtacatcatcctccctgggcgacaagcggcgtctcgtgtaccatctcctccggctccgccgtctcctccgtctcctcctgcaccatctccttcggttcctccgccacgtcctcctgcaccatctcctccggctcctccgccacctcctcctgcaccatctcctccggctcctccgcctcctccacctccacctctaccgtgtccgcctgcacctcccaagacaaggtctcgccaagctccacctcctgcccgcacaagggcaacgaagaaggtgaaagttgacgccaccaaaaataaggagccgccgtacgattgcagtcaagaggagcttgacacttatgtggcaggagaagtgaaaaggcaactcaagcctcggagtcctaaaaagaagatacctattgacctgagcgtgaagaagttcttccagggaatgtccaccgcaaacaaggatgccttaaagctatcggactatgaccgaacacttaggaaagcctattacaagaagtccaaaccagttcctcagcttggagaacagccaaaccaagaggtcaagtcgttggtgaccggcgaagactttggcataacggattttatttcggacaccggtctaacggtggatcagttggttggagccgcaccaatcccgaaggcggaagtggcatacaagtttgaactcggtaaaccgcttgtcaggcctgagcagctgcagtccctaccgacacaaatgtacaaattccatgaacggtacatggaaatgagcgccaatggtagagaggtgttcggagcgaggattagaaactccaacttcttgcaaggagaaaatgttctatggatccatttcaaggatgtcttcgatctgtaccatctggacgccctcgacgtctctcttctgagcgcatggattttgtaagtatctttgagttcgatttgtttcgttcaataattagctcctggcatatatgaaaacaataataatttcctttcatcgttgtagaatggagattcaaagggcccgacggcggggggtttacgatactgggttcatcgaccctcggaaaatcaacaccgaaatgatcgacaattacgagaaagacacagaggacaatctcgtccatctcctaacgcagcagcatttcaagacgttcatactactgccgtacaacacagagtgagtttttattgtcgtttggacaaatttcattcccatccatataacatatacattctgatatttatcttatctcacgcatattccagattccactgggtcctgttatttttcgacttggacgcatgcagagtcactgtgtacgactcaatgaataaagaggagaaggtttttgaccaggtcttccaactgatagacaggtaatataatgccatctattccaaagtggcgggactctgttgctattatgttgatctcgagtaataattaattaatcatagcttgcaactgcacatgtagggcttgggatcggttccgtcaattggtccgcgagacttgaaaagaaaaacttggacggaggtttcattttccagtgagtacatgcatgatccaaaattatattgaattgaatctctaataccagttaatataaagagtatattaaatctctcattttttctcatgtagtgtgcaaagcaggaccagggaactaacttatgcggctactacgtatgcgagtatgcccactgcctatcaaaccaaatatacccacacgagaactcgatgtacgtatacataaaccattcaaaatttcattgcgtatcgatttgttagttgtttattaatttcatatattgatatgtcattatttttcgaatgatagcgtattcacatgagggaaaatctcccacacaaggattttatcacggctgttcaagaacaactgatggggttcatcaacgaagaagtccttaatcccgatggtgaattctactacgacggatcgacaattcataacgtcggtccttcctcttgtgacataacgccggcgtcgaagtcgtagctatagctagcgagcaaatgaattgtactatacatgcatgtatatatatttatatatgtacgtacatttactttagtgttaatatatattttggtaacatatatgcacataaaatgttaagtgctttaaattataaatatgtgtgtaatatatgtatttatacatatacacatatgcacatatatatatacacacacacacacacacacatatatatatatatatatatatatatatatatatatacatatatata

SEQ ID NO: 10106 - DNA, 17553 bp, Oryza sativa
aaaaagcggctaattccgactctgtgtggaggcacttcttgccgaaggactacctctccatcctggctcgtgccgacgatcgtgtgcatttcacttccgagaagaagctcctcgtcagccttgtcaaagaccacgtcctcctcgaccaacacagcaaggtacgtaatagggaaaatatttctatcccttaaaaggacattctttgttttttccgttttacctaaatagctatcaaattttctttaaaaaaattatatgataggtcaatataaaatatgtcattacacggacatgtaatttcaaatttaatatatataagtacaaacaaaaataacaaatttgattgtgaataatgtgtattattcgtagtggaatttattatttccctttctatctataaatgttaaatttgaattgcatgttttttttataacttttatggtgatatgcacaaaagaggatatcccttaagttctagttcgattaattcctcccgcaaaaggattaaggagaatttggagaataattccacgcctattgaggtatgggattaatcctctgtaatccctctctcttgagattaaccgaacaaagtctaaaggatgaaaacccgcttcccacgtactcccttcgtcccgaaaaaaacaaatctaggcctgaatatgacatattatagtacaatgaatctggacagaggtatgtcaagattcgtaatattacgatgtgtcacatctagtactagattggttttctatgagacggagggagcaataacataaagctttagtatgaatttcttcaatatagtattaccaacttttgttatcgtaatgttaactgaatgaaggcgattcattatacattgcacgcagagtctttggttggaaagaacaagcctagccaagtgctacttgctatcatcgagatcattaccgatagcatgggaagaccatcccctgaaatggagatggatctccttacccgattccaggtacgcgttccaacctactgtagcaatgtacaagataaatttaacgttagctcatttgtttgtttcccttttgcaaagataggtatatatatatatatataggtaacatatctcatgcacacaaaccttcacgtgtacatatcatgcacaccaactaacaaatattactaaaaattctataaaaaaattgtacatattgaaatactttcaatagtattatacatacatgtaaagcatcatcttcaaattcattttacatatagagaaaaaaagacaataatgatataaactcgtagttttaaaactgtcagagtttttgttttctaggctaaagtatatggacatttttttctagatttttagtgacgtttgttagttggtatgcacggagtgtgcacatgaaacttgtgtgcatgtgcatgggatatattccctcatatgcaatgcacatcttttagaaatgtttgtcaaagaagtacgtagtctggacgaatatacaaaagcattaagaaataaactacaaagaaattatccatcagataatctttaaattcaatataataataactagtattcggtttgatttgattttctttttatcaatttaagcagaaaccaaagttttctccctgtttcaggtttgaagaagtaactgagcttctaaaggtctgctggctcgatttatgtggcagagtcaactgcagagagctctcacccaacacagaatatgcagcctacctcgtcttcaaattgacagatgattcgtacggccttgattgccagacacaagaggcagacatcaccatggacgatcaagtagtgtctgccaagcggaccatctctttctacccacgcccacgcccacgcccacgcccatccacacgagagacactttctaacatgggtagaatcgaagaagcaggacaagcagaggagccaagctacccaagagaacgaggtgatggctggctggaggtacaactagggcacttctacaacgacctagaagacactggagtggttgttatccgcctcaaggagcatatccagctcaactggaagaaaggacttatcttggagggtatggaaattagacacaacatataagtctttgaggaagatacagaaaaatggagcaagtatgttagaagacaaaattaaataatgcagcattgaatatgcacaaagagcagtcatgattcaaccagtgttcaaaaatcctggctgtaagcaattggttaccgctccaaagccgatgaaccaacattggcatactgaacagaacaatttaaattcaactttggaagtatgccaacttcttatctttcatggttatttgttgttatatttctaaaggaaaatgaaatattcgcattcagttctataattatatcaattgccacacttgtggtggaactattgatatgttgtatgtatacttctgtgatgcatgtctttatggactattgcatcataatcattatgttctatttgtgatgaattcaataatgctatatatgttggatcttgaatttttttcccttttcttatgccaaatttctggcaggttactgtgatttcgaaattcaaaatttcggaccgacattttgtctgataaaaaccagttatctgttttcaggggtaccaatatttaaaagagagttttttttcactaagttttcacttaatcccttctatatccctgacttatgtttcgtcccttgtgtgcctttaagtgttcatttcattaccctatgtttatgggtatgtctcggtaattgcacttcatttactgaaattatcatatcagtgaaaacatgtctataattggttaaagcaagtatgcattttgtatatctacaaggtataaaatcctttcctaccagttccatcagaagaaccatgatgaatgtccacaaccacaagcatccattgaccaaaaggtgacactagatttcacagatgcaacattgccaggatgacgctgaccacccctcaaagtaaaaaaatcaacccaatgtaacagcagattatgccaccaggtattattattacatgaaaagaacatgcagacatcttaagttggcagtagtacttgcagccaactgcaatcatcttttcactatttggcctccattcaacagctttaacatcgttttgtcggtcacttgttagaatgtaggattctttaatatttgtttgaaggattctttaatattctttaataatttttctgtttgcaaatgaagacatattattcgtaagagtggcaaataattgagtcactaagatatgataaagaaccaactcacatcgcacgaagggaagagcatttgtttgaaggactcagctatggtggaagctaaacttgttctggggacaatctcagaaggctcagcagcttcagtgatagcaggaggctcgtgggtggcaacaagagcatccgactggaaaggaatcgggctgaagaccatttccctggaaaccccaaattgaagtttcaattagaggcctaataataaaattagtcttgtgaatgaaaaaagaaagacgaaattatgcgaggcggaggaggaagggggaagatgggagtgtactgacgaggacatccccgtaggcatccttggctccatcgtcggacaccgcatccgccgcaactgcaacaaacagacttggaatgagcttggagacagcagagagagggggagcagggagtggagatagcacacctaggtcgcggttgatctcgcagatggtgacggcgccgggcggagggaagctgggcatcgtcgttgtcttgcgtcggcgagcggcggccggtgctccgcgtcgcaggacggcgggttaaacccttgactcccccagagacctgagtgcccgcaggctacagcccaaggcgacttgggccggaagcccacaagcatactgggccgatattgtatgtgatggaattggagttctgggccaaaaataggaaaaagtccacctcgattcccttaattgttcaccgaatctaattcgtgacccttaactagaaaaccgggtaagacgactcccccaattagtaaaaccggtacaaattgactcctaaggcagtattgtgggcggtatccgatgacgtggcaccttgaccgttgtcaacactactgactcaactgagtatggtgagaaatagatagctgacagtgggccatcgtgagctgagtcagattaggaccgacatgtgggctctttttttcattgaccgatggggcgactgcttgggcggcgctggggggcgcgtgcgcgtcggtagcagtggactgcggccgtccctccttctcttctcatcaagatccagtgatagcggcggcggtggagaagaccagcgcgaaggccgggtggagtggtggcggcgacggtggcgcccccctctccctctccttcctgggggccggcgttgcatgcgagaggaagagaggggtcgggcgtggcgatggcggcgacgggcgggggtgtgcgcgctggagcggaggtggtggtgtgaggggccggaacggtggcggagaggcgcggcaccatcgtcacgatccggtgatggcggcgacggtggagaaggccagcgtggaggccaggcggattagtggcaacgtgtcacgcccagaaattcccgaatagaattctaagcagaatgtgcattaaaatccctgtccaggaccggccggggtacataaacaacaatgttgacattcagatccacgtcttacaaacatcataaaagtcttacataaatgcagcggaaaaacgaaagacaacaggagctaagccttgactagaactgcagcgggaacaccactccacaggcatcctcgacggcacggacaaagcctactcctcggagaaacctccatctgacacatactcgtactctggggttgggaaaaatagagcaagactgagtactacccactgtactcagcaagtcataccggaataggggtatgatgcagggaattatcaaaggagagctagagtggttcatttgcataaagcgagcatttataaacagaagtttaaagaagaaaacagtcgtaataattaatcaatattaatcatccactgtccaacgctataccatggtgcgacaggcccaaccatccacctatactatccaatttcaatagactaaactagggtgagactaatcacggtgaatctggttgaccacccataaccgtgggcatggctattcgaatagttttactctgatcagaggtgtacaactgtacccacaagacacagccccacgacacgtttccgtgcgccgacatgccaccacgacataccgaaaagaggccgtgacaggacccttcgcataaccccctctaaccaagcacaccacacctcaggtttcacccccactcctcgcaaggcagcgggcagtcccctctcgtgcctaggtgaatccggaagcgacagaggccgtcgcagggcccgccccgctccatcacgcccacccttgcctggatgcgtcagctagaggaaagctacactacaagcccagccgttgcccacgctggcttgtggtaagtacgataagttcttccagggcatcccgcgaaccggtccttaactgccatgggtgcgaccagcaaaaccatgcacccacagcccaccatgtgatttattttaattaaccaacaccaaagcggtggcactaatccaacaataccattagaaccaacagtctaaacattaataggattttccccattgtgtactagttgaactaagcatggctaagcaactcctagtccaacgtctattcatgttataacccaagctaacaaaggagcaaggtaccaaaatagcatagctgtaacaataggtaaacatcccataataacattataaaacgatgcagtatttgaagaaaaaaagtagagcatttgcaatataggatcaacatgttcaagtgacaagcatgacttgccttgctctgctgctggaggaacctcggcgactatttcgaagtacaccggagcgtcggaagaaccggaatctaagcgacatacaaagcaaacaatgcaaacaggctataatactactgaaacagagaacaaaaccatttttaatggattctacacatttttcttgatttactgagacttgaatgggcttaaacggagctcggatgaattagttatgaattttagaagattcactgtgtttattactataacaaaaagtccttaaataatttattgcgcaataatttctagggctgacgtcatcaagggggggtggcgccgacgggcggggcccactggtcagcggctcaaaggggggagaggggcgccggcaagtggggcccccgggtcagcggcccaaggctgtcggtccaccgtggaccgggaccacgcgggtgatccaccgccggtccacgggactgacggcccagatcggccccgagccgatcgggcggtggcgatagaggtggccgccgggctcggctcggcatcaaagccggccggacggccaaggctagcggcgacgacacgcggccgacggcgacggcgaccggcggcacgggaggcggcggcggcggccgaaggcgacggcgcatgacttgaagcggcggcgcggcactaggagggagagggaggggagtaaaggggagaggacgcctcaccgagggtggtcggtgcggaggaagacgacggcgaacggcgacggcgagccacgggaggacgacggcaactggcggacgggcttcggggtgccctaaggaaggaggagagagagattagagagagggagatgaaccacggcggccggcatccatggccgaaggcggcggtagaggtagaactcaccggagcgcgaggggatgcgaattccggcgacgaatcccgacggggaaggggcggaccccttctagaagtaatctagaagtaagtaataatactactatactccctccattagaaaaaaaaaactcaatccgaccccttctaggatcatgaatttggataaaggtagtccagatttattgtattaggaaagatcaaatcttcttctaggttgatttttcttttttacgaaaggagtatagcactagtgattacattagtttaatcgtcaaattaaacatatggtgatggatttagtatgatgtgtgcgcagattgcagcggcatatggagtgaatgggccatatcacggtgcatcggcgtggcttcctatatggaaagttggggtgggaccctctaaattctccaagagctacctcgccatcgccagtccaacagtcagggaatttacgccaatcccaagcaaagatccacccaacattgacaaccaaattgctctcgaaatcgccgtacatgccagttaccatttctatatatttatttttgtactccctccgtccgaaaaaaaacccaatccgtatgtccagattcaaacccaggattgggttttttttgggacggagggagtatgtgtatgttaccggccagttatcacttttatatgtatgtataccatatgtgtcacgtatataccaacgtatgttacattaatttgtatgcaggtttaccctcaatttgttggtgacgatcttcctcggctctacatatactccactgtaaagtgtctctcctacttcctccgttccacaatataagtcattctagcattttccacattcatattgatgttaatgaatctagattatattgatgttgatgaatctagattcattaacatcaatatgaatgtgggaaatgttagaataacttacattgtgaaacagagggagtaccttgtaacgaattgcatacatactgttttcattagaagtacaaaaattatttggtcacttttatttaatttgaatatatttcacagaaaattgaatgtttgaattaaataccaaaaataaatattcagttgtttcttgacatgtaggcccctatgaatctcctaattcttagtacgataattattattattattattattattattattattattattattattattattattattattattattattattattactactactactactactactactactttcctgtgatgtattaatagaaggatcacataattcttttattcaatattgcacatgatggataatcaactttcaggatcagtaggagtcctctactcctcttacctgcatatatagtggtaagatagttagatagagcactagctagatttaaaacagctagctaattttcttaaaactcatttttttttctttaagaagatgacacaaattaattaggtgcatgctagttaaagttggtgatgtcagctggtatgtacagcacagtctacagtgctctatagctactcactggtgtaattgatgcatgggatatactatatatgcagaacgatggtggcgtgaaattaaagtgcttcaaccttgagtgttctttcgtccagaccagcaaaaagcacgccattggtgctaaatacgacaagttttccacggttggtggaaccacctacttcacccacgccgtaatatatacagggtgcgtacgtcctctgtcctaaaacatactttctttctttaatgtatgacatcattgactttttttatcgtttaattatttattttatttaaaaattatgtaattatcatttattttattataacctgatttatcattaaatgctctttaagcatgacataaatatttttatatttgtacaaaaatttggaataagacaaatggttaaacgttgtttaaaaattcaacagcgtcatacattaaaatacatagggagtatataatattatcttgttgcattgtgtataaacatcactcagctgctagctagttagaaatactttttttaagtatctagaaatatacttatatattaaggatgaagaagagaatggtacgcggcacgtatatatttattgcaatgattatgggatacatatatgtaataaaaggagattgattaattatatactagtaattaatatatccatgctaacgctacgacgatatttgacaatataccttaatgcattttgaataaaattttctttataagaaaattatttgtcatattataatgtcctaaataattatatactttgatgcttatctccatatgaaacacatgtgatattatcttgttaaactgtaagtctatatatataatcccaaaaatcacaatttagaaatcacatctcaattttcaaccagcaaacataacaataaattacatgctccacacattttattcaataaaatcaaccatagaaatcacaaatgactaacacttgtgtaggaagacatagagctagcatgagtaatctatgctatatattgggaaagggatagctaggaggcttctcaatccgtatcgcaggaccattaattttgttttatcaacagaacttgttttagtattcagaaattaaattgattaattatatatgagtggattatgcaggatgatgggccggcggtgtggtgggtgtcgctgatggatgagccgatcggctacttccacgagagcgcgttcgcggcggcccttcatcgagagcttccacaacgagatgggagggcatgtgctggacaggaggccgggagggcggcacacgctcaccccgatgggcagcggcatgtacccctccgatggcctccagaacgcagcctgcatccatgcctacctcgccatcgcctacaccggcgccgaccaggtcgacgaccccgtcaacaccatcgtcacccaccccaagtgctacgacgtcaaggacgatggccccgacctctaccgccccggcatcaatgtcgccttcggtggccctggtggatacgactgtgatcacaattagtaataattaattaactacctcatctctctttcattatgtaacatgaatgaataattcatgaatgtggggtagtgtttgaaaaactaatgaaaaatcaagtgttgttttgggaagatgttcattacacagcgacaaaagaagtaaaaaatatacattatttttagagtttttgcagttatatatatgtttatgaaagaattatgaaaatatacacataccgtggtacgaggacgtgtgactaattgtttggcgcagtaggggacaaacggctaggtcaatcttcccaatcggctaccacgtgccacggcgcgggattgtcccaaccatcggtccggcaccttcgcgccacgccaaataattggtcgtacgttcacacgtaacggtacgtgtatatatttttctatttttttcaagagtatgtatataactgaaaaagccaaaaacaatgtataattttaatttcttttctctgacgtacaccaagtaatggtccatagctagcaatagctatgtattgtgcatacatatagacaagtattttttttaaaaaaattaaataactatagtggtatgtgagaaatgaggaatatttcctcgaatgaaacagttttcaacgtttcttatccatcgagagacaaggaagaagtgttgaacccgtggcgtcggctccccgctcccccaactcgcgcggttgctggttgctgccgccatcgcttcctcccattctcttctccacgacggggttaccgagctccggcgaacccgccatggcggactggccgacggcagagccgaggcgaatcagcggcagacaggagaacctccccaatacgctctccttttccagtttccccaactctagctagaagccaatcagaagcgccagccaggggaaagcggggagtcgtcgatccctctcgtcgccgttgctctcgtcggcatcacctgacattattgtgcatgagcattcgacgacctaacacccggtatagtttgcttcctccacctcgagcacaagctgttcgatgaaatgcctaccaaggttaaggttctgtcaccttttttttttgaattcattgaatatagaagggaacaatatttacaagtaaggagtaatgggatttacagaaaagacgatcggaactacggcaacatctctgctagtcgtttggctcccgccaaagcccaagatttcgactcctggttctgtcactttcttgttccaaaactgatgagcatcctgcgttcctttgctattttgcacaaccttgtggaacaataataaaagaaaataattagtcttccatatttggttgtagttctatagatgacaagttaaagttagttcatctttttggtatattacacataagaatccttcgaattcgtttgttgcagattgataagtcgacattgattcacatatccatttttgcatgctgatggtgttttctgtgctctaagtaaggtccggatctgaatataaaactgaatggcatctgtagtgtttggtcaaaggaatgtgtgtgtctttcccctgaggaggcacatattggatgaggtgtttcagcatggtccttgtaattgtagcacacagaggaggtggaaaaagccaattgattcagcaagaactcgtctggagggcagaataagggatcataaactggacaagctgatgattcaactgaagaacctgaggctagctttggatttgcatgagttcatatctcagcagaggaatggctacgcatctctccaactcctctccaggtggagacatgaagtcgggctaaacattgagattggggctttccttaagaaatatccccacatcttcgacatttatgtgcacccaataaagaataaccaatgctgtaaggtcactccaaagatggctgatttgattgcagaagaagatgctgccatctgggaaaatgagcctgctattgttaaacggctgaagaaactcctcatgctgtcgacagatggaactctgaatatgcatgcactgtggctcataagaagagaacttgggttgcccaatgactaaaggtgctctatactaccaaaccatcggtcagagttttctctaggttcccccgatactctgacatttgtcactagggatgaaaatttagctgtagccgatgttgaagaatggagagtgaaggaatatacagaaaaatggttagctgaatctgagacaaaatattcttttcctataaactttccaaccggctttaagattgagaaaggttttagggaaaagcttggtaactggcagaggcttccctacaccaaggcttatgagaataatgaattgcatccaatccataatgttgagcagctcgagaaacatattgttggcattcttcacgaacttttaagcttgacagtggaaaagatgataccacttgagaggttctcccatttcagaagaccttttgatatggaggtaaacctgagggaacttattcttaagcaccctggcattttctacatctcaaccaaaggaagcacacaaactgtcctccttagagagagttacagtaagggatgcttggttgatcctaaccctgtctacaatgtaagaaggaaaatgctagatcttattttgtcaggatgccatgggattgatgaaacggatggtccaattcagttagttgaggagcacaatcaagaaagcagtaatgtgtcatagaatcacatgtggcagacagattccggatgccttgtcggaagctcaaagtgacatttatcaaagaattagctattttaatctctgacattgtttatgggcttatgggagtacaatgttgataatggtatgaacttgagacgtcggtggtggagcatcatcggttgaggaatgtactgatgtgcaagctaagaaagtcagctgtcctgagggcctactctgcacccagggaagaatggatgcatcacggtgcttagcagctaacaaaggaagatgcgcttgagcagaatcagttgtcaaccttggttcctgttcgacagatctactattatttttacggtactccactgatttattttcactgaagagataggtccaatgaagatttaagggcagtcattgatgctttgaactggtctatcataaatgttgaaacagaactcacgagtgttcaactagtgtattgctctcgatcccccttcagagggtaacatttacatatttatactagattacatgcaaaggaaattacaaccctacccctatctctgtagctaccctgaggtggctgacaagtgggcctgccaacggtctgggagtccattcgccggacagggagacaacggcgcccattaaggggggcggtatggcgccatcatgatgctagcctttacccgggtaatagcgggcttcgggtaaagactagcatcggccttcacatcgccagtcgtgccatgacgtcggtggtggttggaggatgagtaatgcgcttttatggcgccccatactcgttcctggtgtcttccctaggctctggcctcggagccatgtcaagagctctggagcccttgagctggctcatgggcctctggggcccccgaaccggcgccggggcctccggtggcccatggctgggctccgggatcctccgggccttccggttagcttcaaacttcccggagccaactgccctcttcgggctcggccggcttcctaggccatcggaatgggtcctccctacggagacgggctccgcagggtgctggcggcgggcctccgggcggaggccctatctcctccggagccaccagggagtgaatggcgcaagatcgcaatccttcccccaacaataaaaacacttatcatttcttaagtggaatttttttaagaacaggagctgtgcatagtgcaagacctgtcaagctaactggaatatagaagagacgacagcagccaacagaggtcagaagctattgcacccaattatcatcatcctcaaatcaattgaaaacttgctgaatgaaaggtgctgttgataaggagtgcaacaatttcttccatacataaatctctatttagctgtgttgtctataaatttgttgaccaatgaataatattttagtaatagttataatgcagttgtttggaatatgatactatgattcttcagaagtgaatcacttttctagcatccatatttctacatgcatccttaccaagagtcacctggactttggacttactttccataacttgcatcacactaagttacagtgtttgttccaagctataatataatcgtagtattgtttgtccccgtatggacggacctggacctggacctgaagcatccacagaagcatagcccaagatgagagatgattgggatagttctctggacagtgatgtggcatcagaagttcagaactctcaagttcatgtccctgttcaacagcgacttccctgactttgatccatctatttccttgaccattccagcaagtcaaatgaagagataagagtcatcctgaagaaacgtcattcggctgtaactatatgcatgagggacctaccgattgatcaattgtttcaagcactgccgaatgtttcttgggcaaatactacggacacttgttttggcaatatattcaaggcaaatgtcatttctcatagaaaagtccaattagaagtgctcctctgcagcataacaatttttaaaaattcaaaatcggcagataagtattccaaaatgtcacaccagttgcactgtgaaattatgactaaagaccagttctttatcatgcaacaaactagtagtcaggctatgctcatccaaactctaaagctcagaccatctctccaagactgcaacaatggatgctccatttcttactacttcccttgctgttctggccatcctctttttgcttgctctaccatggagtgctgcaactcatgatattctaccactgaaatcctctctatttgttgaagagtatgaaaccaacatcctgcagtcatctgatggcacattctcatgtggcttctacaacatcactaaagcctacaacatcactagcgccttcaccttctcaatttggtactccaattcagctgacaaggccatcgtatggagcgcaaaccgtggccgtcccgtgcactcaaggagatcagagatcactctgcgcaaggatggaaacatagtcctcactgactatgacggcacagtcgtgtggcaaactgacggtaaattccctaatgttcgatatgttcaattattgaacactggtaaccttgtcttgaaaaactccagtgaaaacattgtttggcaaagtttcgattcaccgacagacactttgcttcctactcaacgcattctcgctacaacaaagttagtctctaccactgggttacaggttcctggtcactattccttccgtttcagcgatcagtagatattgtcacttatatatgatgacgctaatgtttccggtgtatactggccagatcctgattacctgtactatgagaataataggaacctttataacagtacaaggataggtagtcttgatgattatggagaatttttttcgagtgatcttgctaagcatcaagcccgtgttgcctctgatagaagtttggggattaaaaggaggcttaccttggattatgatggtaatcttagactctatagcttgaataactcagatggaacatggacaatttcatggattgctcaacctcaaacatgcatgactcatggtttgtgtggtccatatggaatctgccactattcacctacaccaagatgttcatgcccacctggttataagatgaggaatccgggtaactggacacaaggttgcaagcctattgtcgaaattgcatgcgatggtaaacagaatgtaacatttttgcaacttcgaaacactgatttttggggttctgatcaacaacatattgaaaaggtaccctgggaggtgtgttggaacacttgcataagtgattgcacatgtaaggaatttcagtaccaagaaggaaatggtacatgctatccaaaatcttttctctttaatggaaggactttcccgacaccttttgtgcgaacgatgtatatcaaacttccttcaagtttggatgtttctaaaaaacccattccacagtctagtatacatgattatacaccaagtagacttgactgtgatcgtgtaaacacaataaccacagaggcagttcgtaacatgaataagattggtggggaggaaccaaaatggttctacttctatgggtttatcggtgtgtttttcattgttgaggttttcttcttcgcatttgcatggttccttgtcttgaggaaggagatgtggtcatctgaagtatgggcagctgaggaaggctacagggtgatgactagtcattttcgaatgtatagttatagagagctggttaaggcaactgaaaggtttaaacatgagcttggatggggaggttcaggagtcgtctataagggaatattggatgacgatcgagcagtggtcataaaaaagttggaaaatgtcacgcgaaatagggaggagtttcaggatgagttgcatgttatttcaagaatcaaccatatgaacctagtaagaatttattgtttttgctcagaaagattccataggttgctggtcttagagtatgttgagaatggatcattggctaatgtactgttcaacagtaaaatcttgttagattggaagcaaaggtttaatattgctttaggcgttgcaaagggactggcttatttcaccatgagtgcctagagtgggtcattcactgcaacctaaagccagagaacattttgtggatgagaacttagaacctaagatcgctgactttgggttggcacagctgcttagtagatctggctctaagcagaatgtttcacgagcacgagggaccataggttacattgctccagaatggatatctggtttaccaataacagcaaaggttgatgtatatagttatggagtcgttcttcttgagctagtgtcaggaaaacgagtctttgatctgatcataggagaggataagacgaaggtgcatgagatgctcaagaagtttattaagatgatttgttatagattggacaatgagaaatcattgtggttagcagagttcgtagatttcagagtgggtgatgaattcaactacttgcaagcaaaaactttggtaaagttggctgtgtcctgcttggaagaagataggaagaaaaggccaacaatggaatcaatagtcgagagcctcctttcagttgatttagctagaagttaataaaataataatgtaccaagggagaatatttataatatggagtcccttagtggtatgttattgctaggactatactaattctagaagtcttcatttcctaggatcaccgtaatgtatataaagttctatataattgtgtgtcttacttatatcttgtaaatttttcatgttatttagtaatggtctaatggaatggtggtggtatatttttctagttttttttatattggcaaagtaatgcacattttgaggttgcagttttctgaattgacctttgatcaaatttctgctcagtaaatttagttggatcatgttagtctattttccttgatatgcatatcccataacattatctattttaatcacatatacaattt

SEQ ID NO: 10107 - DNA, 34610 bp, Oryza sativa
aactattcttcatcatgtaaagttgtaaacagtaaggtgtatgctgaatttatatgtccatacctaatctattttgttgttctatacttgtatgctctattttgttgttaataaattttattttttaaaaaaatcagtgcctagaaagcaaaaacgacttaaacatcaaaataacagctcaacgacgaccattctacctgatcctgctcctcaaggctgcacagcaaataaaataaaggtcagttccttattaattacttcatttgattgtgcaaatgcagagtagaaccatcatctgctagctgtatatgtccccaccatgattgctaggtttttatctggtcttgttgttttcattgatctgtcctagataaatcactttccaaaaggacttttagttgagctcgatcaggggtaaggtaaagtctaccttggaatgcctatcttcatactgttgtatacaacccatgcttcttagaattgcaatgtgctggagaaaaatctgacacgttgaaccttcagtaacacaagcaatggtgtgaaaaatctgaggaaatataatggtcttttttcaacaataacctttcctactaactataagattgagagttttccttgaccagttcattctcgtagcaaagtacaactgcaagtactcttcatcagggcaactttaaagaagtcagaaactgcagagtactcagctgtcacacaatttgaatgtaaattttagactaagaccaataatctatcagattttcatgcacgattcactggagaacctgaaataaagcagtactagtctatattcatctgaaagaagagggaatgagttgcatcagcaacaataagtctcaagaaaggaagcaatggcgtctgattttccaatccaattaagatgagagaaccacaattaatcctaaaggaagaaaaagagcggatacaacatgcttactagtgccaggaaaaaaaaaacaggaatgctgaactgaagttgatcggcgattttaatgagatcggtgcagaataaaacaaacttttgttcatcaaaatttttgctgtattacataactgtattatagatgcacttggcatcttcctgctttctccactgtttgcaatagatgaggaatgaatgcaagaaatgcaacaatctctgtatccagtgattctggattgttgtatacaaatgtgtgtatgcaagaaagctgtgttctagatcaatgtgtctgtggattaagtaagtaattgattgtatttgtttttgcacaaaaaatgagtatcagtggcggttctctgccctaacagggactgatgatccccacacggaattgtctgatggtgcttgagggccattagtgccagttccaaaaccgtcaaaaccgagagttatagcccttctgaaccggcactgatgagaggtctggggtgtttatcaagttgtctatgagaacctgcagtttcttacaatcttccaactaacaaagtttggtacccagtcatattatcttatatacaaagggtggaacagatgaggagtgaacctcgtattaagtttcacatacttatttcggaaccctcaggattaggtaaaggcatgagcttcatcttcagcagaaatgagcatttgcactatgtacttcatgcttggcctcctgtttctatcttcttccaggcatgaaatggccaattttataactagctgagcctgcaaatgattaaattcaccaccaaattgatcatcaattaagtccataatccatgattcattcttgctgtccagtttgtcaacaaccatcttaaccacgcttctcacatcagtttctactccatctttcccatccactacccattctgtaatcctcctccctttcaccagctcaagaagaacaactccataactatacacatcaaccttctcggtgatgggaaggctagaaacccactcgggagccatatatcctctcgtcccccgaatccgtgacatttcagaaccagacccatctctgttcaacaacttggacaagccaaagtcagtgattttaggctccatatcttcatccaacaatatgttctcgggcttcatgtcacaatggatgatccactctaggcattcattgtgaagatatgccaaccccttggccacacctagagcaatgttgaacctttgcttccatccaagaaacttgctggaatctctcctatcaaatagtactttggccaatgatccattctcaatgtactcatagactaaaatcctatgtgttccttccgagcaaaatccccacattctcacaagattcatatgataaatcctaccaatcacactcaactcggcttggaaaacatcctcactctggctcacatcttgtagcaccttgacggccactaccctctcatcgtctaaactccccttgtatactatacctgatccaccatgaccgatcttgttgttgaactttttagttcccctctccaactccgagtacctatatgcgcgaaaatggctagtaacaatcctgtacccttcttctagtaccgaaacctggcttggcctgaaaactcccttgttggaaaagatccagcaacccatcgcgatcagaaacacctcaatgacaaaaattgcagacaggaatccatagaagtagaaccatattgacttgccctgattattgctcgagctcgacgacatatcggaaacatcgagcaagaactctgatgagcttgagccactacatccagcaatgtcttcctcaatggcaaggccattcgtctgccattggtggacgtgcaactctggcatgtcgagatcagctgggaccttgagataggccgtcccaagatgggcagggtgtgttctgccattgaacatgaggcccttggtgtagcactctcctgtgccctgcttgtactcgaacaccacgcacgacggctcgctcatgcaccgcgccgtgcactcgtgcagcgacaggtgcgcgctgctgttgatgtcgaagccccagaagtcggtgtgcggcagcgccaccagcttcatcgcccgcggccggccgccgccgccgtcggtgtggttgaacgtcggctggcagcctcttgtccagtcgctcgcgtcggcgcgcgcgtaccccggcacgcagacgcacactggcgccggcgagtagaggcacacggcgttggcgccgcacacgccgtggatgacgcacgggttgacgaacgccatccacgacaccgaccatgtcccggccatctcatccaggctgtacagcctgaggttgccgtccgtgtccagcgtcagcctcctcctgacgccggcgccctcgccgaggtcggcggcgtcgaaggtcgcattgtcgctggacaagaaatggccggaggcgtcgaagaaagcttcccgggtgaagttgtagtagatgttgcggttgttctgccagtagctgtagtaggggttaggccagtagatgctgctgggcatcttgtggttgtcgtacaccagcgagagcatggcgtagtcgctgaagcggaggctgtagaagccggcggcgaggagcttgcctgccgagaccatcgcctcgccggcggcgacgatgcgctgggtgggaagcagggtgtcggtggggtgatcgaagctctgccataggatgttcccgctcgcgtcctcgatggcgaggttgccggagtcgtgcagccgcgcgcgagcggcggtggcgttggcgacggttgagttccataccacctcgccgtcgtagtcggtgaggacgagcgcgccgcggcggccgtcgagcgcaacgcgggagcgcgcgccgtggacgggggcgcggccgcggttggctgaccagacgacggtgcggcccgcggcgcgcgcgaaccagacggagaaggtgaagacggtgggcgagacgccgtagaggccggcggcgaaggtgccgtccggggagagcaggacgtcggtggcgtggtcctcgacggcgatggaggcgccccgggggaggctgtcgcggcgcgcctcgcacgggaatggacgcgacgacgagaggaagacgacgacgacgagaagcagcagcacggtggcggtggcgcggctacaacttttgcccatggccgtggcggtgaatgggttgatcagaagcgatgatttgcttctgctcactgttgaggtgttgagttaattaaattaaacaaattaagtagtgtaatacagtatgttattacagttatctgagagtgatgttgcatcgttaactctttatcaacagcgactgcatctttgtatttgtttgagagcattccagcaagccgagtgaagagataaagtcatgctgaagaatcgtcatgagtcatgacgatgttttattcatggataaggacataccgattggccaatcgtttcgagcaaagccgaatgttttctttgctagatgctccctacgtttcatattataattattacatattataagttatttaattttttttcttagttaaagttttttaggttttatcatgttttatagaaaaaattagcaatatctacaacactaaattagcttcattaaatttaattgaatatattttaataatatgtttgttttgtattgaaaatattagtatatttttctataaacttaatcaaacttaaagaaatttgactaagaaaaaaagttaaacaacttataataatacatatggagtaatttatagaggttacagagcaaaagccggccgaaatttaataagtaggagggtgaaaacagagatttatagaggttacagagcaaaatgacacctaccaccgcaaaggacatgtactccaatgtaaaaaaaaaaagacatgttactcccaccgtctacgtcctgcttagcccatctatgtctacgctggctttgctagataattcattcaacgtgcttctcatggggaatggattataatttttagaggggatgtcttttcatgtatactttttaaaaaaaatcaatgcaaatggttgtaagaaaaaactgaaaagttttgataatgtagagtatactatttgtgtattatttaagcaacgagaagatatcatctcgagagtttaaaagtgtttcccctttttgtggatgcttgttttgcaacaggaattgcctacaattactgctacatgttagctgttgttacggttgtgcactgacttataggggatctgttgtttcttgttttgatcatatattcaaggtaaatatgtgtttcttattttgaccatatattcaaggtaaatgtcattttttatagctaagtctaactagaagttcttctctgcaagataacttagaaaaatgtccaaatctgctaagaagtactaccaaaggttacatcaactacactgtgagtatctgactaataccaattctaacattagctgtcatacaagatactctacattgcaacacatgcaacaaactagttcttcctccgttgtaaatttttagtatataacaacttctctatccactatctcatcttgacccatcaatgattgtctcttgttaattttttccaccactttcatatatcaaacaatcaaaatcatccctcatttagttccacctcgctccttaatttctgtgaaaaatctctagaagtattcatattttatgatagatgaagtagtcactggtcaagccatgctagctcatcctagcatcatatttaactcatggcggtttgtactaaaattttgtaacaacttctattaattaccagcggctatcatgcccataggttattacaacatcaaactagcaaacaattgtaaagtatgtcttcatcatatgaacaatagaaaaggtgtatttgtgtatgctcccacaagtatctccatacctgaggctctattgttgttaatagtttgatttttttataaaaaaaaatcagtgcctagacagcgaaaacaacttaaatatcaacatcacagctcgaggatgaccattcttgcctgatcctcgctcctcaaggctgcaccgcaaactaagtcagatcatctgatttcaactacagaggagccacagtgaagtatcattatctgctagttgtacgggtgttgttggtatcattatctgctagctgtgcgggttgttggtatcattggtctgtcctaggtagattttccacaagtcttaggctgcgttcgggaggagggttccccgacacgcaaaacgaaggatgcattactagatgattaattaagtattaattatttttttgaaaaatggattaatatgattttttttaaaacaagtttcgtatagaaattttttgtaaaaacacactgtttagcagtttgaaaaatgtacgtgcggaaaacgagagaggtgagttgggaaaactagggaagaacacaaccttaagtctaactaggaatgcctattgtcagactgctacagcccatgcttcttagaattgcaatgtgctgaagaaaaatttgataggctgaactttcagtggcaataagccccaacaaaggagacaaaatatgtccaatttctcaaaccaattaaggaccagcaatcaatccaaaacgaagagaaagaacgcatacaacacgctcaataaataataaagacatgcaaacaaaaggaatactgacctgaaaagtatatcaacaattgtgatggattaggtgcaaatgaacttaaggaaaacacagtgaactaggatatattcataagatatttcttctatgggacaatatctcatagaacgaagggtctggatctaactgtacatgatagcctaggttcgatcatatctaatgaagatgaatcaggcttttattagggaaaagagagtcaatcaggtttgatcaaaataagcagatgggatctgcaaccactgttcattaaggcgctaggtactattctggcatcggacagcacccagcacctagattctgttcctatatgctgagtttctgcaccaagatgagcttcttcatgcgctgacttcatccctaccaaggatgaacacaatcacctattaaaattaatttaagacttacattcctagtaaaactatgacaaataaaagatcacactaaatggaaattgcgttgatgttttgaagacatacttaggaccacctgtcgtccatagattgcatgttactttatgatttatacatgtctacgatgttatggagggacatttgcaaatttaaaaacaaaagggtaatatttattctgttgcaattatttttagtttagttgtacgtgcaatattctctcaaatgtttcatcataaaaaaaaatgttaagagataatgtgaacagaaagaaataaaagctaccatctctcctttattacttgcaccaacaaaatttacaagatacgttatgcagctaccaaatttctaattgtttatttctccattgaccaggataacggcttaactatgtgtacggactctacggaacatggtaacctgcaaaaataacaaaagaaacataagtcttttattcattgcagaacagggagaactttatcaaaaggttaaattaaaacagatataactgtatgtaatcaactaagttagtatgaattaataactaacctgcgcagttagttcctgcgtgtaacggattgtcacatacttttgcaacattaacccactttgacaaagcaattttagccttatccgctgctgtaaatgtgcgacagatgcaattgacatctgcgctctgcactgtttggcagcaatgtgagtgtctttttgggaattggtcacccaaatgtttttcaatattgtgatagcatccatccttattcatcacaatatttttctcgttctcacagccttcagcttgtaaatggctcggagaagaagagatggctacaaagccaagaatgcaaaacactcctacaactttagcactaatcatcttcttgtagtggatgctaaaatttgtgtgtttgttgatcaatatgtgtgcagcatatgcagcacaaatatctagattcggatcaagtgcagtcacagtagtgactgcaactttggcagtacccaatcatccaaccatccagcacatgagggatggtctagatttaactgtgtcatgcatcattttagctatttgaacaagcacagaacagtagttcagattttgcctgcaatttctctccttttgatctgaattttcttgaactttcagaaaacccaaataatgttaaagaaaagtagacacagacttcatttcattatattgaacttcataatatcttgcacgcataattgacaaaatgagctagagtttaactattttcgctgaaattgggtgtcatgcatccactgagacaaaagctttcaaaatcaactagctatgctactgctagattaacacagtaacaaaagctttcataatccaaaagtagatcatcatctgcttcccaaatcagcacgatgccttctaagttctattgacacctcttcaaatgaacttttgagataagatgacatcttcaacgtcaatagaaccctagggaaaaaaagataatatccaaattaaaataatttgttagcacatatatttatctttgaagaaactggtcagcataccagtagaagttgggcatagctgctaattgcttcacattcttgatgttcttccacatcagtttgcaagttttcctcctctgccttttcttcaggctgcataacagatttgagaagtggctcaatatatagttctcaatatatatagctgcataacagatttgagaagtggctgaaatatatttacctttctcttttttgttttctgcagtttatcaatccaatttgttttccgttttgttacacgtttccggctctcctttttcttcagaccagagacatgtgccaagttctgagctaactgggatgttgactgatcattcgactttgcaatgccatcactgtaagtttgttttattttgtcctcaacttttttactaacggcatgaagtgcttcttccacaagcaagtaacattcttcaaagtctacagctctggaagccaaaggaagaaattgttggtacagatatctgtacctaagagtagtactcagcttggggtcttccactatttgtctgccatgcatatcttgaatagctccacattttgcttctcgagtccaacgcttcaatacatatttttcaggcaacaatttaatgttcactaaatcaagagctttcaaggcatgtctacacagtagacctattctctcaaacattcgacaactacacgacacggtctgatcaaaagggttggcagtcaccttgtgctcatcttcaagtatgaactgatcatcaagtgagccaattgcaattatgaaatcattacttccatttgatcctttcgtataggtagccatggatttctcatattcagcttggaagacttcaaataaagcaggtgtgtaaagcttacttgcctgtaccaacataggtgtcatcatcataattcttggcaacttttttcttgactcatattcagattgcaattccttctctctcttttcttcaacaacacgctctacacgattaaggaacctgccgatgtcaagatctgatttcaaatgacctttcaagttactattcaaactttcacttaattgtgggcttcgcatccctattgtgaaaacatctgacatgtagcactcagcccacttttcttttaaattgtatatgctatccaaccaagtcactttacgcaccttttgtctcatggcatcaaatacatcttcaaattcttctttttcctcatactcatacatacatgcactgaaatctgctaggatacttgaaccttctgtttgttgaggactcaaatgctttacttcattttgtgatatgtgccaagtacataaaccatgccatgcaccagtgaatacttcagacacagcctttcccattgcaatgtcttggtctgtaaaaatggtttgaggttgcttttgattatgggctgataaaaatgtattgaacaaccacttgaatgattcaaatgtctcatcatacatcaaagctgcaccaaaaaccactgtctctctaaaatggttgaagccaacaaacataccaaaaggtctactttctttgtttgtcccgaatgtagtgtcgaaggtgatgacatcaccaaagtgagcataatcagcaatcatcctagcatctgcccaaaatatattagctatttgttcttcgcaatccaattgcactgcatagtgaaatgagggattttccacaattttatcttggaagtactttagtaaacttcctgcctcaccataaagtaagtccctttggcgcctagaacgcagataattcttatgatcacgctgtgtgtaaccaagattagctgacccaccaacatgccgaccaagaaactcatgtgctgctttaggtgtaataccagaatcatacgccacctcaatttcgactgcttggtgtttagaaatgttcctttgtgatggcatcaaatggcttgtttgtggagtttgaagaagatggttgtgttctacagctaagtcatgaaccttgtatgtcattgtttccctgagtaaagtgatgcccatgcgaacttggcaaccagttcgagtatgagctcgattacgttttgctacaacatatttcttttcttctgctctagaaccctgatttgaacaaacaaacctactggatgttactaactgatcaagatcacttttgttagtgtaattatttcgaacatcaaagccaatacgaccaccatatttgacccaaaaatcccaagcttcttcataggaattaaatgtcatgccaatttgaggcatccaacagggaggtttagtagatctgttacattacagtatagaggaataaaaagtttgacgcatgaacaacacaggaagaaagaagacaaaaatcagaagacaaaggatcctatcgcgatctgtacctctccaggttttgctccatggccttctcaacggtcatggctgaacagagaagagaaagaagcgtgtgatgtgctgcagcagtaatgggtaaagtatgcttcccatggtagaattggcgccaattctcacctccctctcagacttttccctccaaaacacttctgctggagtcagagagtaggtgaaaagttgggggaaattgagcaaccaatctagaccatcccttgtgtgctggatggttagatgatgggtactgccaaagttgcagtcactactgtgactgcacctgatccgaatcccaaatatatagtggtcatgcgaagtcctgtggggtctctacatactattcacttgtttttgaatatctactataaaagatatctaatggctaatgtttgaacttataatatctccaacatatcttaagatatatttattttcctcggatatgtgcatttatttattcttttttaagaactggaagatatcttcatttattaaaactattgatggattgcttggatatgttctcatttaataaaaatatgatatgctagatggattattctcatttattgatctgctactacacagtaatttattctcatttattatagagtaaatttcacaaaactatatatactttcatcaaattatcacaaaactacagatttaaggtgatatatcataaaactatatatttaatactaaatttatcacaaaactaaaggtttaagactaagtatcgcaaaactatagatttaataataaaattatcacaaaactacacatatggggttcaaatccttatgtttgagttatcaacgtccaagttttataattaaattgacgtaaacatgtggttttgtgataattttattattaaatatgtagttttgcaatacttaaccttaaacatatagttttgtgatatattatcttaaatatatagttttctgataaattaatcaaagtatatgtagttccttaaaatttactctttattataagtttataactaccaatagaccattagaacgcatgatgctggtaagtagcatgtagggctaacgatgtcccacctgacacactgaaccaagctacagattatttgtgattaattaagtattagctaattaaaactaaaaatggatgtatgattttttttaaaacaatactttctatagatttttttaataaaacacatcatctagcattttgggaagtgcgcgcacgaaaaacgagagtgtagaagttgggaaagtagggaggatagcatagccctagagtgagttctttcttgatgttgggaactcatccctcgcgcatgaaaaatgaagcgacttattagcgcatgattaattaagtattaactattttttaaaaaaagttaatatgatttttaaagaaactttcatatgtaattgttttaaaaagaatacaccatttagaagtttaaaaagcatgtacgtggaaaacgagaaagttgagtttagaacttaaccgaactcaaccctattgatgttgtgaagtctctgttaaaaaaatagaatgatctaaagtaagttgtcttgactactgtctggacaacaggttgaatggtgattttaatatgcccaagaaatttacaatattgaaagtggttattatcttgtggttgtggctagagggagatccaaaagaaatgctataaaagtatagattgttgcatgatatgaaaataaggatatcaatccgtaagcccttctctatttatgatgggaaaataatttgtgaaaagttggcttagatattcatctaacttagaaatactcagttgcattttttttagttttaatcatttgctagcataatttcagtactatagtgatgtttatcaagttgtccttaagaacctgcactctcttacaatcttccaactaacaaagtacagtgctcttgaatttgcatagtttttacagaaagggtgaaatagataaagagtgaacttcatattaaatctcaaatacttgtgttagaaccatcggaattaggtgaaggcatgagcatcatcttcagcagaaataagcatttgtactatgtacttcatggttggccttttgtttttatcttcttccaagcatgaaacggccaattgcattagtagcctagcctgcaaatgattaaattcaccatgcaaccgatcatccatcaaatccgcaaccaaggattctatgttgctctcaagtttgctgacaaccatcttaaccacacttctcaattcggcttctagttcctctttcccatccaacacccaatctgaaatcctcacccctttcaccagttcaagaagcaccactccataactgtacacatcaactttctctgtgattggaaggctagaaacccactcaggagccatatatcctcttgtcccccgaatccatgacatgtcagaaccagacccgtctctattcaacaacttggacaagccaaagtcagtgatcttaggctccatatcttcatccaatagtatgttctctggcttcatgtcgcaatggatgatccactcaaggcactcattgtgaagatatgccagccccttggcaacacctagagcaatgttgaacctttgcttccatccaagaaacataccagaatccctcccttgaaatagtactttggccaatgatccattctcaatgtactcatagactaaaatcctatgtattccttctgagcaaaaaccccacattctaacaagattcatatgataaattctaccaataacactcaactcagcctggaacacatcctcaccctgcttcacatcttgtagcaccttgacggccaccgtcctctcatcatctagaattcctttgtacacaacacctgacccaccacggccgatctcactctgaaaatttctagttccattccgtagctctacgtaactatatgcgcgaaaatggttggtaaccatcctgtacccttcatctagtgctgaaacctgacatcgcctaaaaactcccttgttggaaaagagccagcaaccgaatgctatcacaaacacctcaatgacaaaaaatgcagtcagaaatccgtagaagtagaaccatatcgacttgccctgattacttttgctcgatgacgcattcgagacattgagcaagaactccggtgagctcatgccaccgcatccgacaatgtcttcctgaatggcaatggcgtggcgatcgccgtccttttgccattggtggatgtgaatttctggcatgtcgagatcagccgggaccttgagataggccgtcccaggcaggccggggaacgttctgccattgaacatgaggctttttgggtagcactcacctttgccctgcttgtactggaaaaccacgcacgacggctcgctcatgcaccgtgtcgagcactcgtccagcgacaggttctcgctgctgttgatgtcgaagccccagaagtcggtgtgcggcagcgccaccagcttcatcgcccgcggccggccgccgccgtcaccggagttgaacgttggccggcagcctctgctccagtcgctcgggtcggcgcgcgcgtaccccggcgcgcagacgcacaccggcgccggcgagtagaggcagacggcgttggcgccgcacacgccgtggatgatgcacgggttgctgaacgccatccacgacaccaaccatgtcccggcgacctcgtcaaggctgtacagcctgaggttgccgtccgtgtccagcgtcagcctcctcctaacggcgacattcttgcccagatcggcggcgccgaaggtggcgttgtcgctggacgagaaatggccggaggcgtcgaagaaagcttcccgggtgaagttgtagatcttgcgactgttctgccagtagctgtagtaggggttgggccagtagatgctggacatctcatggttgtcgtacaccagcgacagcatggcgtagtcgctgaagcggaagctgtagaagccggcggcgaggatcttgtctgccgagaccatcgcctcgccggcggcgatgcgctgcgtgggcagtagtgtgtcggtggggtggtcgaagctctgccataggacgttcccgctcccgtcctcgatggcgaggttgccggaatcgtgcagccgcgcgcgcgcagcggtggcgctggcgctgacggtggagttccagaccacctcgccgtcgtagtcggtgaggacgagcgcgccgcggcggccgctgagtttgagacgggagcgcttgctgtggacggggcgggcgcggttggcggaccagacgacggcgcggtcggcggcgcgcgcgaaccagacggagaaggtgaagacggtgggcgagacgccgtagaagccgcaggcgaaggtgccgtccggggagagcaggacgtcggtggcgtggtcctcgacggcgatggaggcgccccggaggagactgtcgcgcgccgtgcacggaaatggacgcgacagcgagacgaagacgacgagtagcagcgctttggtggcggcggcgcgaagggcaccgctactgctacaactagtgctcatggctgtcaagtcgtgccggtaatggtaattggtaggtggcgaggaagtgattagctttgatctaatctactcactgttgatgtgttgagttaattagacaagtatactagtaattaacaaatgttttatccgacaggcaaattgcaggaaccgtgaccaaggcgcctaataagtttgactcgccctgacagacgacgacaacatgtttttcctgagacaatggggaccagatcctgcaaatggtattaggaggcaatcgcgactggtattggaattttgtaattcttccgtttcacaatgtaaaaatttctagcattacctgttggtaatttttctaacaagtcgacaagcacgatcgcaacacctaaacgccttgcggtgatatggagtcgccaaccacctcgatctaaccaaagggccaaatcaatatgggttttgcaaaaagaaaagctaaaccggctagcggagctatgggttttgcaaaaagaaaagctaaaccggctagcggagccgatttagagatcaaaatcagcctttatgccgatttagatcgatatgaggataactacccgtctcgtgggcaaaacggaaggttttcaggacaaacctacaaagaggtgtcgcactctcgcagcggcgacggacggtttacggcgcaaaccgacaaagatggactaaaattagggtaaaataaaaaacatagtaaaagaacgattcaagtagattgtattcgggtgttttacgatgaaccggtcttgtcccttctccacgtccaactcgggatagaaaataaaggaaacacgaaacatgccttcccgagcaaggaaacccgagacctgacgaaaacagactcggacttggaccctaccggtctgaccgcccacatacctgcggtcagactggccctactagccggtcagactgcccatatacctgcggtctaaccggccctatgaaggaaacccggcactttccaaactttaaattttcctctatttcgtctataggtgccaaatttgggtgtaaacacatgcccccctgcattttttatgaacatcgtgaatctaaaagcatagaacatattgtcttagggcgataatccaattaccggccatagtacttcctaagcatcttgccaaatgctcgggaagtatttcttcaagtatttcccattaattgctctatgaaaacaccgtcttgaagtgtcttcatctccttcaaagtcttcaaacgcttgtcgatgacgtcttcaaaattgcttcccatcaaggtcttgtaatcttcaaccgacaagtcatcttgcttgaaataccgaagagagtcaagatttacctcaacttcgtataagtaatattctcaagcggcacggcttcggcccacttagtgaaatccattgcaactagcacgaaccaatgcccttttgataacgaaggataaatctgaccaatgaaatccaaagccctacctcggaacggccatggtttgataataggattcaatatagcgacatgcgccaaatgaacattgccgatccgttgacaagcttcactccctctgtagcacttgaaataatcatcaattactttcggccaatagaattccactcttctaagcaaccaattcatcttatgggccaattgatgaattccacaaatcccttcatgcacatctcccctagcaactttagattgatcattgtctaaacacatcaatagcactccatctatatttcggcgatataatatttgaacatttgccgccgaatcttccgatcaaccccaagactaggatctttcaaatattctatcaaaggaattctccaagctatttctaactcatgggcacaaatgtccgaattcacaattaattcggccttttaatcaactgtaacgtgcccccaagcctcctgtctgggatcggtcagaccggccacgcaatgccggtcagaccgccctgtctgcctgaacagaccggccatgcagagccggtcagaccgccggtaccaccggtcagaccgccggtaccaccggtcagactggccgtgcaatgccagtcagaccgcccctagtctgtgattttgccaatttcatccaaagacttaaaaatcaagcaccggcttttctaatatcaaaaatactcctttcttcatattataaccagatgcttggtgtatcgaactattggaccaaaatccctcctctctagacatatgaaaaattataatatccaactaatatgtctagatgaatactaattcaaatggcttttgaaacaataatcatcatggcatcaaaacacttagccaattgaagtatgatcaataatgaatcaccaaagtcatatgtgtcacatgcatagattctaataaactacaaatgtaagtaatcggcttgagcatgtatgtaaaatattaacaatgccaatgttcctaaagaaaaccactctagagcaaatcatcacattgaccattgacattagtcgaattactagtaagcaaaactttcatggtgcaataaatatgaaatctatatattatctggtgatccataaaaacacatataatttggctttaaataaatatcagagtcatgagccaaatcatatttcaaacaaattatatgccaacctaccaattctactacctagaactggcatttgcaacatgtatgtataatatgaatttgataagtaaaaacacacatgtgctagatagcaagcaatgttctaacatggcataggcatataatatgatgatgaacacaataaacccataccttgccttagcatccaacaaacggcggctaaaagatgtgatgccgtatccatcgctattcatcttctcttggttccctcataagcatattgatgtcttgccccccgagcaaaatcggctttcttgattgcacaatttcaaaggcaagacgaacaccgcaccagcatcgatagcatcatgtgaaggagacttatctctaatgaccgatgattcttctcttatcaaattggattcatctctactacgggaaatcaccagtctcttaacttttacctcattggatctccacatttgcctaggtgcttttcgaggctccaaattattgcatgtcttgttctccacatcttcggcctctttttctttttgacctatggctcgaagacgctgtagcctcctcttttgagagtgagataagccagaaggtatccacttcggctgtggttgttttccaggagctaagcaatgattcttcatatttttggtcgaagtggaagctcctatgttgctctcaattttcacactcttctccaatacccccccccccggtcagaccggcctctgggcccggtccgaccggtcacaagccgtcggtcagaccggccagtaaggtcggtcagaccggccgtagactggcggttagaccggccagctggctcggtcagaccgctgatgtcgacaacaacggtattggctttagtcttttccgtttgtatagttttcgctgcatctccagtaggtacatgaacatcttgagattcctcattgatagcaacgacctccggagctttggcttctttcctcacccacaccttcttcacctttttcacctttgatccaccggaccgattcttttggggaaacggtcttgtcttgagttggatgaatgatttggcactaacctaggtgattccttccactcttggtaatacggcataggtggttgatgcatccaaggcatgtaatacataaaaggataaccatatagtgacattggatatggataccatggcatcacaaccggaggtttatatggagttggtatggttgatggctccgattgctttgatgtttgaccaaatctcttcctacgagatgatcttggtcttttcgaatcactagtttggttatcaaatcgttgaccggctaatcctttcttgtatttagccataagcatctcaaaagtgagcttcggctttttggtcctttggatactagataactcatcctttgcaactttatgatctccggcctttgcattattgatcctattcttgggccaaggatccccaataataacacttttccctttctttttgtcaacatcaataggactaataaggagagaattactaacaattccggtcttaggcataggtgtaaccgaaatagtttcacacgtgaccgatgaagtatcaatcggtctttgctccatcaagcttgcatctttaaaataatcatgaaactcatgctccatttgtgaccatgtagaaattgaattgggagcaagtaaactatatcatgtacatgcaaagtttgacaaagaaagaggaaacaactttaacttaagcaaatcatcactaccggccttaccacattgttcaataaattgaccgatatgctccattgttgttctagcatcctcacctgtgaatttcgtgaagttgggcacttcaaatccttgcaggtacgggaccgaatctacatgttcaggatacggcctttgatatgtatgcatagctactttggattctatttcactactatcccgcaaaacattatcattatcttttccaacatccacatgaccgatttgtgattcggtcttaggtgataatgctatttcactttcacttgtgatataacctgaaccgtcacttagttcggctatattttcaatgatgctattctctaagctagcaacacaatccgaaccattacttgttcggctattccatcgttgtctaaactagtaacacaatccgaaccaacacttggttcggctataatcgctatggcatcattgcacaaattattaacacaatccgaaccatcgcttggttcggctatacatgatattgcattttcatctaaactagtttgtaagctattgtcatccactcggctttcctgagccagagcttcatgcaacacatgatcaatatcaagaaatatatggccattcaatttctatttaatagaatcaagcaatccatcatatgcgatgtcagccaaatctttgtcagttattttcaaattgaaacatcggtttttaacatctctaaacctttcaatataatcagcaacagattcattgtatttgtgcctaaccgatgttaaatcagacaacctaagctcagtctcactagtgtggaaataatcatgaaatttttgttctaattgagcccaggaagaaatagaatttgccggtaaagaagtaaaccatgcaaaagcaataccggacaaagataaagaaaacaagcgcaatttacatgtatcccaattagcttcaccacattgcgctaaaaaattgatctacatgctcccatgtggtcctactttcctcaccactaaacttagtaaattcaggaattttataaccacgaggatatgggataatatcataaaaatcaagatacggcttttggtactccctagcatgattccttagctttgcgaaattctccctaatagtatttctaaaccaatcctccacagtttcaggctttggtggatctggtggtggacttggtggcctaaaaggtggttgttgcggcacaatattgttatattggccatacctagtatcgggaggatatcccctattaatatcattgtaggcattagagatatgtggaaaagcatgactaacagtattaacaggtgatgaataataattaaaatcagtactgctagtcgtggtatgaaaacctggagaaactcccagggaaccggtccgaccggcccatggcccggtctgaccggtggtcagtggtgcggtcagaccggccacaggaggcgcgatctggccaggatagggtatggtctgaccggctatagtaggcacggtctgaccggcgtagtacacggtctaaccggccatggtgggcacggtctgaccggcaaaggatgcggttagaccggtgtcacgactggtcataccgtcagctcggttttgcatatagccgattcctatgtaatcggctgtataatcacccattgaccccccctccccctagcattataagcatattgtataggagcaaaactaaaagtagcatatgcatctacacaatgattattaacgttttgaatagcaaaggacgggttgggcgaatcgaaggttacctttggtgaaattacaacttgaggtagcgggacgtcttctctcatgacgccttgatcggtcctaatgtattgtgtagcaatattgttgaacccgttctcactcgttatagttgatgaagaaattccttgattaatttcagccatatagctcgtagccgaaatattgatatttttcatgtgtgtgcagtgagcaaaaatctggaaatttcgatgtctcgcagaacaaccgatacagtatgaatcggttttgtattttttttttatgtacgtacacagtaatagatcggctttgatcaatagcctgatctcgttttgttttgcttttttttactcggttaatatgcacaataagaaagcgagactgatactgctcctattgtcttcctggttcccgcatttgcgtcggcagctgctgctcctcttctccggtctgaccgaattgataatgtcggttagaccggcaagataggcagccagatcgacagcacaagaacaatgccgccgatctgaatcaatcaacacaatgatcgatagatatgtgcagtgatagtacatagatagattgatttcggctgtttagccgaaactctagatttgacgaaacagaaattactagattaaacgaaattcggccatgatatggctgattagatcgttccccagtggagtcgccaaaaatcgtgttggcaacttttttaacaagtcgacaagcacgatcgcaacacctaaacgtcttgcggtgatatggagtcaccaaccacctcgatctagccaaagggccaaatcaagatgggttttgcaaaaagaaaagctaaaccggctagcggagccgatttagagatcaaaatcagcctttaggccgatttagatcgatatgaaaataactacccgtctcgtgggtaaaacggaaggttttcaggacaaacctacaaagaggtgtcgcactctcgcagcggcggcggacggtttacggcgcaaaccgacaaagatggactaaaactaaaacatagtaaaagaacgattcaagtagattgtattcgggtgttttacaataaaccggccttgtcccttaaataggggttggtcttgccctctacaggcccttctccacgtccaactcgggatagaaactaaaggaaacacgaaacatgccttcccgagcaaggaaacccgagacccgacgaaaacagactcggactcggaccctgccggtctgaccgcccacatacctgcggtctgaccggccctgtgaaggaaactcggcactttccaaactttggcaattttcctctatttcgtctataggtgccaaatttgggtgtaaacattacccatattcatttagatgttaaagaatctagacatatgtatgtgtttaggttcattaacatttatatgtatgtggacaatgttagaaagtcttacattgtgaaacggagggagtagtttactacccctccattctacgttataagctttttgggcgaagcaagaagccttcgtctgaatagaaggggccttcgaccaagggtttgggagaccttgcggcccatgggggcctttcgtcattaatgggccggcccaaggagatcgcttgagggcccatgaatacaaaagagactgtgtacccacactaatgtccatatcataaaggtatccatgtaaattctcatatactaactaaaccctagaaggtatgagcatgtactaagactataatattgctcttactattccatcaacttactgagtgaaccacgtctttcgatatgacgcaattgtcttttgacaacaatatctttatccaaaattacaaattattttatggaaactaaagttgccatagaatacaaatagctaatatcaacccctgatattccttgcaagagatctaaggttaaaactacatatcacataacaattaatcaacaaatacatgactgacatagctttaaccttcaaatgaaatgagtgcttgcacaactgagttcatgtttggccgcttgctcctatcttcctccaagcatgaaagagcaatctcaagcatcagcttcacttgtacatggttgaaatcaccgttcaatcgatagtccacaagatcctcgatagatttttcttcattggactccatcttctcacgtgtcaccctaacaactatcctaatatccatctcacataccttgatcccatggatcacccattccgaaatccaaatccccttcactagctcaaggagtattactccataactatacacatcaaccttctctataaccggtaggttagtaacccactctggagccatgtaccctcttgtccctctgatccgtgtcaaaattgcatctgaaccatctctgtttaacaacttagacaaaccaaaatccgtaatcttgggctccaaatccttatccaacaaaatgttctcaggcttcatgtcacaaggaacaatccattctgaacactcactgtgaaggtaagccagccctttagccacacacagagcaatcctgaaccgttgattccaatcaagcacatcatcatcaaatccatccctaccaaacaacttatgtgcaagtgatccattctctatgtattcagagacaagaatcctgtgcttgccttgagagcagcaaccccacattctgacaaggttcatgtgatagatccttccaatcacactcagctccgcttggaactcctcactctaccggctcacgttcttgagcaccttcacggccaccgccctctcatcgtcgagcacgcccttgtacaccacgccagagccgccgtggccgatcacgccggtgaagctcgccgtggctttcttgatgtcaccgaggggtcacatcaagaaaaggttagaatgttaccgagcagtggcggatctacgaatttttctaagcccgggcaagcctagcgatgggtagaaggtgtacttaaatctatataagtacataaaccatttaatatatattatatagtcttgtattatcttaaaattgaaaaaacagatgatcaactagtaaattaattaagaaagtaattagctactactactcaactgcatgtacgactgaaccctgtaactaagtactagtcactgcagtatggtgcactgaatgaggcgaagtgatggtaacaagtaacaagtgctctttcactgttgattcatgcggcggagctcgggcagctgcccatgctagccgggcggcggctccgccgctgttaccgagggtcttctctctggcatatagaagcttgctgcagaactttctcacatgtatgattgtgaaaatgaggacatggtggtgggttttggaacccacttgcaattccagccataccttcctctatggtatggtatgtgtgacgtgataaatattcatctagctcagctaaacccttagccatgtcctcttcctggacaacctcctcctcctcctcctcctccagtagtacatgaagggcaagaacaactggatgtattcctttatttaatttcttcatgataggatgattcttcaaaatagaatgaatacccctctccagatctgcttcttcctcttcatgagtcatattcccaatagaacaaatgtcctcatccaccacatcctcatccacctccaaatccaatttctcaaacctaaacaacacattacaatccaattagtaatcatattaaaaaaaattgtccctattaatttagagatgattgtaatgacaacaaaatcttgcggttatatgacattttattaacaacatgcactattttcttagactaaacatggcatgcattaaattaatgccaattatcttcatatgaagattaatgcatggtgcacgagtcaaaatatgaagaaatacatgaacgcaaaaacaaatactcacaattgtgacatccaatgcggtaattcgtcttgttcatgcaagccagcagcatccacgttgaccctaaataaatatagcattgcattaacgttagcatgttgctaattaatcttgctttgagaaactacaatgcatggatctaaataaatcaaaaggaacgcatagttttaatatggcatggttagaagataacccttataaggttttcagcaggtgatcatattttcacacacataaagaatagaaaccatttttcatctcatgtcaagcatgcaatttttgccaaaagcaaaaaacagtgccctgatataaatagaccaattgatagaagtgaaatgcgttaagcatatagtaacaaaacagcaatataatatcaaggataagcttatgaattggcaatacccaaagcataaagaatcatgatttgcagattaacaaacaggataagtaaaccataaacagcatgggaacatctacttagcagaagaaaactgaaggaagagataagatgaacatacatggtggaatcctgctggattactgcagttgattcggaggtcactgtttcagcatcagccgtaggcatttgctccgctagcctgaagaacacaagatgaacatatatatataagtcatcaagaatgcatcctattgcacgagagcaactgagcaagcaagcaaacaacggcaagcacagacgtaagtgcctggtttcttccccaattgcctcccgcagccgtgggtcgtctggcagagaagagctgctccggctcgtcggcgtctcctcgtcatcgtcggcgggatccatggcggagtggatctgtggatggatgggtggaggcgaagccgcaggccgcagctagagctaggtaggaggaggaaggagcgagccctagctaggtgaagtaggtcccttttcgttcgaggaagacgaaggggaagggaaggcacattgcgaaatttgatattttaccatcgttaggcagctggattcgccgaaaatatcattatcaattgagaggcttcactcatatgccattttcttctaattctctctttcgtcttattattattgactaaaatactcctagttgaatcaatttaagtatatcaaaaaatacgtagattataaagtaaatataccaaaatagttttacatgttattttttttctctacaccatattacatagtatgcggcgtattatctccacaacataaaaaaaaacactctcaactgaaactctcataaaaaatacgtaattattttttatttatgctgtgaagatagtgtcttatactctgtaatttggtgtaaagaaaaaaaaacatatatattgcatgtcaatatatttgtgcgatatgtactctgtaatctacatatttgctttacttgaattaattcaactaggggtattttggtcagcaaatataagagaaaaaagagaattggaagaaaatggtgtttcggcaaaacccctcaattgagaatggtatttcggcgaatcccaactataagtggtatttgggtgaaaccctattttaacgatggtattatgccaattttctcctagctatgtagtgttatcatggcgcatgggcctttgggattcggcccagtttccactgttttgggccaataagttcatctgaggtccttaagttgtcagcgaatctgattttcgtcctttatctagaaaacgatacaacgggttcctcaactgttaaaaccgatgcaatataggtctcatggcggtttgaacggcgattttagctaacgtggcattgacgtgacaatttaatttggaaaatattaaaaactgtgaccccacatattagttacaccaaaataatgaattaaaaaatggtgggctcatgtggaccccataggttctcaaccccccccctctctctctcttcctcccggttttgctactgggaaagagtagcatgtaggggttgggtgggggggtgatcgcccgagcggtcacccacccattagcaccccctcttcctcctccctctcggcctctccacattaatgccacatgtaaactcataattacaaaagccacaatagatcgacaaattttctaatggagcaagcatgcatacacacggctaggttaaatctataactaatataaatattcgtatttttccggtcgtcacatctaattttcatccgtttatcttccatacacaatccgattcggttagcaatagccatggaaaaaaattgcaaaaaaaagggcagccgccgacgcccgcctccacgctgtccgggccgccgcacctcccctcccccgatctagcggagggaagggcatcgccggccctcccgccgccgccacacagagagaaagggggagaagtggagagagtgggggtggggcgtcgcgctgtggggagggtggcgctgctcgctggggggagtgcgcgccgccgccgctgctcgctgtgggggaaggcggcgctgccgccacaccccgccgcaccccgccgtcgccgcaccgtgccggcgagaagggagggacggcgccggtggcgggggagtcagccggctggggggagggggagaggcgccggtggggagagggagagggggaggaggaggcggcgttgggggcggggaaggaggaggcggccggctcggctcgactggggcgggagggtgagggggagggttagggttagggttaggttttcatcaattttaaactgatctgaggcgtccatcaaaacgaacggctgagatcgatcgagggtttgggccacaccacttgggctgcacgtgggccggcggtccactaagtgagagaggaggagtatgggggtatcgggtatcaagtagattttgctctcttgtgggctgaaaaaggcccatacagaaaaaatgatttttatttcaataaatgctgaaatgatatttgtattatcaaaattagcaattaagctatgtaaattccaagaaaatttcaatgagtgtaattaatatagaaaatttaataaaagttaaatccaaccataacattttatttcttacccttactttacttataaattaatttaattatatacctacctacttaaaaaatacccaaatattagaatttaatatgttttaattcaattttatttgttttttttcttttcttgcaacgcaagaccacttttgctataatttaaaagagtgtaattaatattgcagaaaattttatatttcatcaaattataattcattttcttcatattaatagttcaaatcaaatttcagtcaccatatcattagccggtacaacgcacgggcattttgctactccctccgtttcacaatgtaagtcattctagcattttttatattcatattgatggtaatgaatctagatatacatatctatctagattcattaacaacaatatgaatgtgggaaatgctagaatgacttagatcgtgaaacggaagaagtagttaaattaaatgaatgaagaagtaaaattttgaaagatcatcatcgttaccttttatctcctgatgattgatgatgattcattgaacataaatagatcggccgatcgatcgatgtcctgcagctgacgaacttttatctcctgcaccctgcacgtatatatgcgcgcgcggggcaagttgtagttgagtatatattctgatcacgagcgcgcaccggccggcttggaaacggactaggcattaattatacgaatcggagtagctaggcactgctattcacgttcgcgctcgatcggatgcgtctccgcggccgatcgatccaacacgcgtacgtatgcttttcagattatttgcttcacattttaaaaaatatattttcttgtattgctcagatcaatttgtttttaagttctttctaaaaaaagcttatttatcaatatatttaatattttcctacaatcaagtagataatccgtagtacaatactctcgataatttgtttcaaactaagccttaatgttaggccactaaaaacataatactccctccataatataaggcgcacacatattccaagattcaacctttaaaatatacatttgaccaacatttaatataatatgaaacgaattttatttgttaaaaattatatcattggattggcatttaaatatactttcatatggttataattttgttgctagaaactttatagtatatgagaaattataaattaaagattagttttgaacaccgtgtcaattttgaccgcgccttatattatgggatagaggaaataaagaaaatatagtaataataaataattgctagtggatctatacactcaaatgtttggctacgtggattggatcacactcatgtctgaattaaataatagatgcatcccagacaaagagattgttggatttcatgaatcatttagaaaagaaaaggttatgtgattacataaatatatttcattagtccgaatcctcaaaactctacaccctcccgttcggaactatcattgaccattatcactctttatctctctacaccactcatcactgtttttcttatttagcagctattgtctaatcgatctcatctagtctccgcgccacatccgttctctccctttgtcaagctcttctccccccccccccctttctctctgatctttcatctcattctctaatcacactactgtcgaatttgacactgcccaaacatcgagtttatcgccctaccacttgccttgcccatatctttggtggcgtcatgccatcccttcctcactatgttgtgtagctaggtaatagacatctcttaagcccaaagaaaatcccaccacaacacacccccatctccacccttaccctaccctaccacatgctcctcgacaagctaggataaatagtaaggtgaaaatgatttttttgcaatttttttaatcaaatacttagcaaatcccttaaattaaataaatcaaagttaatgaaatatcttcatctaaaaatacgaattagtttacggaaactaaacttgtcatagaatacaaatagccaatatcaatctctaatacgtactcttgcaaggatctaaggttaaaactacttatcacataacaattaatcaacaaatacatattaacaaagcactagatgacacatactgacatagctttaaccttcaaccgagatgagtgattgcacaactgagttcatgtttggccgcttgctcctatcttcctccaagcatgaaatggcaatctcaagcatcagcttcacttgtacatggttgaaatcaccattcaatcgatagtccacaagatcctcaatagatctcttttcattggactccatcttctgacatgtcgccctaacaaccatcctaatatccatctcacataccttgatcccatggatcacccattccgaaatcctaatccccttcactagctcaaggagtatcactccgtaactatacacatcaaccttctctgtaaatggtaagttagtaacccactctggagccatgtaccctcttgtccctctaatccttgtcaaaattgcatctgaaccatctctgtttaacaacttagacaacccaaaatccgtaatcttgggctccaaatccttatccaacaaaatgttctcaggcttcatgtcacaatgaacaatccattctgagcactcactgtgaaggtaagccaaccctttagccacacccaaagcaatcctgaacctttgattccaatcaagcacatcatcatcaaatccatgatcaaacaatctttgtgcaagtgatccattctctatgtattcagagacaagaatcctgtgcttggcttgagagcagcaaccccacattctgacaaggttcatgtgatagatccttccaatcacactcagctctgcttggaactcctcctcactctgccggctcaagttcttgagcaccttcacggccaccaccctctcgtcgtcaagcacgcccttgtacaccacgccggagccgccgcggccgatcacgccggtgaagttcgccgtggctttcttgatgtcagcgtaggtgtacctctggaaatggctcgtgatcagcttgtagccttcttgatcaatggcgtacacccgtgaatgccggaacaatcctttgcttgagaagagccagcagccgaacccgatgacgatggcctcgacgacgagcaacgctgacaagaatccgtacaggtatggccacaccgtcttaccggcgtcgtgagatgacagtgaagaggagacgttgaggagaacctttctgttgctgtcgccggtggcggcggcggcgcagccggcgatgtcttcttggatggcgaggccaccgccgccgccgtcgccgccgcgctgccattggtggacatgaaactccggcacgtcgaagtcggcggggaccttgatgtacaccgttcccggcaagccggggaacgtcttgccgttgaagaggacgctcttgaggtagcactccatgtgctccttgtactggaacaccacgcacgcgcagttgtcgaggcacttgttggcgcagtcgccgagcggcatgacctcgccgtcgttgaggtcgtagccccagaagtcgctgtgcggcagcgccaccagcttcgccggccggccgcactcgagccggaacgtcggcctgcaccccctgctccagtcgctcgcgtcgacgcgctcgtgccccggcgcgcagacgcacaccggcgccggcgagtagaggcacacggcgttggcgccgcacacgccgtggatgttgcacgggttgccgaacgccatccacgacaccgaccacgttcccgtcgcgtcgtccaggctgtacgccctgaggttgccgtccgtgtccagcgtcagccgcctcctgacgccggcggcgccgaggtcggcggcctcgaaggtggtgccgtcgctggagaggaactgcccgagcgcgtccatggcggcctcgcgggagaagttgtagatcttgcggttgttctgccagtagctgaagtaagggttgggccagtagatgctggagaagttgccgttgtcgtagaagagggagagcatggcgtagtcgctgaacccgaggctgtagtagccggcggagagcagccggtcgcgcgacaccagccgcgtcgccgccgtcagccgctgcgccgggagcagcgtgtcggtggggaagtcgaagctctgccacagcgtcttgccgcaggcgtcctcgaccaccaggttgccggtgtcgtggagccggacgcgggcgccgccgctgccaccggcggcgggggtggaggagttccagaccacctcgccgccgtagtcggtgaggacgagcgcgccgcggcgcgcgtcgagcgtgacgcgcgcgcccttgctgtgcacggggcgcgcccgagccgcggtccagacgacggcgcggtcggcggcgcgcgcgaaccagacggagaaggtgaagacggtgggagacgcgtcgtagaagccggcggcgaacgtgccgtccggcgagcgcaggacgtcggtggcgtggtcctcgacggcgatcgaggcgccccgggcgagccactcacgcgccgcgtcgacgcgccgtggacatggacgcggcgacgagcttagcgtgatgatcacaagcaacgcgaaggttgcaaggcgagagttcatcatggcacatcaatcaggatgttgattctgacaggactgagattaggatgttgatttggactgtatagtgattacggttaatttttttgtcacacaagtcaagaattttgtgcgttccatcgcctgggcaccagtgactaccactaattaagatagtaatatggtaatagactagtgttagtgaaagcgatttgacttagatctgagtattgtatatgcataacgaggtgtacatgcacgttgcgtccaatggagtttgtgtgcatctgaactctgaaattctaaacttctgcttaaagaaagctgggtgagaagatagtagttctgttcacagcagtaattgggactacgattgattaatagaattatggggcaatttcatttttcccccactttcatctctaatattgattttgcccctactttttagggtttttgtttttgcccccactttttgaaccgaaaaatacttttgcccctgctttggatggaggagttaacggtgttaaatatgacatttataccctctcccatatctattcattaattgtgtttttgcccctattatgcatggctttggaaaattatttttgtgaatatgtttaaaattaaatgattgatttggacagattttgacattacaattgggacataatttgaatttgatggaattttgacaaaatttcggcagcattttgacagaaattgagcaaaaattttgacaaaatttcaacaacattttacacaatcatatgaagtcatatcagccttgcatcgttgacaataccacacttggcatacagattaatcagggcattgctcacatgcgaattgtccaccaacacaaccttttccgcatacacatgaaccctcctcccaagagcaagcgccccaatctctgcacaagcggttagaacactgactatggtgactccatctggcgcaaagttgacgcccagcatctcccggaagacagtgagaacctcgttagggcgcccgttggccgcaaagctgttgagcatcgaattccacgagacgaggttctgcccatgcaccggcatttcatcgaacaccttgtgcacgctctcgaacaggccacacgcgccgtagagatgaacgggcgagttttggacgaacccgttcttggcggcctcggtatggaggcactccccttcgcggagcgcgaggaggcgcgagcaagcctggagcagcgacgggtaggtgtgcgtgtcgggcggcgcgaggcggcggcggtggagctcgagcgcgacgcacgggcggaacgagcccgcagcgatgcggtgcacggtgttgagggggaacgggtctagtggcccgtgcgggaggaggcgggagagtaccgccacggcgtagcggagcggcggcgcgcggaggacggcgaggtggaagaggaggtgcttggcgaggagcgggtgggaggtgggcacaccggctccggagcgcccgcacatggatctgcttggc

SEQ ID NO: 10108 - DNA, 1444 bp, Oryza sativa
ggggggcatgaaatttgcaagggggcccccttgccgccctccgcgagggcgattttgcactgtgcgggggccgcctgcaaatggcgggcgagggggcatggaatttgcaggcggcccccttgccgccctgggggagggcgattttgtactgtgctctatattttttttatataaatatcaatagttatcaaatctttttatattgaaaactatacaagattaaaatctccaagattggtaaaatacaattttattattttttagggcatatttggaatgttaccgtacaaatattttgttaatgccaaaatataagcaagttttggcactaccaaatatttggtaaggtaaaattgcatttgatcatatttggtttgctgccaaaatgtaaaattgtagtgaagaatgttgtacataatctcaattctagattacgtattaccaattaataggcttctattttcgtgtgtggtgtggtagtgggaaagaagatatgaagaggttgccttcagattgtcaattatatagcgtcgttttcactgcaatatatgtgaactcaatgagatacattattcattagatgtgacaagacgatcacgcgtgggcgtgattcactttatgtcaacaggcagcgccgaaagttgatagtgataactcgagctgccgcttttcatgtgtgctgttgtggactgtgcgcgctactggatatggcactaccgtgaagcgccgaaagtgtgttgttgtgagcataagttgttcaagcaccatacgaatgaaaagaactacgtagacgagacaaacacaagtagtactgcagtagtaatagcaaaagtagtactgctttacaagtttgtaagccaaaagaaacggtcacataaggactgaagaggtagaacactactgacgaggcctcttacccctgtccctcctaccctgcgccctaatgtgcccctgggagtacgtgagtcggtccgggggtacggcacggccaacccgtcctgcctgtacaggtgtgacctctggctgctcctgagtgtgcgcctctggagctcctccaagctgagaggagcctagtacgtcctggtggtctgcaccgtgcaagtcgtcgtcgtagaactggctagtaggaccagtcctaccggcgtgagacgaagaggccccagtaccgaagatcccggctgcaaatcctgctggacaaggaccatcagtttcgtataggtatttaacagtattaataaaaagtaaagtaccgtgtgggcgagggatcgacgctccgtgagagaaagagctggcgaacgcgcccgaagaggtggcgaacgcccctgcggagctcgtggaagcgccggtcgtgcctgcgaacgcgctcgaaggcatacgaggtcctgcgatgaggaaacgtgcagttaaaacatggtgacataatcgtgcaaaagctgaaacaaaa

SEQ ID NO: 10109 - DNA, 5639 bp, Oryza sativa
gccttgttcttcctacatgatacttcaagattaaaaccagctgaacaaattattgcaagcacctaagggtagtaaaacatttacctgctcttgaaacttcaatatagcagttatctcttggcttacgcattctagaaacatctacaaaaagagtaccaatgttcaaagcagttacaatttactagtttaccaaagaaaagagacttttttcgccgaaacacaggataataactcaacaagagcagagagcatgtttctcaaaagaatcagaacataagatatgccaacccatacatttcccaggtaacatgtagcaaagtgagtattgattaatcagactcagctgatgaccacgaaacatgcaaatatctaactatacaacgcaacacctcaaacagataaattcagttactaacattattcttgattgagtgtaaggacatggaactatggtttaaatcacataaagattcgatggatctacatgagctttgaaatctacagtaccaaaagactcatgtattatgactaaaatatacagacaggcaaggaaatcaagcaccattaatgttgttgaatagtatttgaactaaattgtagcagtgtgtaaatccggtatggaagttgagggtacagggcatacaattctcactgcggtgtgtatttggttcagcagaacttggaaatcccatcctgtcaatcacaccaggttttgcatcttcccgggtttctttcagaaaattccagaaaacccttttggggaaaaaacaacaccattccttcgaggaaggtatatttgacaagtaaaatcatctgtttcactgtttttgctccctgcatcaactttatctgcatcagctttggcattatttaactttcgtagttcactatatcttgattggaccctaaacggtgacattcttccagcagaaatttctctcctagaatccggagccatttccattctagaagttgttctgggaacaacaggtgccacatcagcactttctttccttgaatcagtagcagactctacccttctgcctgccttaaaaagaagaggtgcagaatctggggccacttccatccgcgaactagtcttcggagcagcagcagatgctacatcagtactttctttcctagattcaacagaagactctaaccttctgcctgacttgggaacaataggtgccgagtcagcgcttacttccattcttaagttagctctgggaccaacaacaggtgctgaatcagaggccatttctgttctagagtttgttctgggaacaacagctgctgccacatcagaactttctttcctagaatcatttgcaatctctattcttctaccactcttagaaagaacagggcccacatcagcagcatcactcctagaatcagtagccagctctggtcctgagctagttcttggtattatcacaggcaccacatcaattttgctaaaattctgaagactagaagagttgttactcttcagtgaacctctcttcaggttggtgccactagatgcaaaggttgaatttccaactgttttggtactggagccattaccagctctctgaggtgtgactggaaccaacccgcttgcttcaatatggtaagaacagataaataaaggacacattaggcatatcaagtgtttcaactgaatataaacgtgtaaagacagagaaaatcagtgacatacaagttgttgattttgtctctttcaatgcagagtctgaattttgagaaactgataatcttcctgtagaagactttatgttattctcagaattttgtagaactgataaccgcccaatgttagcccttgaaccactgtcattttgtaatggcatagtgctacttgacgaacttttcaactctgaatgaccatttaattttgttgaagtacccgttgcatatggctcaagacgctgaaaattgatggtttttagtacattataactaaaaacaaatggggaacttcaatgaaaataatatattggtgttagaactgtagcagggaagccagaaacataccgttagatctacaacccatattccaacacaactttgattaaatgaacaaccaagaagttttccctcgtggacatttagatcagacagtctagaccatcccacatcaacggtatcatgacatcttattggttcccaagagaaaacctgcttagattaagagaagtttatctctaggaaacatggagaagaaatttgttgccatgctgtaacatgagaaagtaatgaccatacctttaaactttcatgcaacccacacaacagagatcttccatcaggattgaatgtcatggatcgaacacctgttgtctgatattcaaatagagacgtcagcaagtaatataatggatcttttattttgaggttctcaggaactttgggcagcctgtgctaatcttgatgtatatatgctagttgtcactacagcagcatataaagcactaactacacttgaatgttgaaaggccatgctatgccataagcaaatggaccatagaattaggtaagcacaggtgattgtataaggacatgtaattgcgagccttctagcatatgcactagaacaggtagcccacatgttttgaggagataatgaggttatgacatgctgttgagagctgattacgacatagtaaaatatggttgggcacaccaaatagagaaatatcacaaaagaattaaaatataatcaatgatgtcatgacttaagagaactatgcagtatgctatttaattctagattggtgcttctatgctctaccaaaattagagtgacacaaatcctaaagtactgagtagtcgaacagcaaccaatgagtggctgaaaaccatgcagttaatgtgattaaaaaattaaaagaaagcctgtgtgttggaaactaatgattagttgttagtgtaatggagtaatataagaaagaacaaatatgaggacaaacatttgaagcactcctttacatgttcaagaagtcctccaacattttttggttgagaaatctgtgcctactaaaagtcatccggtcttgcaagcataacaaagctttatagcgaaaccccaaggttttacatacctcaggtccagtagacccaatcaattcaaaggtctccaaatcccaaaacttgacagttttatcggatgaacctgaatgaggcaaacaggagtcatacaatgaatctttagtagcaaagcgtacaggaaacaaaaaagaggcaagcacaacttctgacataaacagttatattcgaacagtgcccaggctgcaaaaatggtatgcatctccatgataactgaaatgggattcttattctacaccaatgaacaaaatatttctaactacattgttgtattgcacacaatttcaatggaggaaaagattataacataccaatatcttaaaaattcatgcaaatctttcatttcaaaaataggtcattaaaatatgcaaaaatatatatttcgcaaagaaataataaccgatgtactgacatagcaatttaaaaaatgccagaacaagacaatttgatgtttggcattgttggacagcaaaaaaggggagtgtattaaaactgccaggactttcacaatatatatatgggcacataccatttatagccataatatggtgaattgcagtttaccatttaaattattttcaaatactactatactagcatgtacagcatatgtttctaatcactaaacgaaggaagcccaagagttaagtataacagactacgctgtacaaccaaaagggtcaaagaaaagttgatgactaagtgtcagattagcattgtaacatctgaacctaacctgttgccagaaggaactcatggggatggaaatctatgcactgaatctggccttcatgacacttgaaatcatgtaataactttccagctgtcagatcccagagctgccaaggcaaacttaccataagaaaaaacaagttctatggaaaatttactgtaaggcaaattcatcatcatcatgttgagttcactaaaggaaaatcaacctgtttgctaaaatcttcacgctagcagaatctaccgcagaatcagcacaacgatgtagtgtatgatttgaaagattattaggcattgacaattcttaccttcacaacattatcttcaccaccagacacaacccagcggccatcaggtgtgaatctaattgcatttacacctcttgtgtggcctttgtacgtgtggatacagcccttccttcttatatcccatatcttcagatttgtgtccagtgaccccgaggcaaagaattctccaaaaggatggaaatcaactgacatgcagtttgacctatgtccagtaagcgtgcggacaactgcatacaaaacaaatcaagtggtgctaatcaaataagataggacacagaatgtagtcagtatacatgcgatagtaaaaagcatttgcattcacatatagacaaggaatgtggtcaggtatatatgcaacagcaaaaggcattcgcattcacgtactttttgcctcctctaaatcccatagttttattgttccactggctgctcctgcggccacgaaaacttctgtggaatcaaaattaacagactccacagcactggtgtgccctgataaactctgtataacaacaaaaagaagttaatcaaataaagtattccatcagctgaaacaacacagatgacacctccagtagctagacccactgtgatcgaacacatgtaaggtagtaggttgacacttcacataaaagtagcccctagttaataaaacaccaacatacagaaagtgatgctggagaagtcgacaagagctaaaatggtgaaattttcatctggtggttaattaaatgccccattgactattgggtagacttacttgcctgttttgctatagaaccacattttacatagtaggcatactagtcagaacaggacaatagagacttaccaaaattgaattgggcttcccaatagcccaaagattaaccttatggtcatctcctcctgtcacgagaactcgtgaagtcttcctcccaatcttgaggcagttgacattggatgaatgcgccacaaactcctctacgccaaacgcaagtcaaggcattccaatgtcgcaagttcacccacaaaatcacccccaaataaatcatgttgcaatcttcaggcagttcataagcacaaagcagcagtaatcccacttgtccgacaatcagacataaccacggtcactactaactagtgatcagcaacagcttaagtgataaaatcgagcaaacactaaatcccccattatcttaacgaggggcaagcgagataaaagcataataaaatgatgggttaaatttgaagaactaaatcgcccagctagcagaatgaatgcgacagtggcgatggatcggtcaaacagacacaatgtacctcgaaaaaaaatacaaaaaatactagtcaaaaatactggaaacgaattcgcgaggatacggagcttgtaggcgcgcttggtgttggtcgtcatggcaggcaggtcgtctccgaacaccgcgcctcgggctccaatctcatctccagatcacgccgccgccacggcgccacccccctcccccg

SEQ ID NO: 10110 - DNA, 14296 bp, Oryza sativa
aggaggtaaaggtggaggggggcatggggagaaggggtcggctaagtcctctgagcaggagcgccggaaggggatcgcctggacggaggacgagcacaggttagctttgccttcgttcctatctaccaaattgcattgctgctctagcctagacaatatttgatgattgcagaaactggcttctgttcggagcctgtacaacttcactgttttattgtggattaatccgtctagtcattgtaaatggaagttgaaattgaaatgctctgggaattttggaaatcgctgtttagacagtctagcagcttcttttggttgcagaactgcatacttgtaggtgtgttgctcttcagctttctttgcactggacaattaggtagctcccttttctatttcttgaataaatgattgcataggagctagaatagtagtttatttaatcgtgaattaggtaccgcttctgtgttgttgggaattttgccgattggtttgtcttgttattgcagcctgtttacgattttggaaattactgcttcagaccccaggaagtaggcttgttggtttgtgtgtgctaggttttgtcccgcatggtttttttatgggtttcaccacttggcagtttatgttacatcctgcatagttcttctcagatggagcggctgattacttgtgctgcatacttgttttcaactggaagtggttcattggagatgttgtttcttccttgctagtttcgacaactccagtaactacttaactcaatcaatttttgaattataaactgttttctaacaataacctattcacgttacttcttatggtggatcctatgcatttcgagctacatcccactgatttagttttaggtttgtttctcatttcttcttgctgaaggcttgtttaattgattcatcttagcatatttcaccttcctcctaaaaggatgagaaaattctgttcatagcacaattcgtaaaatacaactaagctttttctcactctgcttaataccatagcgcatcagttttttgtttgaaaaataccaccgaaagaccaaaataattttacttcaattgcaatgcaacaagacctacctcttacgcattcctgtttgctggggttcctctggcgcgttctccttctctttgttcaatctgacacctccattagctcatacatcatctttaatcacaaaccaacagatcaaacagatagtttatcaaatatctttgtcaccattacagaaatctcctatttcataggtacaaataaaagaaagaaagcaaatctgtctgcttgcatctactttgattttccgaacgccaatgctcaatcccctacatagctccagcagttcatggaatacaaaattaaacttggtcatttggcttcaaagtggagtgaagaacgatgttgtgcatgtgcgccttggcttccagctagaagatcgattagccattgacctgggttaacacgtggtgagccagcaggctagcgtcactggcaagcaaccatacggccacatccaccaagcgcgtttgctgtgtgcaggttggagggacggcaatcaccatggacgtcgctaagcttcgagctcacaggagttggttgagggtgaggcggtggcaccagcaagtgaccacactgccgcgtccagcaatcgcgagcatacaggggaggggaatggcggccaccactagcccgtgcctgccgagaatgacgaaacacaagcaggccccagcagcggaagagggggttagatcaagggatttgaggatttggaggagatggggaattattgttcagtcaggaacttacaagatgggttcgaatcatctaggctcaatctgagggacaattttgtccaaataaactcccgttagctcaaaagatgacggtagtggtatttcccctagaaaaacccacaacctgtggcattatgaaggtttgtgctattttctgaatttaatggtcagcgtgtgtcatggacgaattttccctaaaaggagttagaggaatcaggacaatggtagcttataactgatttttgtccatcttaaatttatttcagcaaaatgaacattttgaacgcatttgtttcacatttcatttttttttccgtatttgatatgctaattttagttgaaattttcctgctagctttagaccggaacaagctagtacatgcttgctgtgcgcatataattggtttttgtgtcttttagacatagtcctgttttcatttgcaacctgtttcttccatgatattgtggacagtatttctggtccaaggagataaaattttgatatcttattggcatattggtaatattgaatgtgttttatcagtatataaggcagtatgcttgtcagatccccatataaaatgatgtgattatcgtgtatttttgtctgtttgaatggctgaatgagtgaaatagacataacataccaagatgatgcagagcatgaaaatacgtttcaagtagaagtaacctgatgccctgatggatgctaatgtgttgttcgttcattgccatgtatgcacatgcatgatattgattacaactcaagtgaaagcatggttgtaaaaatggcacaactaacctccttttgttctgatgcataaatttgtagctattacccctctcttcaggatgagaaatatccaaagttgattaattcatgcagactgccctttactcatatggttattgatgtgtcctaccacttgattttaatttgcaggctgttccttcttggacttgagaagtacggcaaaggcgactggaggagtatctcaagaaactttgtgatctcaaggacacccacccaagtagctagtcatgcacagaagtattttattcgcctgaactcaatgaacagagagaggcggcgatcaagtatacatgacataaccagcgtgaacaatggagatacatctgctgctcaggggccaatcacaggtcagccaaatggcccatcagcaaatcctggaaaatcctctaagcagtctctacagccagcaaatgcgcctccaggcgtcgatgcttatggtacgacaattggacagccagttggtggtcctcttgtgtccgcagttggcactcctgttacacttcctgttcctgctgcacctcatatagcctatggcatgcatgcccctgtccctggagctgtagtccctggtgccccagtaaacatgcctccaatgccctaccccatgccgccaccaacatctcatggatgagggctttgaatactacagttcttctagacaaactcataatatctgtcttgtttagagtttcaatgcatgctgttatgtctcaataaagcaatatcaataaactcttgtacattacaaatggttattgaatgtagcattttgaggacatcctggactgtatttatcatctttgttacgcctgcacttcgttccatcttcaatgtacgcctgccaccctgccccagtcgtaaaatggttggaatgctgaatctccttcagcccagatgtagtggtttattatctgaaaagtaaatatcgagtcaatacgtaatcatgaacatatgtaatggttcagtaagtatccgactatctgattcgtaattatgaacagatgtattggttcactacctgattcgtactagtaatgaacctggtgcaggtacaaagagatcgaaaccttgccgtgctgctctaactccatttttgttgcactggttatttgcgtcacactaataatcatggtggtcgtacgtgacgtaataacgtattatgtcgtcagtttcgctcttatacatttttttttgtctgacaagtttctgctttttaagagcgtgccaactatagcagaaaaaaagaggcagcaaatcctggaaaatagcaacgttttacgttacattccgagtcatttccatccgtcacttcctggtttgggaggtgttaccgttaccatcctaatttaattcctcctaatcagtaatcacccttgtaatcaaagcttctatgatttaatcattcgtgtgaaaccaatcgtaaaaccccaatttggttattagcattaccacgatcccattggcttcgtgagagacgcgattgcaaaccgaacggtcatttccatccgtttttattgttttttccgctcccaacgggccgcggcccacgacatcaagaaagcttctcccatcggcccaactcctcctcccgatctcttctctctctctctctctctctctcaggccaagcgcgacgaggggacggcgacgcaaaccacaagccagcgagcagccggcgaccaccgcgccatcaacggcgttcgagattcccctggagatcgccgtggtgagaactcgccaggtatgcgtgtgctcctctaccctaaaccctagcccgatctcctccggccatcccgcctagcgcgaccaggtcttccattcccgcgcgcctttccgctgcgtcgagtcgacgccgccttcctcaaccagcaccgacctcgggccgccgccgtctggtcgctttccgctggatcgctgcatgttagatctgggcattccagttcttgaattttgtaaaacaattttgttcttgatgatatgatactgatcaagtgcgaatccgccactttggctcagctgcaaaacccctcactcatttcaaataatctgatgctgcatttttactgtagttgatttacagtttttttaatgtgtcgacaaaggatattttatatcaacaaaggttagagattatgtcatattttcaaaatgcaggaacatctctgtcaatatgatttatcatttgttaggcgattgcagcatccatcaagctgcaacccactcaacacatccgtataccctttttgtagtcatctgaatttgataactctagaatggtgaatagtcatgttagattgtggttcttttaaaaaaaaaaagttagattgtggttcactggtttcagtcttaatatgctcaagccagaatgtacttgatcatccaaaattccacatagtttgatttgtgggtaacttaatattgtaagtgagattcttatctaaaactgttggattaccatagtacatgtcttaattttggatttggtaaatcacataattgtaactttgtaacgattgagcatgctggcggtgttggttcttttcatttggtttttttaactatattgcctacaaaattttacggaagcattcctgaataaagtttataactatagatattcattttcttatgatttcagcatgaatgcgcaaagcaagtttcataatttgtctgtcatgtttcaggatgaatgtaacttatgaagcctacaaatcattgatgtgattttagcttagctcagatcaggattgtggactgtaaaggtgagcattcgtggaagattgtttctatctcattcaattttgaacaatctcacactgaattttcatgtggaggtagtgtatatgcaataattctaacagtttctacctatttatttatttttttaaaactacaattgatttattttcaccttgccttttttcttaacagtgtaacagcaaagtgagctccctttcccagagaagatttttttggtcatctgttcccctacaaaaaaaaaaaatcccccaaagtgaaccaagtcttcgaaatcaaaagagagcaggagggggcacctaccccttcaagcccacggctacttccaccatcggtccatcgtctctcacactctctcactctctaaacagcacacaaggcaaagctgcgtgctacgtgcgcgcgcatggctgatgctaggggctcctcttcttcttccggcgatggcggtggcggcgagggcaagggcggagcaggccatggtgactttgtggggggcggccagcacaactggtaccatgggatccttggggccgtgccgccgcccaacgttgggcgacaaaacatcgtgcaccatcagtaccctgctgctagcttgatccagcagcaccaccagtcgccaacaatgccgctaccgatggcgcagctcccctacgtgccccaatacaccgtgctgcctacgcccgccgtgctcccgtcgcaccaccaccaccacggccagtcgcagatatctcaaggttagttctctcctgctccacatacatgatactccttccgtccctaaatatttgacgctgttgatttttttaaacgtgtttgaccgttcgtcttatttaaaaacttttgtgaaatatgtaaaactatatgtatagataaaaggtacatttaacaataaatcaaatgataggaaaagaattaataattatttaaattttttaaataagacgaacggtcaaacatgcttaaaaaattcaacgacgtcgaacatttagagacggagggagtacatcttaattttctcatggctgaatttggcacgacagatcttttcccccatagggtttttttctaggtcgttctagggttacttatgtgcacgcagagatctgtgtgttttctcatggctcatgctacctagatgtgagacccggtcttgcatttcttgccctcgtcagtgttattattcctgccaacacttgatgcttcatgctgtttattctttagttccttctcgcttgtctcccaatatgacctatcattaataattttgtttgatcgttcttcagaaaacttccaagactgggttccctccaacaatgttgcagctccgcatgttcccagcgcttttcaggattggaggcaaatgtgcaatgggtcggcattcatgccttttggccaaactgctgccaatagcaatgttttttaccagaatctgaccttcaattcatggactagcaataacatgccgaggaaccctgtctacactagtttccaccctgctgcaattgaggatcaccatgctcctctattccatagcaacaatcatgacatagacccaggtacatatatatgcacgcatgcatggtctttgacaaatattaaatagaatatgtacatggattgatattctgtgcaattatatatagagggttagaaaagggacattactacattagggtaaaccctcagggctaccaacaaccctgggagagtaggataaagtgagtgtttatgcaaagtgtggaatggggatttgaagtagaaaactgtagtggttgtaaacggtttgtctcataaaccacttaccctatttagattagttgaatacgtaattgatatttaagatgattgttcctgctctaccaatatgaacttcgcactgtctcgtgcgagtcgttaaacaaaaagatatttaagatgattgtgctataagtaaaggggatatataggttatttcctttgaagatttaagggcatccacaatgtagaaattgagggggtcataagctagacccttaagttctacatatacattgtggagatggttcttacagagtttttgggaaaccgacacttgcatggagttgacatcgccggagctccacccgcaaaagccacctcacctgccaccgccggaggtctgctcacgaacacagcccctgccaccgtgtcacagatccatgcgagatgccgccgtcgccaaatctaccgctgctgtggccttcttccgcgagcacctccaccatcagatccgtgtgcgttcgcgagggccaccatcaccgctgccagatccgcccgcggcctcctctctcatttgtacggtggcttggtgttttggcttgttgggaaaaggaagctgggggagaaacgagagaggaagagaaaagtggtggctgggatggtaaatattattgtattgaaatatggggcccaacttaataactcttcttgctatgtacatcataatgttggatcgcgctcctctgacgtaaagtcagagggacgtgggtcactgacgtgtgggcccaacctttgtgggtcctacatgtcagtgacaaagtccctctgactttacgtcagaggagactcatcccatgatgttatactttagttgggcccatttgggacccaccataaggccaaggctgcgttggatttaacatttggagatggattttctaccgtatgcaaaataagacgggctattagcgcatgattatttgagtatttattattacaaacttgaaaatagatttatttatttttttaaagaaacttttatatatataatttttgcaaaaaaatgtaccttagcagtttgggaagcatgctaacaaaaaaggggaagttgtaatttaaagttagaggtaaggaggccttaagccatatatacacacattgtatttattaattcaccatgcatttcatgtaagtatgcaaatatatatggggaaactattttgatcccttgaggatcccctatatggctgtgtgctactacttttatgcattgcctcactctaagcatcttattatgtgcaggcttttaggctaacttttttctttttttttggagataggctttcagactaacttcaggatggatcaagcatttgtacctgcttcttcaccttttccaccggtgtcatcatcatcccatagtttctcctcagctaaaatttcaaatggaccaacatatactaagaaagccaagaaatcaaatgtaaaagtaagactcttttagaactcgttgatagatttcgggttcatatgagcagtcctaatgtgagatttctacaggatccaccaattgtcttcagaaggagcgatatggagagcgaaaaaaacgatgataatccagatcaaactccggttagtgagcctccaagcatgaatcagaacggtgaaaatcttattattgtaagtaacacaatgccattcatcttgaatgctactattctctattagtacatgaatgcatttttaactgttccattattggtagattaaaagtatcattaacaattggtagattaaaagtatcagtaacaatttcattactttttaggataatggcaactattccacaattttttaactaaatgattctacctttagcaaggaggattagattgacttcaatcaattcgttctgcatgtacatcattatagtacgcagtcttcccggggacactaacttaaatctgaactaactctgaacttccaagcagagattcaactgtagagaataccgtgttatcttgcgcaaggagttaacaaacagtgatgttggtaatattggaagaatcgtgatgccaaaggtaaaatcttgtatattctcttaattaagtgacatcaacatattatattctacaacagatactgttctagcacgaaccacacaactactgtgcgatatatttagttatgaagtcttgagagttgagtgtgattttatttccttccaaattttgtagagggatgcagaggctcatcttccagcattgcatcaaagggaaggtgtgacgctgaaaatggatgacttcaagtttgaaactacatggaattttaagtataggtaatccgatcataatatcatattactagtctagggaattgtgtacagatcaccagctgaagttcgaatattatgtctgcaatgatgtagtaacactatgatctaattctatcctattgtgagaaagtactttaaattatatcaagtgcacgtgacatcatttcttccatgtaacccaataattataaagaaaatcttaaacgtagaataagatagattatgctgttatctattggtttacaaatatacaaactcaaatgtgatctatacatggaaaaaaaatcagactatgtaaagtgcaatcgcatttatagtctagataatatgtcaatctgcttctatctctctagataaaatttgaccttcacatgtttgtggagcaatagatgattgtacaataatcttctttgttagttttttttcttcaaagtttttcgtaaatcgtaattatctgggtcacatgagagaaacgcgaacatatatggcttataatctgcgtcacatattactgatataattggagatacctttcaggttctggcccaacaacaagagcagaatgtatgtcttggaaagcaccggtacgtttaaacactgaagcatatacttttggatttttctaagcttgtactgaacttgatggattgctctcttcaggtggttttgtgaagcatcacggtctccagacaggcgacatattcatcatttacaaaagctcggagtctgggaaatttgtatgtcgatcataaccacaattccttattcatcatttacaacctattggatttcttgtttccacacatggctaatcttttcaaatgtatttcctaaagttgtattactgttgtatatgatatagtatgttgccttatgcctcttttgaaggttgttcgtggggagaaggccattaagccgaatgccatcatgcctgttgtggactgcagctgcaaaaatgaactcaacaaaagcgaagaatgcgggttcaccatcagcctacagaccaagaaaacctgatggaatggcagcttcaggtcttgacttaagatcagcataagagagccttattagaaggcaatgcatgttgtcatgttattgaagaaatgtgataatgctccacagtttttaactttgtagataaaaatgcaagattgtaaattattatttaacaatccttatttttgacaaataatggtccacattagagattgcaacagagaattagctagaaactctctttaactcatacatgaaactctcaaggccatgaatacaccatcttatacttgcaacatacagagcctatatagcagttccatacttcgcaagtcgttaatgacaaaacatattcctccgtcaaaaaaaaagacaaaccctatgtttccgtgtccaatgtttaactgtcgtcttatatgaaacttttttataattagtattttcattgttgttagatgataaaacatgattaatactttatgcgtgacttgtctttttaatttttttcatatttttttaaataagacggacggtcaaacgttggacacggaaacctagagattttctttttttttaggacggatggagtagatgcattcataataatctaacaatatatattttgtatcctatatcatacaacatcatcatccatcttgaagtctaggtcttttttttttgtaaaatgggtttttataactgaaaaagggatttataaaattaatttaagagtgtgccaactatatatagcaaaaaaaaagcaaatcctgtaaataagataactggccccatccttgatgatctctctggtctaggtgagctccgtgccatttacttccacaacgtacggagaatccgacggtgaggactacaacggtgatagaagcggccccggtgccggagaggtggccgacgaaggtgtgcgggatgccgagccgacacctcacacaagcttttgtatggaggcctggagagaggggggagaagtagaagaagattgggccagtgacatttgggtcacacgctgactcagccgccacgtcagctaaaaccgctcttaatactgtatttagacctaatgtgacctggttttataagattagagatatgttatatcttacattctggttcaaagacgtttttaaaacatgacgataactcgataagagatctcaaagtgaactttttcctcctcctagtcatccttctaagactgcattcggtataggaagttcccaacccttctccctcgttttccgcgcgcatgcttttcaaactaataaacggtgtatttttacgaaagttgcttaataaaacatatcgatctattttttaaaaaaaattagctaatatttaattaatcacacgttaaacgctgctccattttatgtgctaggggatgagggttcccaacactccctcccgaacgtagcctaaatgtggtctacgactctacatagtgggcccccacaaattccatggcccatcaacttttggcccagaataggcaatggcccagtgatgctaccgatgaagcgatccgacgcgcccgcattccccacgctgctccctattccccattccccccacgcgacagtggagacgacaagtgaagcgatcgccacaagccgccatccgcagcgccgactccgacgccggacgccgggcgccgcgtcggcgccgagacgctcacgccggccggccatcacggtatagccaccaccgtgtccggcatccggccaggcggcgcaggcggcaggggaaggcaatgctctatatactttctctccatttctttcttatattttaatcagtgtaaaacagtagtaggatttgctgcgttctctgtgactgtgattatattaacggcgattgttttcttcagatttcagaaagcctgagtttggttggtattgttgcgcgaagataaacaggaaagaaagtgagatcagggaacaagtgtctaaggagaaagtggtatgccctattatatggctgaaaattatctcatctaatagttttattgtattcttagaactccaactgaaaccttagagactaacaatggttacgggcttacggcaagctatcaaggaattattagataaattaaggatacaatcatacaaactacggtgatttgctagttcaacataattattggtgatatgtttgaaataaattagggaatgatgtaatcatcggtaatttggatgtttatactaagggctttaagtgttcattgatacttcctccgtcccaatataagtgcaattttgcactattcacctccaatgtttgaccattcgttttatttaaaaaatttttatgattactatttttattgttattagatgataaaacatgaatagtactttatgtgtgactaactttttttaattttttcataaaattttcaaataagacggacggtcaaacgttagacacggattttcattgctgcacttattttgggacggatgtagtaattgttattatttagatgtttatactaagggttttcgtgttaatatttagaaatgtagacctagtttgtcacctaattatttgtttctcaaaaaggataattggtttatttttcactcgccttgccttatttttatcagtgtgaagacgaggcgagctcccttttgggagaagattcctttttaggcatatgcttccctacaaaacttccccaaagtgaacctggaggagattttttttttggcgagagagagagagtgggaggggcacctaccccttcaagcccacgaccacggccgccgcctcttcttgtgcacaaggggacgttgtgtgcttcgtgcacacgcatggccgacacgagaggctccacttcctctggcggcggcgatgacaggggcagagaaggccacgatgacttcacagggggcggccaatacaacaggtaccataggatccttgaggccgtgccgtcaccccttgttaggcgtgagaatggtgtgcatcatcagtaccccactggcctaatccaccacccgtcgtcgacaatgccggtggcgccatgctcctacgtgccccggtacaccatggtgccaacatccgccatgctcccgctgcagcaccaccaccgccaattgcagatatctcaaggttagtcttctcctaaccgccatatacatcttgttgcaccacgatcatctgcacttgttgaattcagcacgaagatattttccccatagggcttcgtctaggtcagtctagggtttattgtgcatgtggggcctatgttttttcatggttcctgctacctacatataagatccggtgtctctcttcccttgccactgttccttgcatgtcaggtagggtttctgtctcattagaatcacgcatgttcttgtgagcataaaaatcattctacagtttgagatccactgcaagtctgcaacaacatggtaactaggatcttcaatgtaattcatgtatgttatacatcatcttgcatttcttatggtcagtgacgacatatatagatagcaattatgtacagcatatatataccatcttgcatctcttgctctggtcagtgttactattcctgcttattctttaattccttatcgtcttgtgtccttatatgttatttcatcagttttgtttgatttttcttcagaaaacttccaagaccgagttccctccaataatgttgcagctccgcatcttcctagcaattttcaggatttgaggccaatgtgcaatgggccgccattcatgtcttatggccagactgcttccaatagaaatgttctttatcagaatctgacgccatactccttcaatgcatgggctagcaataacatgccg

SEQ ID NO: 10111 - DNA, 10054 bp, Oryza sativa
acaaaatggttggagctcagggcttggccacccctaaacctcatcattagtgcatggtacaacatgctttcctcgccatgaaactgccagtgttatatcctttgttttttccccggttctccatgatatatccatccgggtgggagatatacttcatactagtagtacggagtatgtacacgtattcgtcgtacagttcttttgcttttcttgtgcacagcatcgcatcgtgattcgcttgcgagctgctcatgtgaatttctttccgctttgttcgaggagaggacggacgaaatgtgtaatcgtgaaagaaaatcttctttccgcaaaagtaacattttcatatgtagtaggagtagtccagtgcagactgcagagcaattgtgagcacatttcttcttgtttttttggttgtgagctcgcacgatagagtgcaatgtattggaggagtagcagcaaagcaaaagcgagtggcagaagggagggatatatactcctacactgcgtgcactgatgctgctactgttgcacgcgtaggctatagcttagctgaggtcgtaggccgcaatttgaggcagtttgagcaaagtgtatcgtggcatgcagaaaccgaccgatccatggctttggcttttgacgaagggggtgtacggatggaacacgggaaggaaaaggctttggctcaccatcaaacacgcacgcgccgcgccgccactgtacccagcattcactccacagaaacgcatgctatgaacagtaccagactgtgtgactgtacgcctgtacgtatcaacatggagcaccataccccccacgttatacgttccgcatttgcagcttgagaggtgagaggacaactcgcattgtgtgcttctaaaaatccgctcggtacatccggcaacatactagtaggagcactgtattttggagcggtgtattactgtgctctcggaacttcttttttttaaggtaaggttggggatagcctgtgttgtttggtactagtactagtagctattttgctcgaatatcagaaaaaagggagagaaatactctgggttttatcttggtgtcactggtcaagaccagggtttacgattctgacgaaatccggtcggatttcgcgaaatttcgacattccgacgagggtcgaaagtagaaactgtctgagattttgaggagtttcatccaaattcaaatttgaattgataaaaaagaaaaaaaaaataaaatctttaaatactatgatattcatagaatctattgggatataaatattcggaaaaaaataatgtattgtgtgtatttactaaaacttacacaggaaagaaaagaataaaaaattaaaaaaggaaaacacctatagggccagttaatagttgatccaaattacagattactgatcaaaatttcgatgattttgattggaatttcaccaaaaccgaccagttttcgagaacttgtcagcaaacttagataatttgtattcaaattttggtttatgaaatttattcggaatttaccggttttccaccgaatttcatgaaattccgaattctgccgttacccgaaacgaaagggtctgtcaaaatcataaaccctggtcaagacacaagcaaaacattttgttgattatcgatcggttggattggtttgaaccggcacagcacagtacatttctgccgatgtgagaggcagaagtgttgtggttgggtggtgtggcacgcagcggcaattcgcatgcgaatagcgaggcgtggtggtgaaaaggcctgcgcggttgtaccatgattacaagggggagctcgtacctctcgtagctgctgcttttgattccctctgacggtgacgtcatgtgacacgtcctgtctcccgagtggcgtggcgtgggccccgcccaccgcaacattcccgggattctgtctcccgctgctcccgccaacccggccccaccctctcatcacacacagttgcagtcaccgttctcttcgtcgtcgtcgtctcgcaggctgagacacggcacgacagtctcatgcccgaccgaaaatcctcgcatcccgacggcgacggcgagccgttggatccaccatccgacggccacaaacgactgcagccgaaacagtgcccggccgtacgcacatcggagtactacagtatacagagaaaagtacgtgtactgtacacttggactggtacgaaaaaaagtttcacgcctgcactgcatagctggacctgttcgcctgtggttgtgtgtggttgccgatgcatgcaaaaatacaacgcccaaatgcattcggtgcagtcgtttgtggcgtgtggtcaagcttgcttggaaaacctgtctctctgtactgctcggtcaagcaggctccgtacgtacgtacatgctccagccagtacatgaggctgtactcctacatggaaggcgtcttcttttggcacatctatcgttgatcgatcggtcgaatccgtcgttcgacgccatggtgatgcacaagacgacgacgcgtgtgtgtgtttttgtgttgttatgtgatgtgatgggcctcgctgagactgagtgcgtctgtgtagtactacgtgtgtgcatgtgtggagcgagagctcgagcttcctgcccgagacgacgagatatggatcggaatcggattccatgcgccgcgcggcgagcgatccatccatcgacgcgacccaagaccgaagcgtgtgtgcgggtgtgtagccgcgtcctggttttttcggctacgtcttgtatgacatctgctctgctcagcctcagctgaatcagtactagctcagcacaagattcctgctgcctttgtcacaccctaaaaatcctaaatatataaattgttgtttaattgaaattattagaatttattttaaaagcctagaagagaagatctaattttaattaataaattccaatataaaatagggccagataaaatttcattaaatactttgcttaactctataattcctagatttttctgggatttatttgagctaaggaagtatttttaataaatagaattacatttaatgaataatttaaattgaaaaagatttttaaaatcctcttttggcttcggcccaaaaccttctctctccctctccccggcccaagccggcccagtccgcccgcagccgcccgcccgcgcgcgctcggccgctgacaggtgggtcccacctgtcggactcgtcgtcctcatcgcgccgtcgcccggccggaaccctagccgcgccgccgccgctattccaaatccagccgtccctttccgtttccggtgaaatcaattgaggggaaaggatccccatgatccactctacgttttcccttttggaaacatcgtctaaatcgctttggaaattcgcggattcgatctcgaatcggattcgtctctctctcccgaaccctaatctttccatcgcgtcgccggtcgccgtgggccttcgccgccgcgccctagtccctatttaagcacccccaggtcctccgctactcgtcgccaccctcgccttcgtctctcgtcaccggtagaaccctagcaccgtgtagcctcgcgccgccgtcgtcgccgccgctccagccgtgtgtcgccgtcgctccagtcgtcgccgtagctcggggaggtcaccgtcgtggtcgccgtctcgtcgccgtcctcgtccgccccttcgccgtcgttgtcaaccgccggagcaccgtcgccgccgtcgacctgatcgtctccgccgccttttcctcatcgccggcgccgtccgttgcccctccgccgctactttggtcaccggtgagttcgccgtgccgtccgctaccagtaggtgccctccgttcgcgatgtcgtgccgtcgttcgccggcgagcatgcacgcccgagccgccgccggtggtgacgtcaccaccgacgtcatcgtcgtcgttccccgtggcccggtcgtggaccgatggatcttggccgtccgttgtggataggatcgatctcggccgttcgtttccgtgagctgccgccgtgcacccgattcaccgcgaaccctagccgctgacgcaataattcccttttccttttcaaaaataattcattattgcgtcataattcaattaaaatctaaataaatgatttaatccgatttaatctttgaaaattcataactaattcatcttagctcggatttagttggttcaagtctctaattttttctaaaatagagatctacatgttaaaaatatccacattactgttcatgcttgtttatgtacttttttggtgtttttgctcttttctgtttagatcccgacgtttccggagagtttgttttcgcaggagaagaatttgaagagttccaaggccagcaaggcaagtcacacagatcccaaacaaccctttgagcatgttgatcccgtttaaagctattgtttctattcaactattgcatttattttcgaatgtcattgggtggaattgacctattgtttgttatagcccttttgttcttgattactttattccttgataccttgggttattataacttgactagttgggctatatatattggttcagctagatattagatatgattgcttagccatgcttagaaacattagcacactattgggttgacttatgactcactattatttaacaatggcttaatgatagttcacgatggtcaatcgtgattggttaattaattacttgccaactaaaacttgataatggtgggttgtgagcacatggttttgagagtcgtgctcatgacaattaaggaccggttcacgagtttcggttgtgaaacattaaccgtgccaaccacaagccagcgtgggcaacggctttaccttttgtatagcatggttcattgcggagcaccagactgagaagtggcggagataagcctacgggggtcgctggggagtccatgccttgtttataagggggtgattatgatctaggaaaggtgcgctgtggtggattgtgttgtgcgaggggtactgtcacagctcctttccgaggtaccgtggtggtattgaggcacatggtgacatgttgtggggctgtgtcttgtgggtacagtggtacacctctggctagagtaaaactattcgaatagccgtgcccgcggttatgggcgggtctaacaatgtctttcgtgattagtttcacacttctcaccataataaaagatgctataactggtaataatttgtttagctcttggtttggaatggtatattcctggtttggagatagatctgtacagccgggtatggttgttcaggatggttgggcctgagcagcatgggtgtgctgtttagtgttgattaaaattgatgattaattactctactgttttataattctcaaatgtttgctaaatgctgcttttgcaaatgacccctatattatgccattctttggtatccttgtgcacttgcatatttgctgcgtggcttgctgagtatgtcatatactcaccttgcaatcattcatcagagaaagagttctacagcgatgctgatggtgtggaggattaggtgtagccctggtcaagctgcctgtggagtggagtcgtctgcgccgtttatcttatttttccgctgcttagatctttattgattgagaggaactatctacctctgtaatgacattttattcgcttattaattagagtaataattgtactctattatcaatttattattgtgtgcctcggctgattcctggacgagggttcacacacatgtaagcgtttggaattttggatagaaattccgggcgtgacaagttagtatcagagccccttgaccctaggttatgccaaatggttacccatagaagccctctaaaaatattggaaaagtagaactgttctcctccctttctcttttaattaaaccaaactaatggcacatgcacttcataatctcttttagtggttctcattcaaaatttattccagtgttattagtactgtacatctattactgtactaatggctcatttaccagcaaatgttttacaacattgttttatttaatcttgctgcaatgaaataaatttagcatgttgattttataactttcttttatttcttttggaacctgttgttcaaaagtacaaaatttgtgaccttgtttccaactgtttcaacttatcttgcaagcttggtttactttatttacttaccttttactttgattttataactttattcaaattaatccaaaaacttgtgctattaattggataaatatcttaactccctcctttcacttgtctttagatgccgcgctacaagcctgagtacttgtttggtgttgagggatttgtccaggagttgcgtacgatgtcctttgccataggatttgggactgcccctttgtatgcccagattcctcatgatcgtcacgaagagaagtgccgagtcaaagtcaccttgaacagtaatagtgaagatatcccatcagtgatgttcgaagctggaggaggaaactacatccatgcatgtcaggaggtggcaaggatcgccataggagagctccgcgatcgctacagtgatcagttggccgacactgagtatcgctaccatcctcgccaaccccagggaagtgaccgtggcggctaccttgagactgaggagattgagaatgatgctaccacaaggcatttggttgagatgctgtgggctatggatgaaacccgcgcggaggttgtgctagcagctcaagatcgtgaagaccggaatcgtggtaagatttgcaggctagaggacaaggtggatcgtttggaaaaggaactagccgcgttgaagggagaagcaccaccgcagaaggccaggattcgtcttaccgcaaggaagagagctctatttgtccctcgctaccaattggcgccaaaggtccgtgtggtggagaaagaagttaccccagccctagcggatcctccggtcgtcaatgtaagtgatgatgaaggagaaaaattgaagcgcacccattcaaaggtcgagtggggagctactcaagatgatggagacgagccgaacgagccttcaatcaactccgatgcccggaagacctagagtgccttgtcaagccgttgtcttagattgttgtgttagtttgtttgtttaagtttggttgtgtgtgtctcgcatgtgatttacatcagtggtgggatgtaagtgcatgcgtttgtttgcttttgagtgttaggaagttggtgagtttggtggtgtgagagtctttagttttgtagtaatgaaactcagttaagatcaataaaagttaagttagtagaaaaattaattctctgtcctaagtagttttccccggtttctcttcttgtgatcctacccatgccagatggtgctcactcgcagcaacgggaatggccccaacatcaacaataacaacaacaacaacaatggagagaatcccacacttgcccaagtcctggctcaacaggcacagctgatgaacatgatgatgcagcaactccagaaccagcagaaccagggaaataaccatgcacctccccagaacaagttagcagaatttcttcgtgtgaggccgcccactttctctagcaccactaatcctgttgaagctggtgattggctgcatgccatagagaagaagttggatttgcttcagtgcattgatcaggagaaggtctcatttgcatcacaccagctgcatggccctgcctctgagtggtgggatcacttccgccttaacagaactactgctgaacctatcacttggcttgaattcaccgctgcgttccggaagacgcatataccatcgggagtggtgtctctcaagaagaaggaattcaggtcgctcacccagggatctcgcacggtcaccgagtatctgcacgagttcaatcgtctggctcgttatgctccggaagatgtgcgcactgatgaagagcgccaggagaggttcttggaaggacttaatgatgagctttcttacccactcatgactggggattatcatgatttccagaagttagtggataaggctattcgccaggaggacaagtacaaccgcatggagcagaagaaacgccggattgctcacttcaaggcacaacaggggaatagtcagaggccgcgtcttactttaggaccccagtccatgccacagggaggttcttcgtctgttgttcgtccgcagcatcagttcttcaacaacaatgctggcaacaacatccgcaatcaagctccacgccctgttgcagctccaacacagcaacagcctgccaagagggagcaaggcagcaagcccggggtgtgcttcaactgtggagacccaggacattactctgacaagtgtccgaagccccgacgcgtgaaggttgtccctgcccagaacaactctaccgcaccagcatcaaaggcccgtgtcaatcatgttgctgctgcagaagctcaaggtgctccagatgtgattttgggtacgttccttgtcaactcagttcctgcaacagtgcttttcgattctggtgctacacattcatttttatctatgagttttgcgggaaatcatgggatggaagtagaagatcttagacgtcctttgatggttagtaccccaagtaataattgtactctattatcaatttgttattgtgtgcctcggctgattcctggacgagggttcacacacatgtaagcgtttggaattttggatagaaattccgggcgtgacatgcctcgtaagcgttaccattgaatcgagattgttttcagccaccaggaggagcaactctaagagtaaggccattcatagtggacttatatgacattcagcctccaataaaaaatgaatattccttgccacatccttaaactgtgtagctttattaggttcgcgtagccaactttagctactcgttcctcgtctcaaggcgggacccacactagggcttgaggagagagaggggagaggggcgaggtagccgacggctcggaagaggaggggagagcgggggaggagaagaggaggctagtgccgccgtcatagtcatcactcgcgctcgacggggcggcgtcagcggcctgcagggagagacaaagattgggagaaaggaggaaggaaccatcgtcgtcgccaccgttcgaggatggatctagcgagctcaatgccgccctagtctaaagaggtggatatggcgagctcggcagtgccactatcgtcatccaccagagaggagagaaagacccagcaccgtctcctccaccgtagcgaccgaggtcaattcgtcctcgctcccgtgctgagtccacgccgtggacctcattgacccccgccgccagattcgcgccaccaacctcgcgcttccccggctcctgtgccgattccctccgtcgctcttgccgcgccgtcctctcgactgctgctgaagcatctagacccccggtgttaattttggtaattaatgacaagcactaattgtggactaaccgttgtctttgagctatacattttaagttaggtccacgtcatatgtgcgcatggatgattatcgatggattaaaattgacagcgcaaagcaaagggaaagaagacggtaaaactagcgctttaatttagaattgatcgaggtgtagggcgatctaatttgctagtttaattttagtttcgccgtactattaagaggggtaatgacctagcaaagagatgattttaattgccacattaggtcattgcattttcatttgtgctctctttttcattacacacacattcacttacaaattcactgggttcggcctgaccaggggcggtcagaccggccacatagtggcggtctgaccggcgtgccctggccggtcagaccggctacatagtggcggtctgaccgatggcactttcccggtcagaccggccccctaaaggccgagatggtgctgctcgggatggccgatacagagccgacggagccgtattcggtcagaccgagccgatggtggtctgatcgagccgaggccggtctgaccggccaccccatgccggtctgacccgccagaccgatgg

SEQ ID NO: 10112 - DNA, 68721 bp, Oryza sativa
gccaccgcccccgtgggaccaaaccaccctcctctctcccgccgccgccgcctccccggagatgcggcgagaggagggcaggtggagcaaatgcggtggcgatttggggtttggtgcgcgcgggcgaggtggtggtggaggcggaggcggaggggggaatggagctgtctggttggggccgggtggtggagaaggaagacgcagccctcctccgcttcgaaaattttgaattaacaaagggttggggttggaggcgataccggattaaaaatggagcgccagtgttgggggaaatgcaagcccagatggatcttgtccacttctcggttggttcgcgaacaaaagttttaaaatctcagttttaaatccatacagtttgatggtttcacggattcacgcaccaccagcagctgcgtttttttgaaagggtgaatttgagttttggaatttgtctgggtttctttgtgttttgtagtagtgggtttttaaaagtggttgagtagtatgtgccatcgagctcaacaaccgaatgaatgattaaactagttaacactaccggcgtgtacaattgggacggcaaatggtcataccatttgtttaacgttttatggggagaaaaatatcttgcacttgttggacacaacatggttactaggagtgcacgtttgcttgttgcatatccaacactccatttatgttcgtggttgttacgcttaatttgttgtttaagccttcaaggtaagatttagtttatctgtggcttgaatataactaaatgcaggggggggggggtttatataatcgcattgtaattttgcgtagacatataatagcacattcaaattagctcactagtagatttcctcgcagaatgaatgtgtataaaaacgaatacgtacagcaggacaaacgaaacagtgtgacacttgaaaaaagagactccattagtgtgcatggtgcgctcgtattttaatagggcggggccgtggcagcttggtgagttcatgattagcagtggttaagttggctaatcgcagaggaaaaaaatcgtagtattataatcaagtagagcgatcccatcccttataacattgtccgcccagtagttttctccttttcctgacgtatgcgtagtgattagataaagaatcacctaattaagcctctgaaaatataattttgctatctacattttttttgtcattttcaaagtatgggagaaccgtacaaagtactactacaaacgtatacatacgacgagtaccctgtattttcgggggacctgtgcgttgagacgggcccatcagttcggaatttgagagtcgagattacttgggtgtactagtacggttgggtcgtccaaatcaacgaaaagcacgtggcctccagcctccttgcgggtcccaccaccaagggatccttttgacgtggccgcgacctcctctctgtatcgttttccgctgtgtgtgccgcacccatacatacgggcatactacctcctgccacaatatgggctccatacatgtacccacgtatagctctacatactaataacatacatgtaccccgtagctgttcgtgtatcaggggaatggatacatgccacgtgagcattaaatctcttgtaagaaatactatgtatgcaaattcggaatttcactattagaagttactactaatattcccactatgcagttgttttttttaaccaaaaaaaatacaaaccaagaagccggcgagttaggttccttacggtgaaatttgtttagatggatttaagcactcgactttgtacgactatttatatttacggttagttatttttttaagtgatgtttgacatattagttgatagcgagacgcttgtatgaatatgagcatacgcgtgcttaccgtgttttgggaaaaaaaagtgaaaaatatatgccgtcgaaagagtgtttggtgatcgaagcctgtcatccactgctctagcacaacgcacggacaaagcgtccttgtcctgtaaactgtgtctaagcgaagagttttcagacagctctgcctccgctgctgctgtatagatgagcgaagttaaccggcagcaggaccaacggcctcaaccgacaggtatacaacttcccagcttcagcaacaccaccacggccggtgaaaccgaaacactagctagtgatcctgatccggacctaatttaaaggcagaaaaaatatcttagcagcaaatggaagagttaatcgagctttgcaactgaaaagctagtataacagtaatggggttaggggaaggcacgcagaggagacgtcccggagatcattgtaggggaccaataatgcacaaagcgtaatacaattatgccaccatcatcctggcctctccttcacagatgatggatggagctgcgtgatgtcgcgcctggccacatgcccggcgacgacgaccgatgattgtcgtgtgcgtgacccatgtggaggacctcgctacccccaatctctcttcagcctttcatcaccaaattaggctattagaatccggaataagcttagttaattattgattaggtagctagcttaatccaccatctggagtagtattattacaagtagtaggagtagacgagtagtacgaattgtgggattggtttgatgagcatatgtcgtcgtcgaggctggaggctggacgttacggtcgttgaaaggtaaagggcagttggtgtgcaggcaagtactggagaggttgcagtcagcattggagctaaaacgagtagtaggagcagaggaactgagcaaattttcagcttagctatagggtggcaagtgtcggtgcagggtacttgcggatagctgattttcagcagtaaacgcgaggatcgcaacacgcgaccgaccgaccccggccggcgtttcagtacaggcagccgagcgagaggcaaggcacaagacggacagggatagctgctgcttctgctgctgctgctactgcacatcggattccttcaattgagacgcatcaaccacctggtggtggtgttgtgcaccgcgccgcacgagcaacgcgacgtgggattctatagccccccgcgttgtgctcgggcttggcttggcgcggcgttgttgttacgggggattggattggatcgctcaactgcagccgcgagcgcggacggacgcggccgggaaaatccaacgggagatcgcgcggtccccgtttcatgggatcccgcgcgtggagttcgtaaattcttctcgcccgctccgcctggccgccgtgcgatttatggtgcggcgcccaaacgcgcccgagcagacgcgtccggccgcggtggggtacgatacgacgcgacgcgatgcccacacgggagcgccgctgctgcggctacgaggctgcaggaaacagcaaatgaagcaggggctcggctagcccttcacagtttataaacatcttaacaagtgcattatattcgagttgacacaattgaacggacctccaagttagcgttaagttagttacgatgaagtttgttattgtttcatgacagggcccttttcacctcgacgtgaataaccagcacgttttctactccgtattactgattataacgtactgatctaccacatacaacttgtatacatgttatgtttgattaaaccactggaactaagcctgctctcgtactcggctcacaatgccaaccgcgatggtgtttccctgagatcgtaggaacactcggcctagcgctttcaggtttgagaattcttccacgcatacctctttctccagcttcacctgaaagaaaacaccaagcgttacagagacaacaaacatgatatcagcaacaaaactaccccatccatctgctgtaagcttacctcgattacagcagtctgtctcgaggtgagaaatcgtggtatcttctttgaggctttgccggtcttctgctccagcaatgacagtattttcaccatgcttgcagacaccttcgcatgatggatgtggagctcaaactagaaacatgggtagcgaccatgtaaggtgtcgatattaggcctgaagttctctttaaaaaataaatgaagcatgaacagttgaagagatatgctcccctcttttgcttacctgcaagccaaccagtattggtacagtgatatctaggaccaaaatttttagctccaagcaagaagccacggacacaggataatctggatggcatatgactccgccaggcatgatatgactagggtcaatcccttgcaaaccaatagcgacattgtccccagctcttgctaaattgcaactagaggaattccgctcaatagttttcaccacagctaactccccaaaaggcatgacgaggatctgaaacaagagtaccatgaaatcaggaaactgcttgaacatcttacaggcaaaagcatagttatttaatcattgagcacaacattatttagacggaaaagtggtaggacaacgaaaacagtgcaaaagatatagttagaacacaagtgatgttcaaccatacataaatatctcgcactaaggcaatataagaaacaaagacaaatgtattgtagtatgtgcttagaataacagcagggtgataccttagaaccacttcgggttgctccaacctctactttaccaccaattgcaacttgccccagcttatgtgacgaaaagacatcacaaattggaaggcgcagtggctttgaaacatcacgagaaggaggcggtaatgtgtcaatggctttcaacaggcaatttccatcatacctgacaccatgcatcaattacgttggcgaacaaccaccaggttttaaggtcaagggatatgcaggtttaccatagggaatatctattaccatgatgatagtcgagtatctgaagctgttgtcattaagttctcattctccattgcactaattggaacccaggcaactgctgagtctttgtaaccgcatgaccgcagaaaagcaccaagctgtgatttgataaaattaaatcgctcttttgaatattccaccgagtccatcttgttaacaacaactatcaagttatccacgccaaagcttctaacaagctgcgagtgctcctttgtctgtccaatcccattgatgcccatacctgcttcaaatgatcctatagaagcgtcaataactaggatagctgcatcagattgtgttgctccagatatcatattaggaacaaaatctttgtggccaggggagtccagcaaaacaacatggtaatttttggtgtcaaagtatgcaacaccgacagtcattgtaatgccacgctccctttcatcagcactctcatccattgcccaagcatatgcaaatgatcctttcccctggaagaagaaacgttatatatgaacagctcccaagatgcataaaaggcacatactgagataacatcaatcattaaaataagagaaccttttctttagcttccttctcatatttatgcatttgcttttttgaaatcctccccagggcatgtaacaaacgaccacatagagttgatttcccagaatcgacatggccaacctagcatgtttctggtttgagttattcataaagataggcagatagaaggcaaacaagtaataagcaaaatgatggatacatcaaatatatcgtgtatatatagatatgtagttgcttacaatagcaagatttaattgtctagggatgccttcatcttcatgctggagcatccatggttctggcttgtacagggatgaagaaactggctttttaatattggctttacttttttgtgacttcctctccaaactcaaatgctgtagctcatggtccaagcaaagtgtttcattttgactaccaacagaaacactctcactactttcaccgaattcattcgactttacaggcaaatttgagtctgcagttgtatccttctcaggtgtagaactatcattatccatcaccctcttttcagtgacatggggagcatctgtgtcaactgatgtgaatcaagttactatggaactatagcacgcactgcacaaccaaaattattcaagtgtggaaaagaaactttgtttagaaaactatcttagcataacctttcattggtaccaaccacataaattttgaaaataacaatatctataacaaggaacagttcaaatgttcaagtgtgttggcacacagtagttctctatctgaccagactaactcattcagcataaactctaatcaaactaattaactgaaaaggttccacaaagactcgcgcatagaaaagaaaataaaggtttcacatatagatgttaatgttaagttgttaagatgcatccttttcactagtctgagttagtctaactacatgggagtgggggaatgcagagataataccttttctaaaacttctcgacgattttagtcctgtagcgaccacgtcatccggagatggtgtatcaaacttgaaaggcactgtgaacatgaagatatgcagtcatattacagatttctccatcaggaagtctaataaataaatgaaacataagttcaacatatggatctcccattggaaaaacacgggtcaactgaatgcttaccctaattcaggggaagaactgaacattcataagtaggttaaaatttacactgactatcttcatatttcaaagttcaggtaaaccaaattatataaaaccctgtaaactcccaagacctgtaagctacctcccacatatgtgcttcagtttgtttgtttgcagaaggaccatggcaggctagctaagcttatagttcagacagtcacttggttttgaaacaggaaaattttacacccaaaatggtagtcacaccagatgcacaatgaggcaattgagagttaagctatgcaaatgactagcatatatagaatcatacaacattaaatatctggtttatatatagcagcaagtacatataactacaagaatttggataatgccataaattaaacaaatcaaattaccaaaagcgcttgatgtacaaatgcagtgtacctatgttaatgtggcgttctttacgggtcatgtatgtcttatgcagcgcatccaacgtagctcgtgtacttcctgttgcatttctgctagctttaaagccaccagaaagaacaacgtcttttgacttggcactggatggtgagaaaagagttcttgccagtacagataccgcataatgcttgtctctccgtttagctggatgtcatgatagaaaaataaataaattaacaggctagaaaacataaatatatctaatcaaagccataagtcaacagtgcaacaaaaaactaaccataccagggaatggaacaacaaggaatacactatacctctgccatcaacttcaagggcattattgaaatacagcgagaaatatcgaagaacaccgcattgctcacatgattttttttttgcatcatttccgtgttcgcaaatggtgcattgccaaatgccaggatttcttgatggctcctgaggatcagaccggttatctaattcaggaataaactagagaggagttagtaccaagcaaaccctatctagatgttttcatgaaatacttgtgattctgagaaaaaaaaagtgagcaccaagtaaattccgtaaatccaaacacccatcaatgaaggcaaaggtagcaaaagcactctagtagtaactcaccatctcttatgatgagatcatcaactttactgtctctaggattgccaccagaccacacgcaccgtcagaatctgggttgatatcaaccatgttaaactctgcctgattatgcaacagaagccctaccataatatgcaattccatcattcaagcagtcaaaaacagatctgctattgctatatgagccagtcaatcagaactcagaactatgaattttctcaatatatatatagagaaggaaactccattgggcattaaccagcaggcaacattaaaagagtaatgggggcgcagatagcaagcactggaaactcccctacctataccattcaccaccaaacaagacaaaatactaatagggctcatgaagctcaacatggagaagaaaccaaattcagagcgtttctgaatcggaatcgcgataagaggactccgcccgagatcctccgccgccgctccttccccccgacctcctccgagcagcaagctcccgccgccggcagtcacagtctcagagtcccaagctccacactaggatcgacgcatcgcgtgcagtaatagagatgagagagccatcagagacgagcgcgcttacctgattccaaccgaggatactccaggccaaagagagcgaccccgccgccgctctcgcgcacccaaccgcggccgccggcgacctacccgattgcgcccgcgacgacgagcaggggagaagggggaagacgacggggagcgattgcctctcttctcgtcgcctctgcagcttctgttcatctcgatgccttccatggaattttttttatttataatttttcttattaaaagttttacaaaaataattttccattttgaaaattgacggaaatagtcgcctaccgccctcgggcggcgaaaatgacgtggcagacggccgctcgctctcgggcgacggccgtcaacgaaatttgcaggcggcccccttgccgccctccgcgagggcgatttttgcctcccccctataaagcccagcccctcccctatgaaatttcattatattcactaaaaatccaaaaaaaacgaaagagagagaggggagggcagcagaaggggagcggcgaagccctgctggttcgctcacttcatcacaggtatgctcccatacatcttttgcatttgtactaatatattacgtttgagtacatatgttgcgttttagttttagttccatatattttagcagatctgtagcacacagcacatatgtgtagatccagagcatagaatataatagtatgaattgagacatagacagtagtgttaattgtaagatgtagttttgtttgatctggagaatgtaacctacttttagaaatttagagaacaatattgtagagaatgtaacttagggcgtagtacagaaatgcgaggttaacgcagttattgttttcatcaggcacaatgtcaagtaaggtcacatttcagatagttcacggtgaaggaaatattagatttggtccagatggtgttgatctgtcagattttgtaatgacatctaagggcatcgataggcctgcggagagaacatttcagtcaatttatagttggttgttgagaggatttagaatagaccaagaagtctacacaatgtcagtatctgttgtagtgagtcgtgcaatagaaggttatttttgggaactaatgccgatggacagcactgctgcttggagacggtatgtggaaatggcttttgaacggtcatggcccctcgttatatttgtgtcggtacaagagaaagatacaaatgtttcaatgcaaaccgaagatgtggagggtcctagcaatgcaggggatgttgttggaccatcgatgcaaaatgaggaaaatcaaccaagggaggagcaggccatgggcatggcggatgagggggagagagtcggtataattgttgatgaaatggagagggaagattcggataatgagcaagcggaggacgacgcatcatccgatgaggaaggtgatgtaatggccactgattgggcaaatgaggacttctctggtcttgttatatcagagggtgatcatgtaccctgggagtataaggagtacgaggtaattgagggtgcaaggtatgctcataaggatgagatgaaggaggcggtgaagcattgggcagtttcattgcagagagagtttagggtggtcaagtcaacaaattatgtgtatgaagtgaggtgcatgaaggaagattgtccgtggcgtgtccatgcatataagggtaaatggaatgattattggaaagttagcattgtgaccgagcacaagtgctacttacaaggggtggagaagtatcaccgaaacatcacttcagcttttgtggcaagtgagatgtacagcagtgttgttggtaacattggctttgaaccaaaatcaattattaggcacatcgagaacaaattcaagtacaccataagctatgcaaaggcctggagagccaaacaaaagatcattgagatgaggtatggcacatttgaagcttcttatgataatttgcctcgtttgttagccaccattgcccagaggaataataatacttactatgacctacatacatttacatcggttgaagatagaacaaagagtgtgctgcaaagagcctttttctcattgggtgcttgcatcaatgcttttgtgcattgtcgacctgttctatgcatagatggaacttttatgacaggtaaataccgaggtcagatattgacagcaattgggtgtaatgggaacaaccaggttctacctatggcttttgcatttgtagagagtgagaacactgaaagctggtactggttcctagagagagtgcacattgcagtggtgcgtatgaggcccaacgtttgccttatacatgatcgtcatgcgggtatgttgcgggctattgactacttgcagaacggttgggatgagaagggacttccagctaagtggcctgatgttcggagtcggtggtgcatgcgtcacatgggtgcaaatttctacaagcaattcaagaacaagcatcttatggagctctttaagaggctctgtgcacagaaccaagagaagaaatttaatgagttgtgggacaagttggatgagttgacaacgaagcaaacagatgagcaatctcgcagaccacaagttgaaggtgacgagcctcccatacctcttggtgcattacatgatgacccaccaacaatgagaaggaggtcagggtcggccatcagaaatttctctcagtggattgagaatgagcctaaggagaagtgggctctattgttcgacaccgatggatctcggtatggcataatgacaaccaatttggcagaggtgtacaactgggtaatgcgaggagttcgggtacttccattggttgctattgttgaattcatccttcacggcacgcaagcctactttagggatcgatacaagaaaattggtccgtccatggccgataacaacatagtgtttggcaacgtagtgacaaagtacatggaagataaaatcaaaaaggcacggagacatagagttgttgctcaaggcacacaagtgcatcggtatgaaataatgtgtgttgataggagcaggcgtggtatctatcgcaagcaagccgtgcaggaatgtgtcttgaaggcggatggtggatgtacctgcagttgtatgaagccgaagcttcatcaccttccttgctcacacgttcttgctgctgccggtgattgtggcatatctcccaatgtgtacgtctcaaattatttcaggaaagaagcaatctttcatacatggagtgaggagatatatgggttcgggatctcaggatcttacacaacgctgagtgcccaagttttttatattccagatccatctaagtttagggtgaaaaagggtcgacgccaaactagacgcatcagaaatgatatggatgagtcagaagcaggtgggaggactttacgctgcagcaagtgtgatctgcgcggccatacttacaagaaatgcccgaagaatgcagaagttccaagcggcgcagatgctagtccatctggacaggcaagtgatggtaggcgaccacctggtgaaggaacaacaagcagacgcgcaaggccaaggcgtcgtcgcgcagcaggcgattccatggtgtaacaatgctttcgatttaggaaataaaatgctgttgtgatgtaatgagtgttcggactaaatacttctatcgtgtaatttcaattcaatgttgttgtaatgagtacctccgactattgttgtactagtagtattgcgaattattcggtgttgtatcataatgttatcgtgatgagtgttcggagtaaacacttttgtttgtttgtactcttgtttaatatgtgttagtaattcgcttagttcaacatttattacttatgttgaactaattatttatatgtttctgatcaacctatttgatgcaggtatggcgtacgacacaccggcgctgttgaaccgtgggattgacaggaaccaccgctcgttcctgtcagcagtcgagggtgcacagctcggcaccttccgtccacgcacgtcgcgcgagtggttgcgtgtcgacccccgtcacgttccttggtacgcgtatgttcacatttcaactcaactttgctttgtgttatacttatgtttgaagtttgctctatacaggttgcgtgcggcaggccttctaccactttgtaggcttgttgaggcggcggcggacgaccgtgacccagcgaagcggtgggatgcagaccggtcactccttgccgctcttgtagaccgctggagacctgagacgcacacgttccaccttccctgtggggagatggctccgacactgcaggacgtgtcgtacctgctcgggctaccgctggcgggagcaccagttggtcccgtcgacggtgtttttgggtggaaggaggatatcactgcgcgcttctagcaggtgatgcgccttccacacctaggaccgaccaccacccttcctccgtactctacagtcgggcctagcaaggcttggttgctccagttcactgtaagtaaataagttgttattatcatacgtgcttatttgcgaccggatcagtgtttgtgactaacatttcattcttaactgtaggcggaccttctacaccctgacgctgatgattactcggtccgacgctcccttgaggcgtacctgttgtggttgttcgggtgggtgatgttcactagcacccacgggcacgctgtggacttccggctggtccactacgcacggtccatcgcggatgctcagccacaggacgtgccgcagtggagctggggttctgccgtgctagcagccacgtaccgtgccctctgtgaggcgtgcacgaagactgacgcgggagcgatcatcgctggctgccctatgttgcttcagctttgggcagccgagaggtttgccataggtcgaccagtggtggacagcgcaccctatggggttggtcgcagcgcgcagtggccagaggacggtcccacgatggggacttactggtgtcgacgtggggttagtgcaacttcgctgcgttataagtttatcagtcgtcttttttttttcttcacataacatgtctaattccgatcatgtttattgcagcgtcgttacgctcacgtccaggtgagacgtggttacccggacttcgtgttcgagtttgaccgtctccagccgagcgacgtcatctgggagccgtacacagaagaggccgtcgctgcgagagcaccgctaggactttcgtccttgtgcacacgcgaccaggcttactggctcaccatcctgccgatggtgttcgacattttcgttgagcctcactgcccgcagcgtgtgatgagacagttcggacttaggcaggtgtttcccggcaacgtgcagccgaccgtcccccctgccgaccactcgtgagttcggattgttcatttctaaatttttatgataattacatcatcgagccatacaatttacctctcttcacaggttgactcgacggggacagctagcaggcgcactttgggctccacgtgtacagcagtacgttgacgactgggtgttagctacagaggaggtgatcaacgagctcttcccacacacggaggagaactaccgtgactaccttcgttggtaccttcctcgcactcgtgcgcgtgtgaccttcactccagacgccccagagccgcacgttgccgctgtcacggacgcgtatcccacgcaccgtgaccgagactacttcgtggcggtacatccaatttgtattacttcttacaattatttcatttatcttgcataatataggacaactactgaattttttatttccatcttgcataggctgatgccgcacgggatatcagtgccgatatcaccgcagtccaagtgaggttgaacagaggtttgcacttgactgacgttgagcagaggtcgaccttcgaccggatgcaggagaagatgcgtgcggtcatgcgcgtcttctcctgtcgcagcgccgtggacgtcgtacctccagctggtccggtacacccacggcctcgcggtcctaccgtcggagcaggacctcgtttgtcttcgagcgcccctagcttcggagcagtgcgacctacagcaccggtttcgcacggtacagttcagcccagatattagttcatttttgtttcagcttttgcacgaatgtgtcaccatgttttaactgcacgtttcctcatcgcaggacctcgtatgccttcgagcgcgttcgcaggcacgaccggcgcttccgcgagctccgcaggggcgttcgccacctcttcaggcgcgttcgccagctcttcctctcacggagcgtcgatccctcgcccacacggtactttactttttattaatactgttaaatacctatacgaaactgatggtccttgtccagcaggatttgcagccgggatcttcggtactggggcctcttcgtctcacgccggtaggactggtcctactagccagttctacgacgacgacttgcacggtgcagaccaccaggacgtactaggctcctctcagcttggaggagctccagaggcgcacactcaggagcagccagaggtcacacctgtacaggcaggacgggttggccgtgccgtacccccggaccgactcacgtactcccacgggcacattagggcgcagggtaggagggacaggggtaagaggcctcgtcagtagtgttctacctcttcagtccttatgtgaccgtttcttttggcttacaaacttgtaaagcagtactacttttgctattactactgcagtactacttgtgtttgtctcgtctacatagttcttttcattcatatggtgctagaacaacttatgctcacgacaacacactttcggcgctgcacggtagtgtcagatccagtagcgcgcacagtccacaacagcacacatgaaaagcggcagctcgagttatcactatcaactttcggcgctgcctgtttacataaagtgaatcacgcccacgcgtgatcgtcttgtcacatctaatgaataatgtatctcattgagttcacatatattgcagtgaaaacgacgctatataattgacaatctgaaggcaacctcttcatatcttctttcccactagcacacaacacacgaaaatggaagcctattcattggtaatacgtaatctagatttgagattatgtagaacattcttcactacaattttacattttggcagcaaaccaaatatgatcaaatgcaattttaccttaccaaatatttggtcgtgaagaaaaatttggcactaacaatccaaatatgccctaaaaattaataaaatatttgtacggtaacaaaatatttgtacggtaacaatccaaatatgccctaaaaaataataaaattgtattttaccagtcttggagattttaatcttgtatagttttcaatataaaaagatttgataactattgatatttataaaaaatatagagcacagtacaaaatcgcccttgcggagggcggcaagggggccgcctgcaaaattccatgccccctcgccgcccatttgcaggcggccccccgcacagtacaaaatcgccctcgcggagggcggcaagggggccgcctgcaaatttcgttgacggccgtcgcccgagagcgaacggccgtctgccacgtcattttcgccgccctctgggagggcgatttttaaaaatcgccttcccaaagggcggtaggcgactacttccgtcaattttcaaaatagaaaattatttttgtaaaacttttaataaaaaaaattaaaaataaaaaaaattcccgctgcacgcctgcaactgcaacggcaaccgtgcgtgctcccatccacccatgacagcgtgcgtacgtgctcgtctcacaccgaacaactctccatgtactatgcgactaccgttcgagtaaacccccctcgtcctacttacatgcgcgaggccgttgcgaatcaatcaacactggcgtcaatcaacaccaaacaattcgttcgatttcttagtttagtttagtttctcgcttaatactctattctaaagcacaagggaagcagccaggaaatggattagtgatgaccaaacggacaatcaacagtaacgctgttggctgctgacgactattttagttgacatgtccatacataaatacacataatccagagagatggccagctccgtgaccagcaaagagacaaggctggggtctgataaaagaagccctacctgagcttgacctccctgtctcgagccccccatactgcatacctcatgccatactctaatcagtataatccaggcattaatgagatgcatcagctttataatacaaagctaatgacatgccaatacatgctgccaaccttgcattcctccagcctacatatgtgtccatcgaaagatacaccattttggaattgccttctctctgcatttaggcacgcaccaaatccttgtagccatgggccatcactcacctgccctgcttcatgttagctcagatttcagcctctcaggaccatttcttgtgatgcatatatactaacttgttgtctcatatagcactagttacatgttcatggatcatatgtaataaactgccatcatcaaggatcagcctgtatatgctcatctctatcaatgctagaagtctacgattactaacaaaattagcactgcaacactcactgacagacaacatcaaatcaagctcctactatctgacgacaccatgctgtccatgcagctaggatggaggagataagccaacattcagacaccatcaccatgcgtgatgccgtgatgagaagaaaagtttgagcagctagctagcatgggtcatcagatcatgctgttagagcagacagcattggtcaatagtcagaattttgggtgttttcttgggtgttgggtcctcatgaccttcacctttgtcagatttagcagggatctaatgagcaaaaaattagtaacaaagaagcctacagcaagtagccaaatgttgctgtcccctctgcccctacctaataagcacaactactgtacactccaaacatctgctcactcacatgcatgtgacgtttatggtccacaaactacacatgattatggcaatagtgccctatgtctcggcatgttttgcataatggagtatggatctcaatcatgctaatggctagcttagccttttgtgaactaacctccttgcaagtagtattattcaggatggggcctggtttgcaaatatgttagagtgcagacaccatggcccatttctgtcgctgcaaccttcgccaatttatatataaacctcgaggagacatgtagagggagcattcgcttcatcagttcatcttctctccatctccatttccagtagttagttgtcaccagtcatcagcacaaccatggttattgatcagaagctactctgcttagtgtttgtctcaggagtactcgtcctagcaaatcttgcagatgtctcttctgctgctgcttcttcactgagcaggcagcaagatcaagtggctcgagttcttggtcgcagaggcagagaactgataggagaaggcttgtcaggacaccaataccggcatgaaggcaagcacaaggagcaacatgaggtgagttcattattcatatgttcataaaatgcaaaactgaatttttatgtgttttcttgtgcctgcctctgctgcataatctttttttaatgtcagtgaatagcacattgtgcactaccatcttcagctagaaatgcagatgaaaaacaagaaataattgtcaagctcatggtgtgtccatgtccaggtagtggctatggaggcgacgacgaaggagactgcagagacgaaggcaggttgggtggatgatgatgagggcgcaagagaagggctgatcgacagcgctgattacagcggggtggcgatgcactctccgtctccacccaaacgcaagcacccaaagaaaccataggctgtcagcttctctgtttgtccgtgtataatcttcttgtctagcttagttagtaggagtactactagtactaagtactctcttggactgttaatttcgtcatgaaattacatgtacccttcttcgcaagagatcgatcgatgttctgctgctgcttcttctgtatgtgttgccattgctctgttcatgcattgctgttagctagctgcagagatgacacagccagggtttaagttttcgacgaaaaccaaccaaaaaccgcaaaatttagatgttttgacgagggatgaaactaagggtgcaagtggctacccgcgaaaacctatttataggctaaactaacccgcgaactcacttattttgacctataaatgggttcgtgggtgacccacttgcacccctagatgaaagaagattatgagtgaaatttcgaatggttttctagaattcaaatttgaaacagtaaaattcaaccaaaatttgatcgaaatttggtgaaaaatgtcattccgctacggattcaggtcaggcactcgatcagaaaggtgaaccctgaccacagctgagaactaacaccagtccatgatggtcgagtgtcaactgtcaaattatattctccaagtctccaatagtgacgttttcatcgcaactacaggtttagcccgggataaaaaacaaggaaacatttttatttcgagggaaggacgcaggactgaagaaacttaaaagtgtccctgatgtgtttcatcatccgttctgtcactcacaaatggactcaaaatacagacccagatcaagtgtggtgttcaaccaaaatgttaactggcgaatggaaggtggcgtggttttctagaaactgcagatttgtacagaccaatccccagacagaagaaatacaagatcaagactggtgggcagcaaacaaattttgctgggatttatttgccccgattcatcgtccaagttcttcataccttcagggccaacttcttagcagcaagaacctccgcttcgagggttggctcccaaagaattgtggtttcagccaatagcgctgtcacgacgtacgggtccatgtttgatgccgggcgacggtcttccaagtagcctatcagcaaggagatttagcattgtaagggcaagttaataagattgagttgaaaaatgcaaatactaagttgcacatttgtgaattgtgaaaacaacattacaagacatgcatttgctgatgttgtgttctttcatagtttcagaaaaaaaaatgtttgtattttcaactcaaacctgaaatatttggagcgtaacaacgaagtattgaattacggaagtacaaatgagcaataggggcagttactacatgatgtgcttatttgctataaaaactatgttactctggttttggagggctcaattggttgcttaatataccagtggatgttagtgttttctgaatcccaaacacaacaatttcaggggacatggaagaacatataccttttcccttcgcctcggtgtctcgccccacccgaatagagcatccacggtttgccacaccctttaatgaaatgtttcgttagtatagcttaaaaatagaaattaaaacataaagatataaaaaggccgctgaaaccatacccatgagaaattgtcaatgctagctgtctcgtgtaaacctgtcaacctcctttcatttccttcaccatatgcacttatatgcaagtcatggcgaagtgataggtttaggattgccttcttgatcacctcaaatcctccatcttcacgcatactcttggtgctacatttgcaagacaatcagtatatttcaattgtttgagaaacaaagaacattcattcagtcaatcgaagtgaatacaggcttattctggatttgtattcaataacaactagtatggtggcccgcgcaaactgcgcggctagctaccaatattccttatttctattccaaattttcatttttttttctaaattgtatttttatatagattgtaaactcttatttcaatattttttattttttatttttataaattaaggttataaattgtatttcaatatagactcaaacttctacttatattttctttttttaattccaaagtttagttagttctaaattgtatactgatatggagttttttctttcaatattcctttttttaatttcgaatttaagctatttaaaattgtatttctatatggactctattattatttttctctgattccgtatttcaattagttataaattgtacaccagtatgaactctagccttctcttccaatattcattattttttaattatctatgtaaattgtttttctatatggacttcgattaatatgagaatttctaggccatgagagcaaacgcggagtccaattttcttaggctgtgtttagatccaggggtgaaaatttttgccatgtcacatcggatatactgacatacatttgaagtattaaacgtagtctaataacaaaacaaattacagaatccgcctgtaaaatgcgagacgaatttattaagcctaaataatccgtcattagcaaatgtttactctagcaccacattgtcaaatcatgtagcaattaggcttaaaagattcgtctcgcaaattagtcgcaatctgtgcaattagttattttttcgcctatatttaatacttcataatatacttcatacaggtgttaaaacgttcgatgtgacagagtgaaataacttgtcagcggatctaaacatgcccttattacttaaataagttaatgcattagttcttaatccaattggttaaattagaaataaactttgtgcatgtggtttgtttgatcgtttccatctcaagttttttttactccgattcctatagttactttaagcttccgtaaaaaaaagatttatattagttgtataaccattatggccgtgtttagttgtttaggtgtaaaaattttgaagtatacggacacacatttgaagtactaaacgtagactaataacaaaacaaattactgaatccgcctgtaaactgcgagacgaatttattaagccttattaatctgtcattagcaaatgtttactatagcatcacattatcaaatcatggcataattaggctcaaaagattcgtctcgcaattgacatgcaaactgtgcaattggtttttttcgtccatatataatgctccatacatgtgtccaaacatttgatgtaacgtttttcgccaaaattttttggaatctaaacacaccctatattaaatctaaactgttataatctggatctactatgactcaatggttattttttttctctttttcttgattaacattggaatttctatttttcttgtctgttttcactttttctatctttcttgtccgtttctattttttcttttttgtccgtttccaactttttttttgtctgtttacaccacacccaatctttgtttttttgtccatttacacaaaacctaatcctaatacccttctatttttccttttttcttgtgcatgtggtttgtttggtcatttccatctcaagctttttttacttcgattcctatagttactttaagcttccgtaaaaaaagatttatattagttatataactattatggccgtgtttagttgtttaggtgtaaaaattttgaagtatatgaacacacatttgaaggaattaaacgtagtccaataataaaacaaattacagatgctgccaggaaactacgagacgaatttattaagcctaattaatctgttattagcaaatgtttactgtagcatcatattgtaaaatcatggcgtaattaggctcaaaagattcgtctcgcaatttgcatgcaaactgtgcaattggtttttttttcgttcacatttattgctccatacatgtgtccaaacatttgatgtgatgtttttagaaaaaaaattggaatccaaacacaccctatattaaatctaaactgttataatctggatctactatgacccaatggttattttttttctctttttcttgattaacattggaatttctttttttttgtcccttttcacttttttctctctttcttgtccgattggatttttttttgtccgtttccaactttttttttccgtttccaactttttttgtccgtttactctttgtttttttttccgttaacacaaaacctaatcctaatacccttctatttttctttttttcttattttctttcgattaacgggggattttctagaccgtgagagcaaacgtggaggcttctttttctattactttatagatataatagatttaacacctacgaacacttgatattcggtccgtatttggattggtattttaggtcttacacatatgttttctttcctatcaaattcccaaggaatttatttttgtctctgaataggcattagttcggtcaacaaagttgttctctcaaaggaaaaatgtcagcaaagctgtgttaagtgttctaagctttgttcttatgctgcaggatactttaacatcagaagaagataatgaaacctgtagtttgtgtggcacccagctccattccagtctccctgtcagtacattatatatgttcagtctcctttaacgtttgattcgctttaaagttggggacaatttactaggacatacctgaattggtttggggtcaagggtaagcactacaccagcctgctccgttattctctgattacagtgagcaaacgataattagaagtgcttttactgatgcagaaattgatataagcaaaagtatagccattcataggatgcaacattctgatgttttgaacaaaacaaagatgatggctttcaacaagcgatttgtaagaatgtcaaggtggatcacaaaatgtgcacatgtaaacgtcttggcaataatatgcatgcagcttgatttttaaaccatggtttgaaaattaagagagaaaaccaaaatttcattatgtagggaaatattttattattattatttgaaccaaaatttcattatgtagggaaatattttattattatttgaaatacctcaagaatatatcttgaaatccatatgtggtctccagcttcaataccgacactaggtccaacctggtactcccactgcatgaataaggattgtgaagtttcacttgttaaacactaggatttgttcttcatagaagttaaaacatatccactgattcagaaaactaattgacaaataacaacacacatacctgaccaggcatgacctctccatttgttccactaatgttaattccagcataaagacatgccttgtagtgagcatctgatatgtcacggccaaacgatttgtccgatcctacagcgcagtagtatggaccctgtaatatccagcatgatagtgttttattaagcatacacaacacatggacttaaaccatccttatctttattattatctgatcaacaaagctccattcttgttcagtataatacctggggcccagggtagcctccaacgggccagccaagaggccagtttacgtctctctggagcaaagtgtactcctgttctattccaaacctagaaaaatagtgcatagaaaatgtctcaacttcacatgtaaacaaaagtagatggaaaaaccatgttttctattgtaatttatagcacaaaagtgcttgatgtttagttaccatggcacttggctgacaacctttggatcactgaatacttgtgcagccctgttacgtttgttagtagggatgggttccccagctggtgtgtaggtatcacacataacctgaaacaacagattttgtatcagctagcatgcgatttttcacatgcgccactaaccattgcacagctaatcttttatgtgcaggttagtatgaaaagcacatttgaaaaggataaaacattaaggagaagggatggtaccaatatgttgttgccacctcgaaatgggtccttgaatatagcctgtgggctgaaatcaggggggacagcgcaagagaagagacagaattagaaatctagaatgctttactgaagaatcacatgtactgcaatattttttcttactataagatgacttcactatcttctcctggagcttgccctgtgcttgatccatcgtagttccattttggtagctccgaggggtcctccactggttttgatattgtctgaaatacaggcattcgatttttctttcaagggccaaagaggtagaaagtaaataacgaaaggaggcgctgtgtacactgctaatcccctaaaaacgcaacttctcttcctaaagacagcactggtatctttatccaagaacaagaacatttgtgataatgatgataccaagtgcatacccttgatttgcttctgaggtcaattccagttcctccaaccctgcagaatgtggcaaaaaggattgcagattcgttaatatattgctgctttcaccaggaaaacgcatcggggattcgcactcctgaagtattattattcaagtgtgggaactgaaaagcagctagtgtgagtcaccaccagccaccaccatgcttgagaaacttttatctattttaaggcaaaacttgtactctactaatgtttgctcacagctaatcctatgattcatatctcaaccatccaattccctaatcgaacggtgcagtgcaaaacctacaaactgtagcagtagtactaaattggtgctagtaaaaagtgcggatttggcttatctgaaatctgaaagtctgaaactgctgctactgctactgttgtgtgggtcaaaccaagaacagaagcgtcactgtgagatgcagcatttgcagtaccagatgtactcggcgatgatcttgtcggtgaagggggtggtgtccatgttgagcagctgctccatccgcgtcaccaccccggtggtctccgtgctcacggccatcaccctgaaccccgacgtgccgcgcccggtcctcctgactccccacaccctcccccccgccgccgccgcagccgccgccggcctcgcccgcacggccccgacctggcactgcatcgccggcaccaccgcctgcgccattttcaccccctacagataatcaccaactcactcaacctgcatcaaacaaacaacattgtcatcacaaaaacaaacaaacccaccaaaacacaaaatgcaggcattgcacggactcaccggaatgcagcgacgaggaggaggaggagaggaggcgacgtcgatggaatttttaatgcgaggaggtgcataaatatttttagtggcgggcgggaacagcagcatcttggcttttgctgaggggatagggctccccgcggtttgggtggacgagatttctggcccttgcgaccatcggaggcaaccagcacacaatccaagcgtccccaggataaaattttccccaaaattttttcttcttcgatttatcaaatcttttctcttctcctggatatggaagatgcggctctccttgtcacgtctacctccgatcgcagcagcgacccatttattgttgtttatgtgcagcgttcattgacctgcaaattgtacatttagtatttgtttgttatttataatcttgggggggggggggggggatgcagccagaaattcagaaaatacaagactgtcactgaggttatgactgaccctcagatggtgcaataattgggggaggagattagcggtttagaaacgtcatctctttgcaggtgcagcgccaacgggttgatttggggtccagaggtcatagattggattccatctggtcggtggcaacaaattgtgtttgtttgcttatcaacttgcagttttgtagcagtagatcaggtggtcatgtgagagtgtgagacttgagcagagagattctgtggagctttgcagcatgagcaagtgattcattttttatcattagtcatatcatgacaatagtgaactcaagttgtaactaatcagaactgtaagaccacaagacaaaagaccatgatagttgagttaaaatctaatcagaattgtggatgattgaggtggggcaaatgtttccagacagattttctagtcagggagaaatgatacacctagctgatcactgaactttatctgtcaggagggaattctccaaactccagaagttaaatttcatgcttcctgtgcaatgctagcattcccctcgtgtactgattcctagtcgttctatacatctgaagcaacatttcaaagctctcacacgcgtcttcgtacgctacgcacctacaaaatttcaacttgaagtctgtaaattcagttaaggattgctcaaggttgcagctgactgcctcaagaagctcttcaagggctcccaaaatgttgcagaaatcgacttggtcatttgtgcctccgtgttgcggcagatgccggagccaacacatccattggaagggctcatcgtttttctctctcactgcgagcccaatgcacatcaatgcctccttgaagttgcagctcctgtcgattttcttaattatctcatcaaaaaatgatctttggttgcttctgagagctttcgagtgagttgtcgtacatgaactagatggtggaagctttgctgcaaccatgcatgccttcctgaaggttgcatcatttttcgaaagcagcctgattgccacatgcaacaggagagcaaataacgaagttcgtgcctcctcttgggacttaacaaatggagagctccagtgtttctccgtccaacaatgaagggcaatatgcgtaaatccctcccacctgcaacaacagtaatagtgagatgctgaaacactagacatggaacactgagaattttacatagatatgaagagtacttactcgaagggtggctcaacctcaatagcaagggtcaaatggagtgagcaatcaacagttgagttcacttcaaatccaccaacatcaacatcagtgtgagcctcgtgaacaaagcctctaggaacatacattatgtctccttcaagcaaaatttccatcctcccaccacaatcatccaccaagtcatctaaaggttcaaaaggttcatatagtctaggcaaaagtaactttgtgtcaggccaaatcatccatttcttgcatccaagcagttgccaaacaagtacacagtgatcatcataatgccgggccaggccctgagctcttggaggggagaaatatatattagctcccacagaaggttgaccgaataaatcagctacagcagaagctatagcagcaatcttttcagaacggaactccataccacgcaaggcaactgagaaaccatttttaaatgcatccttacatttttcaacgaatgcatctgcatcctggaaggtcatcccatcatcaaagaaatgttcctccatcgcataacctattgaggtctgatcacattggtcatttattcttacaactctgatatcttgcctatacttcacagtggcacccaaggaaccttgaacctcacggagaaatgaactaatgtcaagttcatctgaagcaatagcggggcaagaaacaatcccatttacaagtgactggatgatagtatcaggtgttttcagatcaaattcattaagcagtgaagtgaatacactatccacatgcagattcttctgtttcctagtgaccaagtaagtcgacttctcccagtagtttaggagaaaattttcatagtcagataccgattgtccaaaaatgcttcgtctgacttcatcaggttccaggtgggctggacaggcaatattcattgaaagcctaaaaatagcttcagatatctcatgttctttcctttgaagttgattcttcgagttgatgcagtcagttgacgatcccagtttatcaacattcttccagattttatgcaacaaaggcagaacttttctaactacatcctgttgcagattatgcaaggtatcaacttgacaggaattcaccatgaataccaatgtgtcaaccatcaagtagaaggatttatttgctttagaagcactttttgagcactcagtgcttctgatatcaatgactccagaaataaattccacctgagaaaatagatatctacaggaagtgaattcaaccagtcgaagatattcatcatatttaaaaggcctggcaatgcttcccatctagttataaactatcaagccatcttcatcataacatattaacatgctaccagaggaagtttatcataataactgcagacttgccattgatctatacatgggcacattggttaagttgatcttgtgaacataagagtcaagcggttcttgacatttagtagtatatatcagtatagcacaagctactaaagccgaaatacatattgaatttgaaaaaacaatcagatcaatcagtaaatatgcttacaatatgctctgcagaacagcagagcccgcaagatgctccctgccagcagaagaagcagagagatccattatagcattacaggcagcctctgccactcgctggctcccacgccgcagcgcccgtgccaagcaatcggcaatggcggcatcggacgcaagcgtctcgctagcctccatggactggagcgccgctgcacccagcacctcgcagctcagcgcggccacagaagcagagctgcattgccaatttctgcacaagttaaagagaaaaaaaaagaaaaaagaaaaaaaaaacagaagggggaggaggataggagaggctctgtactgtacctggaggtgaggaggagggggaggatcgcgacgagggaggccgggagagggtgaagcgacgggcgggagcgcgagagcgcgcggcggaggaggcgggcgacggtcgagtcggagccgtgtggagtccgccggtgagtggatcgtgcggcggcggcgagcaggatggggaagacgctccggtcgaaggcggcggaggcgccaccgccgcgcctcttccgcttcttcatctcgacctcgcgaagttcgattcgtggcggagctccggcgaggccgccgccgtggagaggagagaaggagacggactcgcgaatacgtgagatgaatatccgtgtctcctatagcggttacgtattctcagaggtgactcaagcaaattacgcttttcttccgaagaacctgcctttgtactttacgccaactgcattcttggaaatgaattgaacatattccaaagtgaaattttatgatcaattttaccatataacatttgataccttgaggtaccaaattttacacacaaaattttttgatgcctcaaggtaccagattttacacacaaaattttgatacctcgaggtaccaaattttacaccagagagtatctcaagataccaaatgttggatggtaaaattgctcttaaattttactccctccgttccaaaaaaaagacaaaccctgggtttccgtgtccaacatttgatcgtccgtcttatttgaaaaaattataaaaaaattaaaaagacaagtcacgcataaagtattaatcatgttttatcatctaacaacaatgaaaatactaattataaaaaaatcatataagacgaacggtcaaacgttgaacacggaaacccagggtttgtcttttttttttggacggagggagtacatgatggatgatgttaacacaacaatagcaatttgaaaaaaaaaatacttcaaggtatctaatttttacaccaaaaaaaatacttcgaggtaccaaaatttacactatgtgtagtatctcccggcattttttttaagatgataaaattaccctattccaaaaggcaactaatactaagaaaattagtctcaacatgatggatgatgttaacacaacaacggcaatttgatctttcagaaccaattggcagaaatcacttagtagcaagagggaatactgtatgatatcgactttgagctttagcaatcatactgttaggttaggtgatggaatagttcgtgttctgcatgctctgattttaaactcttatctttgtaccaaaagtccaacacgattagctcacctaacgcaaatccgtaggcgccaagaaattaaaacccttctctcccttttgctgtttcctgctgataccagtgctatatataagaaggctaagctctgttcattaagcagggagtaataaatcacccatcctgcttaattaccatctattcatcattatcctctcctctcttatgtgctaggtttaattttgtgtttttttttcatgttttgagtctgagtttaatttctggcttgtaagtcgaattttcttcttttcttcgtatgttttcagagtttcagtggttcgttaatttgctgatttaagttggcgctatttgtgagcacggccatggaggacagtgatggaaacaacgaaggctcgctcgccgaacctaaacatggcatttgctcatatgcatgcccttgatgatcacaatcgtactgtgcactgagtcctccatgctcttaaatttgtgctgtttcgttttagttgcctgttttatctgatggttagataaaagaagtccaaaaattcagacattcagtgctgtcttccgagtttttctcccgacagtgtttctccgtcctttgtctcgttttgtttttagtgaggattctgttggggctccttgattttttttttcggttttgctagtatttcacttgcgacagatttttatatttctatcttttactttttcgttcataggatctttatattaagatttgtgttcttgtatatctaacttgtagttatactcatttacagtgcacttatactcagttacatagcacttgcatcctgttacaattcaccaaaactagatttttacaatagttcttttctctaaatttatgatttttgacatatttgtctctcttttttgttattttatttaaaactagctatatccattagttgaaaattctgtaagatttgaagacataaatttgtcgaagtatcaataggtagtccttttttcagttatggattaaaaaccaacggcctctacatcctccaggttgggcctccttgatatgccttggaataatatctaaaacttatggtcaccttaatctgtagactgttcagaatcagaatgaacagttagaaggacctcaagtcatcgactaaaccatttggcaaggcaaggcaaggattctgccttcaggggacaaggattcttcagaattgttccaaaaaaaaagttgtaaaaggaaaagcaagaattctgaccagcaactgtttacgaccatcttaacaaaccgatgtggcacattgtgattgaatcttggatcgaggctggacttcccttcatcagttcatccattttgtggaaatttcagaattcagattctggagtaatgatcgtgatccgtacgttgtgatgtgcatggaaacagattttgaaggaactacgttgcttcgagaaattttcacgatcgctgaggctatgttggctcttggctctggtacgagtggacaagcccggaaaaatcttggataggaaccccgccgccctcaccgattgtgcactgttcgtggccgccatcaaggtaacagttggagatggacgaaaggcaaaattttgggaatccaactggataggagatcagccgttgaaatatctagccccaaaccttttcaagcactccaaaaggaagaacaaatcgactcttgaggcaataaccaataatgcttggatcgaagatatccgcggaaggtgacaatacagttgcttcaggaatatatatgtgtatgggaagtgctccacaatgcaggagatgtgatccatgaaggggctgatgacacaatcctccggcggtggtcagccagcggcatgtatacggcgaaatcagcatatgccatgcagttcatgggcaaaacgattttcggaatcagccgagcttgtatggaagacttgggcaccgggtaaacacaaattcttcgtgtggttgctggcaaaaaatagaatatggacgacggattgattgcaatgcaggggctggccaaataattacttttgccaactctgtgttcagaaatcttgaaatagtacggcacctcttcatggagtgccccttcacgcagcaggtatggcgggacattggtcgcaagatcaggctgtcacgtttcctcaatatgaccatagacgatactctcctcaattggtggcgcgagcaaacagatgaggcagaaaagttgcaacagaaaaggctgcgttcagtattcttggccacgctttgggagatttggatagaaagaaacaattgcatttttagaggcactgagtctacgccgccggcacttgctagcaagatcatagatgagcttcatttgtgggaaatggcaggcgccaagggagtgcaatgtattatgttaagagagtaggcttctatttttctaaagcgtgtagacaggaatagtcccttttatacatttttgttttcttacttcttctataatataaaaccagctcgctaggttctttaaaaaaaaaaaggattctgaaggaactcgtgtattctgccaaggcccggtatgagctgacgacgttgttgtatgcttgagattatttctctcaaaaacattatataagatgctattatgcccaaatattttcatgggccttgtctcaaaaatgctccaatttccagcatctgcttatacatacgaacaagtacattttttctatacttgctttgccccaaaccgtttctggatctgggaacgtgtccgtgtgcacacactatacatatcaactagtaataaatatcaccaaagatttaaaaaaaataaataaactgtacatgcacttttagtactattatctatttataagatcttgtaacgccctgcaaataattagagaaaaaagaaaaagaaaaagaagagaagagaagaaggaaaaagagcaaagctagctagcaggccagcccatgcagcccagtagctagctggcccagcagcaaaaggcagcccacagtagcatgcaagcagcagcgcagcaagcagagcagagagagcagagcagcagcgatgtactgtagcaaaaaataatcccacctcgccaattcaacctgagagggagaccagcttataacgatgagcagcccgaaatttttcgttaaagtgtggtccaactgaataagataatccgatactattttttgtcctggctcatcttcaattttattatatgtatatgtattttttctataattttcggtaataattatttagtgagcaagatgcatagacaaaaaaaatatgccatggcttctcttccaaccttacaaaaaatgaaaaaatcagtcttactaatgtctacatcctccataaaaaactatttttgaatttaaatctcgacatagtttaccaatgtttttattatagagggagtagttgtctactctacagtgacaagattagaatagataaacaaaatcagacccttacacaggacacaacgcaatcactgtctcactggtatctacagtaacaatggctgcaaagtcaagttgctcaatggaagtggtggggcaagatactaataccgaccatactgagaactccctccgtttcagacgttttaactttggtcaaagttaattttttaaaattttaactaaatttatagacaagtaatatttataatactaaattagtttcatcaataaataattgaatatattttcacaataaatttatcttgacttaaaaatgttactccctttgtcccataatataaaaacctagtatgggacgtgacattttctagttctataaatctggacatgctgcctgtccagatttgtaatactagtaaatatttaatgtaatcataagttcttatattttgggacagagagagtattattttttttcaacaaacttagttttagttaaatttaaagtagttcttataagctgaaacagagtgaatggataagtaatgatgtccacgtagtgcattgaacgtagggaaagctatccagtttccggaacagtacactgtacagttcccttcctcaacggcggagcaggattatgcatgataggagaggggggccagtcaagaaacaataaaaacaaaacacacgtataatattaatcacaagcgatggcttgtatagaaaattgagatacggtgtcattatatattgaccatacttattacttaaaccattgcgttatcctctatgtacaagcaatcagatttcgtcaaaattgtcaggatcacctgaccccgacatgttcattgcttgtgctagctgttgaatgctgatgcttgcaagatggtctaaactctgaatttgttgatggtttttaactatcaatttgatatattatgtcacgttttgcaaaatatccacaagtactgactgggtttcggactttcggttaggtacttgacgagcaggcataggtatatttgttccattttagacccggtaagcttgttaagacgtattcctattccaccgagacaatccagttcgttgccatctctactttagaccacttagtaaaaccagatcatttagtatatagaggatatctatatgttagaaggatatccgtgtaggatcaccgttcattccgcatccaatggcagcactggttcctagcttctcttcagtcgttcggcctagctcagagccaaccagggggaaacgtacgccgctacaagaaaccccgtcgttttgccgcaggattctgggccaaattacgacggaggagagggtaggaaactatgaattgatgctgtcgttgaatgctgggtaaacaacgatccggcacagatatcccctttgatgtagaaatcctcttcatcagaagacctggttccgattgagtaaaaatgggctctcacggttaacctttgcatagaccatagaaacatagcccttgttaaagtgcccgttaaacctttgcacagaccatagaacgcaggcacgcagcccatgattcaaacaaaaaaagtagattaagtagagtaattaagtatatccttttgttctagtacatcggagacggtgttcagtttggtgactacaaattaattaaagtagagtaacgaaatatccactgaatgtgcgcctgtgcgagtgcgacgaatgtacctaacagtcaatgctgttcctctatagttcgtctgaaaccagcgaattaatccgactaggcaacattgaactagtgctatcaaagatcagcgcagctgccgtgcgtggttctctcattggctggatcgatgttgaaatcagaaccaacggttttgaccggtttcttaaacagttaaacccgtacataaaatcggcgccaattcagcttgttttgtggaactgtgtgtttagttatcggcaaatagcacacgccaaattgccaactagctagctatctcgacaaattagagcctcatccaaaacgataggttggcgatgcgtgtcgtccaaaactaccttagtacgttaccgtacctataaatatgcatgcaatgctcgacgctttgctgcacacacatcgatcgctaatccatcaacctatagcttaacgatcactgccattgcaatggcgcggtgcactttgctcgttctcctcgtggcggcggcggtggcggtcgtcccgctcgccgccggccagccgtgggctacctgcggcgacggcacgtacgagcaggggagcgcctacgagaacaacctcctgaacctggccctcaccctccgcgacggcgcctcctcccaggagatcctcttctccacgggctccaacggcgccgccccgaacaccgtctacggcctcctcctctgccgcggcgacatctcccgcgccgcctgctacgactgcggcaccagcgtgtggagggacgccgggagcgcgtgccgccgcgccaaggacgtcgccctcgtctacaacgagtgctacgcccgcctctccgacaaggacgacttcctcgccgacaaggtggggccggggcagctgacgaccctcatgagcagcaccaacatcagcagcggcgccgacgtcgccgcctacgaccgcgcggtgacgcggctgctggcggccaccgcggagtacgcggcgggggacatcgcgaggaagctgttcgcgacggggcagcgggtgggcgccgacccggggttccccaacctgtacgcgacggcgcagtgcgcgttcgacatcacgctggaggcgtgccgcggctgcctcgagggcctcgtcgccaggtggtgggacacgttcccggcgaacgtcgacggcgccaggatcgccgggccgaggtgcctcctcaggtcggaggtgtacccgttctacaccggcgccccgatggtggtgctgcgtgagtaggcgctggccatgcgtgaagctagaataaaatggcacaaattaagagtgttccaccagaataaatgtattgtatactgaataaacctgcatgcaggatatctatctaagctgtaaccggattatactattgtactatcaaataaaaaaaagtgtctatatgattatatatcatcgttaaaaattatagcatattcttacgctcatggagtcaggatcgatcgatatatatatatatatatatatatatatatatatatatatatatacacacacacacacacacacacacacacacacgcttgaccaagacgtaaatctcgagctattaatatcaactaggtatcataagtaataagtaattggatcccgattgttcaagccttttataaccaaggttcgttaaagagaaatgaccacaatgagtcagactaaatagaattggatccataaatggatccaagttcaatccttttataactaaggtttgttaaaagagaaatgaccacaatgagtcagactcaacagaattggatccattcctaattgcgataattaggatactcttgatccctctcacaccctctttgaaggagagatgtttagtttccgacttacttcatgtattttataaactagtaatatatctgtctaacattatagcgatatttgttaatgccaataaaaaaaatcaaaagaaccaaaatttctttcttttgaggtcaagctgaggtgcctgctgatacatccctgaatgtgtacaagcatgggctgaacaggcggcctggtaaaaagaaaaaaagagcccgattcagcacgggtgaatgaattggaccggcctgctaaataatgaagccaataaaaaaaatggaacaagtctattttacctccctcatctcttgcccctgatcaaatcgtcccccttaactgcaaaaccagttataccacctcatctatcaaaattggtgcaaaactgggtataacatctccggtttttaatgtttgacacacttgattttaggtgtcttggatatacattggaccatttgtcttatttaattttattgtaaaaatataattcatagtaagaatatgtttaataataaaaatcatagtaaaacaaaaaagcacgagatttttgaaggagtaaaatgtatgggcggcccctaaacttgtaaggctatgtcatctaggtccccaaacttagaaaatacagttttgggtctctaaactcgcttagccgtacatcacctgtccaaattgcatttgagccagtctactcgccgacgtggactgccagcgtggaggggcggggacagctagggtgtcaaatatgcaaagaacccccctattccctcatcctagaaatcatatcgaatcccctgtccccattttttccccaccatgctgagcaacgaaatccctagcaagctcttgttcgattcactatccccttctttgattccctagtgacgctgtgacgacgtcaagatcaactagagctgcgtgcgattcgtcatgtcctaccatggctacagcaccaacaacaactccgtcggtgtgtggccgtcatcggcaaggtttacaataccgctggtaaccgcgcggttacagcggttaccggccttaccgtgggggtacggtaataaaaataccacggtaacctccttaaattcaaataaattaaaaaataatttaaatttttgataaattttacatagtttcgtatggtttttcacgattaccgcggtaaccatgcttaccgccggggcgcggtaaccccgggcccggcggtttgggaaaccctggtcgtcggatccaccaggagctcgacgacgccaagctcggcactgtcgcctagcccgagcgcaactacatgtcctacaactactgcgcaaatggctggtgtggttacatggaatcccgttgattaattgctcttaatacagctgagaataaaggcatcatcttttacatcaggttatttcttctctcctgttgtagagcattggtgtcttgcaagcattttgagtttacatgtgcaagttttttcattgagatggaaatggatgtgagttttggtattgggaggatcaatataaggagtatttgacaaatacaggacatctggctcttgcagcttctggtatccatgcaaaatgtccagctcctgttgtgcatgtgcagagaaatgaattggttgagctgggttcagacttcatagggacatgaacatgctgcagagcaacttgttaggactgaaatgtgtagtagcttgttgtgtatttgttgtggtgaccaagatgtgtactaccttcaggctagttgaaaatgtgcaattatctgaaatgtactgaaaatgatatttggcgaatgaaatgatgagggaatagattttttttttcatatttcacaccctagctgtccctgcccctccacgctggcagtccatgtcggcgagcgactaggtcaaatactatttggacaggtaatgtacggctaagcgagtttagggacccaaaaatgtgtcttctgagtttggggacctagatgacatatgtctataagtttagggcccgcccatatattatactctctttttttaaataaaacgaacgagaagttaacggcgttcaagcattaaaactagagagtaattcacttgccagacctgagattagtctggatggacatggaccgacaaaagcctacttctaaagatggtagtactaattatgggccgaactcgagtccaatgtggagttggacgcggctgggccggcagctaatctgggctttgggtttcgcatcccaggctgacacagcttccgccgcatccctcgctcggcccggacctaagctcgagccgacgttgcacgcgtgggagccgagcggggtccggctcgagcccgagccgagccgagctgagccgagcagagcagcgcgtggctaaacctagtcgtcctctcctcctctcctctccccgacacgagcgattcccatcgccccccaaatccccatccgattccaagccctaaacctcccgaatcggtcgaggcggtgctcgatccggccgctgcatctccggattcgagcggggggcgttgccgcggtgcccggatccggaggaatcgcgccgcggcgggttttctagggttccacaccgtcgcgcgtcccggcgggtgttcatgaaggccatggggtacaataacccctacgattccagcggtgagttgcgtcgggttaggaggatttttgtgctggtaggtttgggcgcgcgcggttaagccctctccaggatttgtagtttgtatgttttttttttgtttccgtcagattggttgtctgctgcgtccctgcctcgtttcgataacatgtgtctttttttttccttcaaaattattgcttcagtaatatcggttgattaggtgcgtaggtattgtaagaaaaaaaatgttttgttggcaggttattggttattatgaatttgtaattgaggcggtcaatgcagtgaaagacatttatttcatagttttactatgcattttatgaaccatggcctaagactctgccactatggatgaaagcctttgagacgaggttggcaatagttgcttctgaagtggatctgcttactgtgttctaataaagatggaccttttttttttttatctttctgatattatgtgaagttttaaggaaaccactgtttctgtttatgcgttcctgatcaactagagaaagatcctgctgccaaacccttggtgcagactgatgacatgacgtcggccagctctagattctggcttatcttgccaaattgtgaagcccaattgttgtgggcagttattgaaccctgtagttcacaaaatatttatgtcttttttctcatatagtgaatttcatggtatagtgacttgtctgttcattctatcaaaatttcagggactgacgacgatctccctccaacacaaaatagaggattaagagtgcgatcttttagtgcgaatggcagggcatctgttatgccattttcttacattaggccgcacggtgatttggagagtgaaatacatcaggttgagcaagaggcgtacactggtgttcttagagcatttaaagtgcaatctgatgctatatcctgggtatgtatgtataaaaaaaagaatcttgtgctaacagttttagtagccattctttgcacatgccttttttgtgttgagaataaaaaatgtatattttttgtccaggaaaaagaaagtttgatcactgaactcaggaaagaattaagagtctctgatgatgaacacagggaactattaaacaaagttaatgaagatgtggccatccgcagaatgaggtcttcatacaatcattcaatttttgttcatgcacatgtttaaaccaaccattttattttttcgttagtaatttatttatccttcgcaatattttgcagggagtttagacagggaggtggatccctgagtgcacagcatcgtggcagcagaatttttcatgatacagaacctggcccagctgcaaagaggcaaaggacacccctttctattccttcacattctgctggcctccagtcccctgcgatgccttctccctcagttccttcatctacaaagtggggaccattttcaggaacaaagggcaagaagactaggacggtgtgttttgaatacgacaagtcatgtttgttgcattcccatagtagtaatatcatgagttctttttttatgcattacagaatacaccactcgctgtgccatccgcggatccaacttcattgattaaccggaaaatttatacaagatggccagatgacaataacttctatgaggccactataactgactataatcctgctacggtttgttgtttaatttcactattatttttgctacttgctgcagatttgcatttttgtcaagtaagcgaagcttatggacacccctgatacttttcagggtaaacatgctctcgtctatgacatgggcacagtagcccagacttgggagtcagtcagacttagtgatgtaagcagtattttcaaccattgccttgtttctatctgtagatgtttttttactaatccataataaagtttttctttcttgatctgtggccgtgggatattcatatttttatgttacatttgatttgttgcaatgacaaactagtgactgtctgctcgcgtgcccaataacatagaaattaaacaggaaacatttttctgttgctgcagatttattgtcataattacgttgatagtagttctgcaggaaattacaatagtttagatggcctaccaaaactatgtgataccttctaagtaactcccctggagcaacttggaatatgatcttagtatcttaccactgcagctgatgatgcggcaattattcaacaaattgagggtcatgggggttaagtagaagctagataagatttgggagagtaaaaactagataggactttggaattgagcagcatggctagtgcctgagtagtcatggaactggatgtaaaagagggtttttatgacaccttacacccattttgcgatgagtttgtattttttgttcgcggagtcattaccatgtgatgggccacattatttgccttggtggcaagaccaccgtcagggccgccttgaggagatgtttagatacgttatttttttcaagtatagtgggttttaatgttttgtcaggtgggacagttttagaagtcaaaatgtatttttttcctaaattttagaacctttggttatctaggtttctgaagctgaactgtagtgtaaccggtaggagtactaaaatttagttagttattagagtatagagtttgttgaatagcatgtcatctgttataaatttattaagttttacttgtttttagctagaacatgaaaattgttgaatcgtcctggctaattgccactgtttgtttaacatttaatcaaaagaagatgataaatcatttctcagttggcacctgaagatataatatgggaccttgatgatcaaggcatctcaaatcgagatggttggggtcctcatcctgggatgaggaggcacccaggcaacaacggtacaatggcaatggcaagtaggggaggaggaaggttttctcgaaatgagcctactaaggatagtgctcctccccaaaatggaattaacaggaatattggtcacattgatgtacctaacactcgaagtgttgtcatagaggtaaattatctcatgagatcagatattatgcattcagatattggttttttacctcactattgtatgttccaacccaggtggagagggttttgtccaatccaaatatgggtgagatcgaaaaggccaagaaacttttgcaagtgagttggcttgtctgttgttatgcaattttctacagaattatgtatgatggagaaaagctccttatagatatccttcgtctgagagttgtgaggtcaaatggttgtccttgtaggaccaggagcagtcattactcgatgctatagccagacttgacgatgcatcagatagtgaaagtggtaagttactggcagactctacttgcactgttaaatagtatctttgaagggtgatgagtattagccacattagtatatttggtttttttatacacaacccaataattagaaagagtgaaacctggaacttcaaattctgcccaaacattgagaaattttggatgtgactcagtatgttttgattgaaaatttgtcagtctttcaaatttgtttcagctacttctcttcagctattattctaactagtcattgtatattacagaagatatggccgtcggggcccaaatggtttctgctggtgatcacatgggcaggaacggcgttgcttgttagtaacaactggcaaagtgttggattttgaggattgtgtttgtgaaagcgcctgtgtagatcaccggtcaaaagaaatcatcgatggggcattggcatgccaaaaatggatgtactgaacatgtccctgagaagggcctcttcttaggctgcgaaaagttcaggtcacaaggcgcagggcgcctttccttcaatgataacggtggctgtatttgccctctaacatacttgaaggaactctaatcatctagaaatgattattaacattccaaaactgttaaaccctttgccaccatctccaatctgtctttgatgattaatcaaacgctccgatctgtcttcgatgatatcttgtgtggtgccggcttccctgccctcgacacgggcacgacacgccgcaattctcgtcggatctcgattctcaccgccggacggccggtcaggatggagagctccagggcgtccagcatcacacataaaaaacatgcagtttgagatgtggttgctctgccataaactctgcaatctgaatctggttcggccatgtagaacagcatggattctctacttctcttccaacccaccaaactgcagagatacataatgctgtcactgtctcactgatgtctacagtaataacaagaatggctacaaagtcaaacttagctcaccggaagtggaggatacaaacaaataaatagaggagtaatatccacgtacattgaacctagggaaacgatccagtctcccgtagcaatacaacacgaccatcaaatccagggtcaaaagcaacgaactatggtgatcggtcaccagcaaacttattgttaacctaaggcatactcacccttcagcttacttcagccatcagaatacacgtatcctactccgagtttctctccatttaaccccgtgagatttgaattaaaacatgtatacatggtggtacacaactacattgggtaacttttaccagttgttttttaagcatatccactactcccttgcccatgcaagaagcgcacgacaacacaagttatgttgtcactgctctccctcttgtaggcctcttgcaagagcttctttgcagcttcttctgggtcatgaatcgatctggtcatgtcgacagcctcctgcataagagcaaatgcaaaagggggctacatcaagcacaaggaatacgattaagatacataaaaatcttctcttttcattttcttgaatttacctcattggttactacatcccacagcccatcacttgcaagaatgaggaactcgagagagtgatcaataacttcctcctatgacccacaaaagcattactgaacaaggtcatcatttgtgaaaggtgaatataaaggatgattattctgaagcctaaaaaattaacaacatatattaggaaatggttcttcaggtcgactaagaagctggcagtagaacagatcagaagtgcagctgtaagacattgataacaaaaaggccaaaaatgaaacaatgctgaagacaaaatatgtccctggtcgtttatcataccgccctattagttttgctatggaatatctggaagtgcctcaacaacaaagttttcagcaactacgacaagacgctgtgcggaagacctccagtggtcccatcgcagcacaaatagttttagctggcaatgtatactagattgggggaacaaatttctcgcactttgtaatatataggaccctttagcttccactcaggccctcatcccccgtacctcttcacaatatgtatgtaacttggtacaaattttgatcaataaaatgttcaggctggtagaaagccatccttaatttttccttcgaaaatttatgccacaaatatcccctcaataagtatatcatgattaagatggcaactactatcaatatcactcttgacattcaatccaatgacacaagggaatcatgattccaaacgttcacctactgtcatggtgatacctacatatgcattttgagaggtaagtagacataacaaacattaaattggtcaggattgcatacccgaatctcaggatccacaactacatactgctttaagagtttgtcaccaaaagcgcgagaaacagcaagcacaccaccaacacgccatgttcctaaggaacaaaataccatcattaggaacacgatcatagtccattcatatacaaaataagataatgtagtgcttagcacctgcccacattacaaaacctccagcatcttcgatacgttgtcgctcatctgtctgatcaggcttgtgatcttttgaaacagctatagctgcaaaaaaccagcagagcttctatgtgaagaactgataaattatcacagataacctacagattatttctcatggcactcatttcatcaccaacaaatcttgattctcatgcctggtacaatgcagatgctcagtggtaaatacaacattctaacaaaacaagcaaaaatattcgtaccttaagagaggtctctattaataatagaatatgccaaacataatcggctctcttgaatttttaagcataccataaaaaagaaaaaaaataatgtgtcatgctatataaagtcagaaagtatcaagtaaatgcaaccaggaagctgaagagatggtacagtgaactgtcaattaccatttccccccctgcatatgatagccctagagtctccaacgtttgcaacaaagagacggtcaccaacaaggacagcggttgatgcagttgatccacactggttttgactgctgtcagattctaagaattcactgtcggtacttttataagcatcatctacagcaaacaatatcacgtggtagttctgtcaattctatacacaaaactcaacatctagtgaattatggaaagagaacaaaccaatacctattgccactttggtgtcactgatgaactttggatgccttagaagatgactgaagagattctgtttaacatactcagctactttagcaccaccatgacctataaaatgaactgtatgtttagcatttatttttcctaaaataagctcaagagcttggtatatccacacttctagttcaatttaaagcattgtgccctagtatgagtaatctttaaaactttctccatggacttctcaccgtcatactagctctaactgcggaaataagaaatgttacaaggcaaatgaattattttgagcttttttatactatacaagattagcaaaggaaacataaatggtatgttcttttggtacaaaagagaaaggtctaaaacttggaagagtgtaatcttagaaatgttcctttctaaaatgataaagaattatcaatgggtagagattatgcacgaatgtgacaaattcatacataccatcaaaaactccaaaaagaccaataatctgcccatcaacagagtcaattcttgtctcgtaaaagtcttccatggaagcccttttaccaggggagctcgcatacccatagctaaacttaccattctggctggcaaaaaaagaatgagaaatgttgagcaaataggagagcaacagtcctaataactgcatttacaccataaaatcaagctaccatgacaacgttgattaattggaaatagaatattattcataaagtcactactcctaaacttccagacgcagccagattgcaggcactacaattattacagttcactggttcaaaaagctagaaccggttgtgttgtgtggtgagctacaacaacatgacctattgtatatgctgttactgaaagaactaacatggcatgatgcaagatgtcatattcatagaaaatgcatttgagaaatgagggagacgaacttccagcttgcaactaacagtaccaaatgcccaaaccgtgcattactcattagtttccttgatctcaacccatagaatgtataagcacatctaaggtggcctcttaccttttgctatcatgcccattaggacgtgctacacttaataattctccaacgtaacatcacataagttcattttagtctgtattcagaataaccgtccaaatttattcgacgcaactgcttatgctcagatcaggtatgtagcatatgaatatcctacttaaacggacaacataactccaaactggatttatcttgtttatagtcccaccaaaaagtactaataaaacaaacaaaaatgggattgcatagcttatcccatactccagccttgcttttgagcttaaacagcgtgttcaaagcaaaggaaacccacgcgagcagttatacgaaattcgtgcgatgcagcaagcaacgtatcacacgcctggaccgtactgaattgattagaactaaacattcagccattatctactagttgccagattatccattatctaaaacaaaaactgctagtcgccagagctaagctagacaatcgaattgactagatggagtactccaaaaaaaaaacccagaattcgggtaaagcaaacacgaatcagacccaaaaaaaaaagcgcaaaaagaggacaggagaggcgtcccgagaatcaatcgctcccacctgaggccgccgccgctgaccggcgatccatccgtggggatcacggagctcaagtaccccatatcccccccctagatcacacgaacgcgaacgcgaccagctcgtccgaatcccagcagcagcagcagcagcagcagggggaagcgcgccccacgaatcgggcccctcgcgcgagtcaaatttggcggatttgggtttgggaggagcggaggaggggaagggggcgacgggattgggccattttctagtggaagcttctcttgcttcgtcgggggagggtgatgggtgtttttgcacccaggtccttggtgttccgcgtatttgcacccgatagagggtgagggagtgtttatatccatggatgtaaagttttggcgtgtcacatcgaatacacacgcacacaagtattaaatataaattaataacaaaataaattataaattccacatgtaaactgtaagacgaatttattaagtataattaatctgtcattaataatatttaagcaccatattaccaaatcatagaataattaggtttaaaagattcatctcataatttagacacaatatgtgtaattagttatttttttatatatttactaatattttattaaatatttgatgtgatttggtgaaaatttttgccagcgatgtatacgggccctgagatgccgtgccgtggcgtggctatgcgaaaagcgcgaggtcgagggggtgaggggcttttttttttttaagtgagctaacatggctcgtcgtggttttctgcgggatccttcgagaacatcgatgatggatcaccgtcctccccgtgtggtggcgccactggattcgtgcgttgcgtgcatgtccgctagttcatttatcccctgccgccccgtactagtgactagcgtaccgtattgtttaacttcgacatcgagttgcggaggctcacgctcagaaattcaacaatggtgtactcaatgatggggtattttcgatcatcatctgtatctggttaggaaaaagagcagatgatggagtactacgtaagctcttttggttgaagcctttgtcaaccttgtcaaaataattgataatgctcatgggttttgggttgagtaaatagaacatgtcgcaaatccaaaatctataacagatcaaagaacagtgcaataagtattatttggaaaaatagcatgtgtaaaatccttttgaatatagaagtagcggagaattagtacgtaatatatacaaaatccttttgaatatagaagtagcggagaattagtacgtaatatatacaaaatccttttgaatatagatatacaaacagtaatgcaaactgaaatgaaatactctctctagcaaacattcagactggccgtctcggtggattcgaagtgatggtctcaactctcatctctgctacgtgctactcctaccttcatcctagaatattgctatctaggatgagcaaaattcctagatagcaatactgctaactgctgtgtaaatgtaatactgaactgtattcacagacttgtttgaatgtttcttggcacgcgtctgtaggatcgagatatcgactagaggggggtgaataggcgatttaaaactaaataacacctaatcaaaactaacctaaattgctaggcttggtaagggtgaactctaactaagcaactaagttatgttttgtaaacctagggtgatagtggttcaattatatctcaaggaaagtaaatcacactcctatgtcaaagttttgcaatcctaggatgatatgatctcaagtatgtctctagaaaagtaaattgcacaaatgtaaatgcgacaatcaaataagacaaggagacaagagatttttcaccgaggttcggaaactcgccggtttcctactccccgttgagacgagcccaactccaccgctcaaccacgaagccaccgcacgcccccttcgtcaaggggtgggcaaggcgggagccggcccacggagaggactacccaagcctcgatcactcggggtagttcttccttcactccgaaggtggtgaactccaacccactcacaaaccggcgccgggcctcctccacaatcttctcggagaggtcatcgggcaactcctccacaagccgtctaggaggcggcaacctccaagagtaacaagcaatgacccggcgtggagatgatcaagtgccacactagctctacaatggaagcaaatgcacttgactcttggctaaacaatcctctaacacactagatggatgaacacaaagctcaagtgagtgtgagaaaggtgcatggggtgtatgcaattgaattgggtgccaagagagcccccttgctgctggtgggggagtatttatactcccacccaccaaaactagccgttgggggcgaaatcccctaactctgtgctctgccggtctgaccggaggtatgtggccggtcagaccgtgctactctgcaacggctagaaaactagccgttgtagccctgtcaaagggccccatcggcctggccggtcagaccgacatggggtagccggtcagaccggcctcggctcggtcagaccgccatcggctcggtctgaccgaatacggctccgtcggctctgtatcggccatcccgagcagcaccatcccggcctccagggggccggtctgaccgcgcatgtgccgccggtcagaccagccttacgcgtcggtcagaccgccttcttgcggccggtcagaccggccagggcacgccggtcagaccgccactaccctgtgaagtcccctactatgtggccggtctgaccgcccctggtcagcccgaacccagtgaagtgtgtatgtgtgtgaaatgtgagcacaagtctaaatgcataatgacctaatgtggcaattaaaattatctctttgctaggtcattacccctcttaatagtacggcgaaactaaaaataaactagcaaatttgatcgccctacacctcgatcaattctaaattaaagcgctagttttaccgtcttctttccctttgctttgcgacgtcaattttaatccatcgataatcatccatgcgcacattcgacgtggacctaacttaaaatgtatagctcaaagacaacggttagtccacaattagcgcttgtcattaattaccaaaattaacaccgggggcctagatgcttcagcgtcccacccgtactccctctgtcccaaaaaagacaaaccctgggtttctatatctaacgtttgaccgtccgtcttatttgaaaaaaatatgaaaaaaaataaaaagacaaatcacgcataaaataataattatgttttatcatctaacaacaatgaaaatactaattataaaaaaaattcatataagacggacagaaacgtaaattcaaggtttttttttattttttttatacggaaggaataggtgacacggcacgacaaactcgacgacgcagaaggccgtgagaaggggcggcatgcagcgccgtatacttgtttgtcagggtcaatatgccggacaccctgttgcgccgtaacgcttcaaggcgaaaaggagacgtatgcagccaagcaccgcctcgaattaaacgagccggccggccgacacgtacgtcgtaccgcgcgcgccacccccctagcttgggtcgtgatgatcctccaactccggccgaaaatcaacgccgccgatttcgctgtggcgacgcatgcaccaacgcgtgggtcgccgatggcggacgtcgttattacgtacaccgtcggctccgatcacgtacgccgaggtgacacgcaccggacgatgaggctgccgtgttgctcatatcatcagccggtgtctctctggccggtaatctggtggagctctcgctgtcggcgccatcaatcgtacgtgtggacagccgcgtgcagggggacaccggacacggtcacacggggttcgcggcttcgcgcacgaacactgaactagcttctcacatcagccttcgcactgttcacaaagctaagttcgttttcctggtaggctgatagaaaccttgtcgatgtcaagacgtacaccaattaatctgatgatgcgatacaaagcggttcacggtgccgagccgactcgttttcatgcctcacctcatgtacgttgtgcgcagtactccctccatttcaaattgatctacatatttcatagatacaccaagaccaaaaaaactaataactctctcataccatatttactctagcaacaaactcaatgtatacaccatccccactattttctagccaattgcaaatcaagatattgcatgtgggttataaatacttgtgtgcatggatagatgcatcaatgtccatttatttcaatgcacaaataacgaatagacttaataaataaattcaaatatgtaaatcatttaaaaataacctcaaaaatactatatgtagatcaatttgaaatggatggagtaataacaaaaaaaatatatatactacgtattacgtcaacgtgacaaaggttgtgcgcgacgtgggcaatgaacgtgacagagcctatgcagagaaagaaaaggagcccgttaattaatttctctatatgaaatctgatccgtatttatactaggaatatatatatcttactactatgtcttggcgacgtttccgcttttccgtttctgcatgcatgtaatgcacctttacgatctccatcaggctatttttcccttaccgatatcgaaacgatcgacgaccggccaggggcggctaaaaccctaattaacgcgactataccagcggcgagatgggttgctgcttctcggtgatcgacgacgacggctacgagcacgacgacgccgtgtcgggctcggtgaacgaggtgccgagggtgaccggcgtgcaccagttcacgatccggcagtacagcggcgtcaagggcaagggcgtcggcaattccgtcctctcccggaacttcaccgtcgccggccgcgagtggttcgtccgcttctaccccgacggctacaacagcgacacgtccgaccacgtcgccttcttcctccagtccctctaccggccatcgtgcggctccgtgtaccacgtcgagttctccttcgcgctgctcggcggcggcggcggcggcggcgccgtactccacgacgtgcggatcgatcgcccgtgcaggttcgacaaccgcaacaactcgtggggcatccgcaagtacatcgcccgggagcagctggagggcgccgccctgggcgccatccacgacgacgcgctgacggtgcgctgcaccatgcacgtcatccagcgccgccgcggcgccggccggcccgtcgtcaccggcgccggcggccccgtccgcgtgcccgtgccgccgtcgtgccacgccaggaacgccatggagttcctcctcagcggcgacgccccgttcgacctggagatccacgtcggcgacgcgacgttcggggcgcaccgcctcgcgctcgccggccagtcgctctacttccggaagctcctctacggccaggtcgggaacgaggcgagctcgccggcgatccgcctccgggagatgagcccggaggcgttcggcgccgtgctccactacgtctaccacgacagcctgccgccggaggcgaacaagggccggaacgcggctgccatggcgcgggaggtgttcgaggccgccgacatgtacgccatggagaggctgaagctgatgtgcgcgagcaacctgtgccgcttcatcggcgacgacaccgcgagcggcatcatggagttggcaaaagcgcactcgtgcgatccgctcaagaaagcgtgcgaaaattacatgaaacgcagaaggattccattcaaccctgatagctgaactaagcacccactagatagctcccattgccttggggaaagttttgcaggcaggttctggtctggtgccacgaactgattatcaagaagaaaaattgactctgtttaagcattgttctgtatatacctgtctttctttatttttccaccattgacagagtgattatatatgttctgttaccagtttatatgactagtaagctaaataggggaatctaaaattatatgattttgaatccagaatgaacaaaaatggtattgcagtcaacgagaaataccgggaggtatcactttttaatgtaaaatttagtaccctgatatgggaaactattaactcttaaggggttatcctttcgctagttgcatgttaatatgtgataaatcactccacaaacatgcaagctcaaatttaatttacatatgttacaacagattataaatttgagtgcgaatatatgttaagccatagtttaatttgttttttcgttgcaacctgtaaaagttaaattttaacttgcatgtttgttaagtgatttatcccatacctattaatctatcttgttaaattttttatagccatttggatgacatgcaaacaacgagggaatgtccaccgagccactattggtacctcaaattactaagaggtattaaaagttacaccataaatttttacattagaagatacggttttatatgtcaaaatatcaagaggtatcaacatttatatcagaatttcttacagtagaaaatatcgtacctttaggtactccatccatcccagaatataatgaattttggacagatgggacacttcctagtactacgaacgtgcaaaaggattgcacgtcaatatattaaaaacaaaagagtttttgttacacacacaaacggccagacatgcctatgtcatggggaaagaaaaggaaaaatcagagctgcaactggtgaaagaaagggaaactaccaaaaaaaaaagagagggcggtagcggagccacactacacttccaagaaaccctccaaaattagcaatgcctttagattcgtagtacttaaaaaaatgtgttttagatggaggaaatattttcttaaaaattgttaatttatctgtccaatatgtatgtcaggtttctctgtatagtatatagtgagcattttttctctagtttctttgcaataatgagcatgtcacaacataaatagcggatgtccagagaggagcatatcccgaattatcaaaaaccgtctacccctctgtcaaaaaaaaaagtccaatcctagttacgaatctcgtgcctaagctcatagctagagtttacctttttttaacagactagtatcacataattctcatgtaggcaccacatgtatcattgtaccatactatattttcacatatatcaaagaaccaatctatataggcaaataataataatctcgaggaaataaacaaagaaaaaggccgcaaatcactaccacgtagaagtaccaaccacctcatcgtcatcggaaaggagatttgctcccagcctgtttttatgcccagagatgtgaagacatcatatatgaacacaaaaaaagaaaccctgatcttctacaccgtggctttattcagccctcgtaacccgtatacagaaaaaagttgtcaaagcagctgacaagaagaggtgccgttgaccccacccgtaatccatgaaaacgagcccagtgacttgtaagcaagcaatgttcaattcatccacgaaaaaagcaacatgcgcattgaaaatgatccataaccgtgccgctaattcccagtcagtcactgtcaaaatgtttgtggtatattgtgcatcctttctaatcaacataaatttttggttggctaggtttggtattaaacctgtgactcgattataacataatactactacagtactactcccttcattttttaatagatgacaccgttaattttttctcacatgtttgaccattcatcttattcaaaaaatttacataattataatttattttgttatgagttgttttatcactcatagtcttttaagtgtggtttatatcttatatatttgtataaaattttttgaataagacgaatggtcaaacatgtaagaaaaagtcaacaacatcacctattaaaaaacggaggtagtactaatatgcagtttagaggccttggcaaactacaggcgctcctagaaaccgacaattttgacgtgtgttcttgtagtacatacaggctgtgctgcagttggatttgtcaggaggctactatacaatgattcaacgaacatgagcagcagcctcgtctgctcgtgccattttgtacttaaaacaaggcgcgattccggctgtcgatacggcagagttatcccccaagtttctttatccaaatcactcaccaatccagtgacaacgctagcttaattggttagtggactagtatatagtagtactgtatagctctcgcgtgttcactcctcagtcctccctgtagtccaacgagtcaaatttgaaggcttcactgagcctttgacaatggcgccgcagctgccgctcgaggtggcctctgctcccaagctcgacgacgacggccacccacaacgcaccggtacgctctctgtcgccgagatttgttcgatctgtttggttcatcgacgagaattcaggcatgccggcaagtagtaaggtgctcttgagctcttctcttctaattttccttgtcttcttcttcttcgatgaactttcagggaatctatggacgtgcgtagcgcacattatcaccgcggtgatcgggtgcggcgtgctggcgctgtcgtggagcgtcgcgcagctcggctgggtggccggccccatcgccatggtgtgcttcgccttcgtcacctacatctcggccttcctgctgtcgcactgctacaggtctcctggctcggagaagatgcagaggaactactcctacatggacgccgtcagagttcacttaggtaattaagtaccttgattaatcctacttcagctaagttagttagccaatcttttcctcaggaagtccaattggtcaaatatagataccacttttggattgtatattgggtagcagtaaattaatggtatggtttttgtggcaacttggcaatatgtttagggaggaagcacacttggttatgtgggttgctgcagtacctgaacttgtacgggataggaattgcttacacaatcactacggcaacttgtatgaggtgaattttacagtttttttttcatacagatcttcaagtagaagattaaactgttgtttgttcaacctgtgcttaattaacttgttcccgttgacagggcaattaagagggcgaactgctaccacagcgaaggccgtgacgctccctgcgactcgaacggtgaacacttctacatgctgctcttcggagcagcccagctgctgctgtccttcatacccaatttccacaagatggcgtggctgtccgtcgtcgcggcgatcatgtccttcgcctactccaccatcggcctcggcctcggcctcgccaagaccattggtatagtagcttgattgttccatttgattgatgccgatgtcacaattcagcagtgcttaattaattagccggaaactgtgtaaatcttggtgcatttgcttcgtgtcaggtgatggaactgtcaaagggaacattgccggtgttgcgatggccaccccaatgcagaaagtttggcgagtggctcaagcaattggcgacatcgcattcgcctacccgtacaccatcgttctcctggagatacaggtgcgcacggccaatttcagaacacgaaaagcagacatttttttggacactttttagctgaaattagtcaagattcatctgaactgagactgatggaccgaacaggacacgctgagatcgccaccgccggagagcgagacgatgcagaagggcaacgtgatcgcggtcctcgccaccaccttcttctacctctgcgtcggctgcttcggctactccgccttcggcaacgccgcgccgggcaacctcctcaccggcttcggcttctacgagccctactggctcatagacttcgccaatgcctgcatcgtgctccacctcctcggcggctaccaggtgaagctgcgactcaaacttctccaaaatcgcattgcttttctctgaaaaaactatcctgatcgaatcctgcatgaactcgatgcatcagatgtttagccagcagatattcacgttcgccgaccggtgcttcgcggcgagcttcccgaacagcgcgttcgtgaacaggtcgtactccgtcaagatcctcccgtggcggcgcggcggcggcggcggcggcgcggggaggtacgaggtgaacctgcagcgggtgtgcttcaggacggtgtacgtggcgagcacgacggggctggcgctggtgttcccctacttcaacgaggtgctgggcgtgctcggcgcgctcgtgttctggccgctcgccatctacctccccgtcgagatgtactgcgtgcagcggcggatctcgccgtggacgccgcggtgggccgcgctgcaggcgttcagcgtcgtctgcttcgtcgtcggcacgttcgcgttcgtcggctcggtggaaggcgtcatcagaaagaggcttggctagctagctagctagtagcgagtaatttagcctggtcatcgagaacgaaatgtaaagctagctcagtgtgccatttcatctgaagtaaaaaggcgcggtgaactgtacaatacatatgcagaaaaaatgataaacataagatgttggttattacttcctcggtttctaaatatttgacgccattgattttttaaacatgtttgaccattcgtcttattaaaaaaattaagtaattattaattcttttcatattatttgatttattgttaaacaaactttcatgtatacatatagttttacatatttcgcaatttttttaataagacgaacgatcaaatatgtgctatgtcaaacatttagaaacagatggggtgccaaagtatcagctactcagaaattctgacaaataatgatagctgtttgttactgtcccttccgtttatacccatttcatatttcatattgtaagtcgcttaattttttaagttatttttttaagtttgaccaaagtcaaagtattatctaccgctttgaaaatatgtaggggctaaattcgatcgatgtactcatgcacgcacgtggaaaacacacacaattatagttgtgaacgcctactctctctggtttttaacgtttgacgcgcttgatttttggtgtcttcgatatatgtcttattaattttattttaaaaatacaaaaatataagtcatggtaggagtatatttaacaataaaaaattatagtaaaacaaaaaaacatgaactttttaaaataaaaagaactagaggttaacggcgttcaagcattaaaactagagagtaacacttgccagacctgaggtggtactaatcatgggccgaactcgagtccaatgtggagttggactccgattatagacgtcgacgcggctgggccggcagctaatccggtctttggggccccatgtatataacgtcgtaacagaaagggagacagattccgtgtccggtttcacatcccatcccacgctgtcgacacagcttccgccgcatccctcccctcgccgtcgcaaaatcccccccgccgctcgcgccgccgccgccgagagcgagacccgcacgaggagccaagcatctctgcgttctacagctccgggccaccggcgatgaagctcgtctaccgcaacctcgcccgcaacggccccggctccgtcaaggtgtgaaccctcccctcccctccccatctcgctctccgtttgatcgcttgcactaggtctagtgttgtttgggtttgggggtacggtggtgatccccttttgtgggggttgtgtggttcgtgtgctgattggatgacttagatcgatttattgtgaaagcgcagctggtgccggaggaggaggacgacctgtggcatgcctacaaccttattgttccgggggataccctccagtccgtcactgtgaggtgagttcctccgttttatgtagtgattgtgtagtgttggttcagttagtaaccagagtaatttatttcggtttagcaattttgagctgttaatttcgaactatcctcgatgtcctagtcctaccctggtagaggaattagggcacttagatttaggccgagtttagttccaaactttttcttcaaacttccaacttttccgtcacatcgttccaatttcaaccaaacttccaattttggcgtaaacttagggaaggcatggttcactacgtgataaatagtttttggctcttggactgggacttaagaattgggattgcgggaagaaaaggaagtgctggaattagtgttactgtttcgtttactttaaacatccattttattaaaaaaactaaacctaacaatttctcaatgccattatgcttttatgtgattatagaaaaattagatatgtaaaattacttgaaaggctttgatcatactcatacttcaaccttggtggtaatgtagtttgtgttacttgaagattctgtcccctttattcttgtgaacttctatgtttctccatcaaaatatatctagatccttcagtgcacagtgagaactcataatccccttaaacatatttttatcctgttgattcccaggaaagttctgagagagatggcatctggaggacgtgatgctgagcgtgtgaggttaaagttggaaattgtagtcgaggtgatatatcatctgtcttccttctatctgcactgagtgcttatactagtgattacagtcagatgtaacctatgtggattgcaacctgtgaatttgagacttgagtggcactgtcattgtttgattatttgggaagagagcctagtttacctacacaatgcgtgaactggaaagagattgacaatctaacaaaccgcaaaggctgtacaatgggtgacctaaacataatattattggagtgaaattctgtactttttaaatgcaaaatttctgcctctgccttagaaaaataataatttagagttgcataatggagtaatgggaccccccaagtcaagcaacaagcatcgtcacttaagcatttgaattacttagagctaagtggcaccacagccgaagaggtcgagaaatctatttctccttgcatactaaaaaataatgctgtctttagttttttagccagtgatgctcttattagttttgttccttattgtttccaaatcaaaacttacctattttcttgatgataactgacatgctcctttgttttgcacatagtctgtagattatgataaggagggatctgtcttgcgtgtacgtggaaaaaatataactgagaacgatcatgtgaagattggacagtttcatactgtggagcttgagctgaagagacaatttactttgacgaaggtatgccctaaaatttgatcaaactgcctttacctgtttactaggggaccacattatagtcttcagctaatgatggataggattgtcttaaacactacactaatggttcaaaatttggatatgattctaaatggttaaaatatggcaccaatatccggcacattccaagctgatgtgggatttgttaagccttacctgaaaagtgtggttattcatcgatggtttaaggtgatttagcatgttaacccagcccagcccaaagaagtacggtttagatggtctggtttcacgggttaaactgtttcctcaacaagagaaagaagcagatcaagagtccttcgggcagaggagctagaaatggccatggcattcctttcctgtgaagcacagcagagcacacaaagattgtgacaggccactggacgcagccacgtccacgagttgctgttgaacatgcaagggacgccccgactacagaggtgcagccatcgagcgcgcgatgtatcgtcgcatgtgaggggaagtcgccttcgagtgtgagatgacgcggccacggtgaaggcccatcgaggggttggggtcatggccactattgggacttgtcaattgtgtggggatgtggccgtggctctggagaactcgtcgcttgtgggggacattgccatcggggacatcggtgggggacatggcctctgtgaaggtctttgccggtgggtggacacggccaccgcttgagattgcaaagatggctctgcctgcgtgcgaggacgaggtcctgaagaagatgaaggagtcatagtgtttgatggattgtggaggaaacccaacctacctatatatacaagagattaactggtttcagttggtttggtttggtatgttcatcggtttgagcccaacctgtgaacaggcctacctgagagtgctacaaacagggtgctttgagctagtagatttttaatagataaactttctatcccatttgcagcttgccctttttttaactgaacctataagtgaaataggatatgcaggcatctgtgcacatgcttttttatttactgtcatatatcttgaacaactaggttggccaaatttggttcatttcttttaatagcacttgacaatgggacctttccttagctttgcaatatttatattatacaaatacccctttgcaattaaacattactatggactcagttatataaaaaaacttggcactttcatcagactgctatccttttctttccctaattttcttaatgaatcttgcacttgcatatgagttttttttgtccctgcccatggaacttgtatcttttccagcctctggtaattcatagtgtctacgatgactacttaggagttggaaagcataacgattattgacataatatagtttccttctttcagtggctgatgataatgttccccaactattctcagatacatatcgttgttgaaaattttatcaccattgtttatttttgtaaattgtggtagtccatttagaatgtaccttcttttggtctgttgtagcttacctgaggagagattgctatttctacttttgcaggaactttgggattggttagctcttgataccatccaacaagcatgtggtatgtgagaactgaaatgttactatcttctaattctgtacattccatctgtcttttcctgtcttattgctcttatattctatgatggattgatctgaatggttacatggttatcacattaggaatgctacctgtacctcaaattttagcctgctaatgcttgatatgcccattcatctagattacttaagccactgggaaaaaaacatgtggttgttttttttcagtcctgatgaattatccaacaaagttggcactatgttgattgtacaatgatacttagttactcactgaaactcataatctgttttttttttctggagaatttgtgggaagaggcctaagcttacaaataggaccttaagtttagcaggaaagcccatccgggtcctgcctgttaggagggcctaaatatctcgaagtattaaccctaatttcaagctgtcttccaaccataataatcagtataaactgattgcacatatctccattttttctgccatcacctctgagatattttgattatcagagattttgaacatattgctccccttcttatgaatagattttaatgcagagaaactcactcataaatagagtatctcttttctttcaaacctgatgtgccattatgtccagtgtttatatattgtttgcgttccatcttctgctctgcaaaattattggtatggttgtaccgcggataccaggagtgcttgacaacctttgcaaacttgttactttgacctattaatgagaactattgataattaatcaatttatcatccatcatcttgaatatgcattgagacccctagtgatatctatcttgtgatttctattgagacataaacttctacttttgttttatcaacttatcatattttctgttattattctttcttgagaaatgcaatgttctaactgagtgcatctaaacctctattagacccaactgcaagtgctgatctagcagttattctcatgcaagaaggacttgcacatttgttcctcattggtagaaggtaagttgagtcattgactcattgtgccatggcacgaccaagataatttttattgtacttcccatgatagcatgctaattgtgatgatgaaagagtattatcttaatagtagccctgtttgattccctattcttttaaaggcttgagttacctcttgcggtgattgtatttgacttattagctatggttatctaaacagcataacagtaaccagagcacgtattgaaacatctattcctcggaagcatggccctgcgattgctggttatgagtcggtatggaaactggttctgatattgtgtaatctaattgttctatctattcccaactgactttgttttgctcttttgtaggccctcaagaagttctttgaacatgttttgcaagtaaatgaaaaatgtttcctcaaggaaatgataatattaatgaaaccaatttggactgatgcattacttaatttgcctacaggctttcctgaagcatattgattttgaagtagtccaatgtgctgtaattgcaagcccaggttttactaaggtaatcctcacgtacttacagttttggttttataagttggtttggtatccatgtgtcaagcacatgatgatacaattttatgaatttagtttttgtttatcgtttgcacatgtttctgattctaaacatgtgcatgttagtgagaaaaaaactacagtaaagcctggtatcctgttagtccatttgttgctgttggtactttcagaaccatgcttgtatgacaaacaaaaatatcaacttatgcaattctcttcttgtactttctcttcatatcttaacaggatcagttccgcgattatatgcatcttgaagctgcacggcgagacttaagattaataattgagaacaaacagcgcattgttcttgcacatgcaccttcaggttacaagtaagatattctatctttgttagacaattgttgccatctactcgacctattctctttcccccctacattttaggtacatcagaacctattctgaactgtgtaatatgtgccaatttatgttatgccttctagctttctggcttgttggaaacttgattacttggatcttctctgattcatgtgttccattttcctgtgaccaattgcatggtcctagtgaaaagatcttaatataatcctgtactgaacaccatttgatagatgacctaattatgatgtatcacaaaactacagatttaacactaaatttatcacagaagtacaaatataaggtggactatcgcaaaactacagatttagtaacaaagttatcacaaaactacaggttttatatcaatttaatcgcaaagcttggacattataactcaaacataacattaatgctagatatttcaaccccaatgtctatagttttgtgataattttataataaaaaatgtggttttgcaatacttagccttaaaactgtagttttgtgataaatttattgttaaatctgtagttttgtgatacatcaccttacatctgtagttttgtgataatttggccaaagtatatgtaattttgtgaaatttactctaattatatatctattcatttggttgcctatattcccccagctgtctcaatggtctctgttttttgtttgattggttatgtttgttaaaggcatagcctgaaggaagttttggatagcccaagtgtgatgacactaataaaagatacaaaggcggcgcaggaggtaagccatattcagaacaagatatatcactaaatgccctaatgtacacctatggtgctttctcaaacagttcccccatgttgatataatacgcactaaggcactaagcacattcaaaacaatttctaagtacagacagcttctcatatttgttttctgacgctcttatatttcctttctaatttgcaggtccaagctttgaaggacttcttcaacatgcttacaaatgtaaagcttcttgaagaaaaactaccttctaacagttggattgaaatatcctactccatccgtttcatattgtaagactttctagtattgcccatattcatatagatgttaataaatctagacacatatgtatgcctagattcgttaacatctatatgaatgtgggcaatgctagaaagttttgcattgtgaaacggatgaagtacttatgtgttactgcttagacccttttaatatgcatatacattatttgtatttcattttggaaggaaatattgtttttataatatttgtggttagagctactgattctgcttagttgaagaatataattaaacccctgtcgctctgttttttttttttttgataattgcaggattcagctcgagcttgttatggacctaagcatgttgagattgcaaatgaacgtcttgctatccaaactcttttaataacagataatttgtttcggtaagttgtgttaattaaagagaagtttacgagtcagctaatttacctctatagtcttgttattttcctactgctttgtttccttttttctgctgagttcttgaatttctagttttgtaacactcacagtaaactaacatctcatatcaaaactgttggtatgttcataaaattttagtggtgagaaataacattgattcttctatttctacctgcaggaactctgacattgcaacgaggcaaaattatgtgcgcttggttgaatcggtaaaaaaattcggtggcacagtgcacatcttttcttcaatgcatgtctctggtgaacgtaagtattcgtatccatttgtacttcactataactgctcatcaaaatgcaatagaccagttcataaataattgtcacattttcatattaacctttttgaacaaggaatttattaatttgtaatttgcattagtttgctgcattgtgttctctgtgtttaaggtggatttttttttttcatttgagcagagttggcgcagttgacaggaatcgcagctatacttcgatttcccttgccagatttagaggacattgagatgtgataattccaccgttcagaattggcaatatgctaacttgtaattcatgtgtaatcctattcagttgatttgatataggtaactcttaagaaatctgaaccacagtatatcctagctgtaaatggtttgcatgccatatttgttgattgtttttttacttaacaaagtgctactccctccattctttattttttcactaacgaactttcaaacatcgagggatgtaggtagtattaacagtgcaatgcatgctttaggccaagtagccggattagccatggctgaaagcctgaaactgacttaccaggatgttggcaaatgctaatcaaatcctttgaggctttaaactggatatgatttcaactaattctgtgggggtgttctcaacaggataaatatgtgattgcgaatgcctcctctctctctttttttttcaataggactccattttatgagttaacattaatggtcctgttcctttcttatgtaaggagtggattaaattttggatactcatggcatgcttttcaaactgttaaacgatgttaaacgatgcgtttcgtgagaaaattttctatatgaaagttgttctaaaatatcatattaatctatttttcaagtttgtaataactaaaactcaattaatcacatgctattactatctcgttttacgtgaaacacttaatttttatcttcataggatgcaaacaccaccattgaatcgcctttatgcaaccgtgctatgctggagctctcctggaatcgaatactcctagtcctagccaacctgtgactattctgtcatgcattatgcctttgatgcgctttctggtattgcttgattcttgtttcttttttttttcccgtcgtcatgcacgcatagcatcctggatgttatctatttgatttttttcctctcgattatttccagattacagtggatacaagatagttacttttttttccttcaatggacggcagcaaaagctgaattccaggttaaattaaaattgaacctgtagtccagtaccgtttgcatcggtaatactacaaaaatgtgcgtggtagaactatagattatcctatgtcaccaatgtgcttctcatgacatgaaaaagaggatactgatcacgacctatcatttcttttgatcatagtttaggaggattgatcgaccacgagttgcgttggtgccatttctgattcctatctggagctatctcgttggcctcatgttcaacttgtcctggagaaatgacaatttttttgactagattatggatacgataggcttgttactgttgacgtgtcaattagttagctgctgagtcctctcattacaactttgccggtttcaaacaatattccatctagaaaaaaacagagcctaaagctgatccaaattggtaaggagtccaacaatattctgccgttactttcttttcttcgtcatgctctatgaagtgacaaagcatgcaagagaaacttgtgtggcaattctttgattttgaaatatttaaatcaaaatgctacctaggctttagaaatggaacgaattgccggctgctagagtcaaatctagctaatcagaaagcattagctacctgggtaaagcaaagcagagcacactatagctgaagtaacccaagatgatattgttatcttgggttattttaagcagaccaaattggggcggcgatgccacaggccacctacgagtggactaacaccagactgt

SEQ ID NO: 10113 - DNA, 18879 bp, Oryza sativa
gtacgcaagaccacagttaaacgagacattggaccgggatgatacaataaatcaagtttagagacctcaatgtgcactttgtaaatttgtggacttaagtgaaacctcatgacaaattagtaccgctggtcaattttactctattaaaaaacagaatactatacaaatcgacattgttattttatttagagtattaaccttgatgctaacctaacaagggtgggcgaactagcataacaaccgtatcatgtgctttaatccgcatcaaatcatcctcgagctagagagattagccaagaagataaaacccgtctaaaaaccccccgaatcctcaaaaccctaggaggagagcacggtagatcccccatttccctcctcatctccgacgcgcatttcccccaaaagaggggagcaaatggcgtcggcggcgtgctcctcgtcggcttccgccctcgtccgcctcaccggcccgatccatctgtgcagcgccccgccccgtgggtccgcgcggcggcgccacgcttccgtgcggtgctcgttcgcgccggtggagacggcgaggataaaggtcgtgggcgtcggcggcggcgggaacaacgctgtcaaccgcatgatcggcagcggcctccaggtagggcgggcctaaccttcttgacggaactgggcttcctcggttggcatctagatccatttggtagttatatttgagcataggactgatgaacaagttgatctacgactttatttccgtccttccgtgcaatcccatgctgccattcgcgtaatacccctatctagttaagcgtacgagcacctttgttgggttattattcgctattaatgctggtgtccgtggtatacttatcatacttttgaattatatcagcatctacgaaatgcgaacccagtgcattgtttagcctgaaattccagcatgaccgttgtttgttttctcaaatagtaacatctggactgtacaatttcagggcatcgaattttatgccataaacacagattcccaggcgcttttgaattcgcaagcgcaatacccgctacaaattggagagcagttaactcgtggactaggtaatatttgttgttctctgctgaactgacacaattatgaaacgttctgtatgtaaatgttacatctttcatgctgattagtctgcctacaagaacatattgatatctgatggttgtctacgatgtatcgataacatgattcacatgtctcgatgcactaataaactgtgggaaatgtatgagtatgacatattttaagggcagcaaatttcgattcaaaatagcaaaatgttgactgcagtcgctaatttattccatgcatacaggtactggtggaaatcctaatttgggagagcaagctgctgaggaatcaaaagaagccatagccaatgccctgaaggattctgaccttgtcttcataacggctggaatgggagggggtactggatctggtgctgctccagttgttgctcagatatcaaaggaagccggttatctcaccgttggagttgttacctatccattcagttttgaaggacgcaagcgctctcttcaggcaagtgtttgagtcttctccacccgtatacaattaatgtggcgttacatttgataaatagttttggttaagcatggaacaaacatttccttaggggagctgtgagttatttaagatgatgattaaacacgttttaatcattggactggtagttataatgtgccaacgtatggtacctgtgttttgttgttttttcagttcaaggtctggtgccctgtcctctgctagctcttttcaatttttgtagcagaggatctttagaataatatttagcattttttaacgaagtaatatttgtttgagttgctgttgctatacacagtttgtagttatttgccctatgtgaacccatttggttctgttggactttagtttctatacactagctgtttgtatttttcttaaaataattgtctgttaaaagctgttttgcttttgtctagctaatttatctggtctttctccatttcaggcgttggaagcattagagaagctggaaaggagtgtagacacacttattgttattccaaatgatcgattattagatgttgttgatgaaaacacgcccttgcaagatgcgtttcttcttgcagatgatgttcttcgtcaaggtgtccaaggaatatcagatattattacagtaagtattcttcttatctatgctgctgtaacttgtgatcacacaatactcatctgaaaactttgcagatacctggacttgtcaatgttgattttgctgatgtgaaagctgttatgaaaaactctggaactgcaatgcttggtgttggtgtttcttccagcaaaaatcgggcccaagaagctgcagagcaggcaacacttgctcctttaatcgggtcgtctattgaggcggctactggtgttgtgtacaatatcactggtggaaaggacataaccttgcaagaagtaaacaaagtctctcaggtgcgtgtaatatttcttgccattgtcttgaactgtctttgaagaagtatgatatagcactgtaatatgttaagtcgaaaaacttaagatgctattatcacgatcatactccacaatttagggctactggaattatgtggcctaggtgattgaagtgctttgttttgaccaatgcttatgcacgttttgcagattgtgacaagcttggccgatccttctgcaaatataattttcggggctgttgttgatgaccggtacactggtgagattcatgtgacgatcattgccacagggtttccacaatcctttcagaagtcccttttggccgatcccaagggtgcaagaataatggaggccaaagaaaaggcagcgaacctcacctataaagcagtggcagcggcgacggtacaaccagcgcccgccgccacttggtctcggaggctcttttcctgaacacggttcaataggaaaactagtagtttgtgtaccttagattctcatggaattactgagttggcgctccaatcaggcttctatgtgttattctttttggatatgtaaacacttaacagttacacatagtgattagcttcacttttattgtatgtatcatctagatgaggttgaggtcttcaggagttcagcagccgtcacgaatttttattgtatgttcaagacgacacttggtagttgttcgttgtaggcgcgacttgctggccaaatctattgagttgtagatgtggatgaatttgcacttgattgatcttgcatttttactcatacggagacgccacgtgactacatgatcgctctggtgtcttgagaaatccatttattcattcttgttggatacccagaggccagatgaagggcctgtttggtacatctcagagtttcagcttcatctaaaataggagcgaagctaggtagagctctctcacaaaataagcggagctggcagttggagctctaccaaacaggcgtaggcgtgaactattccacccagtgacttccacaggtgtgcttacccggcccagcacgtctgggctgcgtcaggccatgccgttttcttcactggcccatacataagccatagccacagaaaccagcgattagtaccataccgctgattcggatgcagaacgctctcccggaacagtataaaacaagtgccaaggcagctgttgaaaggcaggcagctgcgcagtgggcacaaagcgaactattctttcgccttttactaaagaataccgtgtgctcgctgcaaatagcagcatactctaattttttgaggggatttccagcatttggagaaccccaacaattctgaaattgaaattagaccttctaatttatatgattttcaccgtgatttgacctctctggcctagcacccctgaaccgaaagcagctcctttgtcccaggagagctcctttatatgattttagtttggatgacaacaggagagttcctttgtcccaggaacagggctcttctgcactctactctacagtgcagctgcagttcatatctcaatgaggtagattggtcctgacatctgatctcgacataggtaagcgatgcatataacgagttgttcatccaaatttgtgaaggtgaattgatctctagacgatttatagattagatagtgttggcaagagaaggtggtgatgaccaaaggggagacgattgaccttcaagctcaacgctgccgagtttattgttgcgtgcggcggcgccgtgagcccatgacagacgggaggcttggatgagtaatgagcgggaagcaagtgacggccagggtgcgcgcggcgcgccggcgaggcacgccatgatgcgctggcggcgtccttgctgtgaatgggggggggggggggggcttatcaagaaaaaccacgtttcgatcagtctttgtgcggtgcagatgatattttggggcgggaagttgtattgtattccatgtatcttctttgttactctgtacaagacaccattctaatgttctgttgaatttatgtgtggacgaacttgtattcgcttgattttactcgatgcagaaatgctagagaaatgatccttctgttatgtttgaacgcagatgagctttgcctgaacatccgtcatccggcccagcaccagtgggctacctggcagtgaatgtcttcacccatattggcccatcgccgctgatggcaaaggtagcagagcagccaccgattagtaccataccgctgctttgggtgcagaatacttccctcaaacagtataaaagaagtgccgaggcagccgttgagaagcaggcagctgcgcagtgggcacaaagcgaactattctttcgccttttactaaagaataccgtgtgcacgctgcaaatagcagcatactctaattttttgaggggatttcctatctaaggacaaaccccaacaattttgaaatagaaatttgatattttttttcaaggggtttcctgtctaaggagaaacctcaacaattatgtatgaaatagagaattgacgtcttacactctttctccatcttatatacagttgtttacttcgtcaaaatccacaagttgctgatagaatcctttgtgacgttacgctaaaaacacttcagcaaactgatctgttctttgagtactctggacggctgtcggccctactcgttttgggagataaacttttggattaaaatgacatgtttttcaaacggttaaagggtgtgtttcgtgcgaaaaatttctatatgaaagttgttctaaaatatcagattaatccatttttcaagtttgtaataattaaaactcaattaataacatgttattaacaccttattttacgtgaaatacttaatctttatcttcatttttagaacattcaaacaccaccaagatttgcatgctttagctgagatgacagcaagaggtatcctttgccccagcccccaggaacagggctcttctgcaccaacactaggcttcagttcacatctcaacgaggtagcttggacctggcttctcggttgttgagtatataactagttgttcatccagttttgtgaaggtgaatgaatctctagacgagttctagattggacaatgagctaacaaattcgcttcttccccatcgttgtcaggagaaggtgatggtcaatcacctaaggctgccaggattgttggatacttggatgcgtgtgacatccgggagtcttggaggaagaaggagcgggaagcaagtgacagccaggatgcggcggcgctccggcgaggcacgccgtgaggaggtggcggcgttcttgagacgagtgtgggagtcggagttttaaactccgagcccccttggatctctaacgaccgttcgatcaggcttctgcgccccagattaaccgaaaattattcaggggcttcatcgccaactaaacggaggcccattatcttgaggcggagtgggggcaaggcccacttcagtcggccgaaacgaggcccaaaattgtgtggcggaatatgaggaagagctctcgtggcaggtagaagcgattagtaccataccgctgctttgggcgcagaacacttcccagaacagtataaaacaagtgccaaggccaccgttgagaggcaggcagctgcgcagtgggcacaaagcgaactattctttcgccttttactaaagaataccgtgtgctcgctgcaattagcagcatactcaaattttttgaggggatttccaggatttggagaaccccaacaattctgaaacaagatttgattacctcctgttcatctgttcgtaggcatggtgatagatacgcttctaattttgcaggtcttaagatttcatcttattccctctctagtagagatacaactgtccattattcacaatccgatgtgctgctggcgatctgttccatagaaccgcaatgagagacgttgcaaaactaaaatcagaatcagaatctgctgtgacttcacacgtattcgctatactggttcatacaggtctagagcaaaccgatttgattggttgtaggttttagtactctgaaatttgcagctcaatgcttcagttaagatagcaacacaggtttctcctgtgtccaagtagcagggctcttctgcaacctacagctgcagttcacttctctctctctctggaaagatgattgcagttcacatttcaatgaggtagcttggtccatcttggcatgtgtaagtcaatgcgtacaactaatttttcatccagttttcgccgtgtttagttacaaagtttttttttcaaactttcaactttttcatcagatcaaaactttcctacacacaaacttccaacttttccgtcacactgttccaatttcaaccaaacttctaattttgatgtgaacaaaacacagcctttgtggatgtgaattgacaacttctagattagataatgtgaatccatttttaaagtttaaaataattaatattatatcaatatacgctaatggcccatctcgttttacgtatcttctcaatcttccaatattctcgctatgattcttggggaattagagagttggcgttccaatcgggcttctctgtgttatttcttttggacgtgtaaacgctgaacagttgcacataatggttagcttcatttttcttgtatgtagttatgtaccatctagacagggttcaggccttcgatcttcaggggttcaggttcagcacgttgtgctcaagatggcaccaggtggtagtagttgtattgttcgttgtaggatgggaattgctggctacctttcgtcgcatgagacataacactgttctatcgaattcatacgtgtcatccctgtattcgattaattttactcgatgtagaaacgctgcgtggagaaatgatcgttctgtttttctcgagacttctatatgtgttggatacgcgacaaagcccactagcgagcgagggaaaatattggcattttgcacttctctcttgggaataagttcacttagcgactctcaaaagtaatcaaaatctaatccgtgaccctaaactataaaaccggatatcccaacccccaaactcttaaaaccggtgtaatttgactcccttggcagtttcgaagggcgattttgctgacgtggcgcctacgtgacggtattgaccgggtctcctctacacgtggcattgacgtggcgtttagatgtcatttagaattaaaaaaatatatgcaggacccatttgtcattgacacccaaaagaaattgtgggacccacgtgtcctttctctctctcccctccctccagttccttctcctcgctgctccctctctctctctcccgcggcgggcggcgagcggcggaggcatggacgtggcgcggcggcctgcgagcagcaggaggacggcggtcggcgacagcgggaggcacacgcggtgcggttgacacgacgtcatccaccgtcaccgtcgccgcccaccgtcacgcgacctccttctccacctcctcgcttcatcgccatccgtattaacatcaaatagttactgctaactcgcacatttactggaaaaaaaactaatcttagcatagttgcatcacccctcatccaaaaccaaaatctactcctcacctttccatggacaaatcattcgcatgcataaaaaagagaaaaggaaagagaacaaaggaaagagatccccaaatgcaatgcatccaccaaaacctcccatttgcagcaagcaagattcagtgtatttgtgggacagaaagatttggcaagacgacagctactggcctaccgctgcgtgtagatgaccgccggatccaacgaagtagcagagcaagcttggaattgagaagaaaacatccttgtggtccagcaagggcgacgccgctgggcttgctcactgcctcttgctcgccgcggatcctgcttggtgcggcttggtcgggtcagtggcgaatctaggatgaaaatagaggtgatgctttatatttaaagtcataatacaaaataatcatatactccctcctttcatattataagactttctagcattgtctatattcatatagatgttaatgaaactagacatatcatctatatgaatgtggataatgatagaaagtcttataatatgaaatgaagagagtatctttgaactatatcaacaatattttaaaatcctgcgagggtagaaaatggaataaagaataaagaaaatggaataaagaataaagggagcaagttgattggaagatatatatataggtcatgggctgcagactgcaacagctactggaacacaagagtaaaaataatccacaatataattaatgattacaaatgatctattaaattttcgtgcacatcgtttctttcaccctgaacttctctagccaaagagccatcactgcttggccctttgctttttgctgtcaattttgctggcagtgtaaactcactaagcatagatatctagggtcgattcttggcagccagagcaggggctggagcccctaccagccccaacagtggattcgccagtgggtcgggtcacggatgacggctgttgcttgccaccgcctggctggcgtactgatgccgcagccgtcgccgctctagtgcttgccgccgccactcccgcgcctccgccgctcgcaggcggccgcgccatgcccgcaccttcgctactcaccgccgccgccgccgtcgccgcttgagagagagagggagcggcgaggagaaggaactggagggaggggagagagagaagggacacgtgggtcccacaatttcttttgtgtttcaatgacaaataggtcccacacatatttttaattctaaatgccacctaaacgccatgtcaacgccacgtgtaaaggagactcggtcaataccgccccataggtgccacgtcagcaaaaccgtcctctaaaaccgccaagggagtcaaattacaccggttttaagagtttgagggtcgagatatccggttttgtagtttagggttacggattagatttcgatcacttttgagggtcactaagtgaacttattcctctctcttgcccagcggcgtcaccagcccagcatcgttgggctgcctgggccatgcacgctgcgccgttttgtatcttgcctggcccgaatccacggatagcacacagcaccacgggaaagagtcgcgcaaccagtgattagtcccataccgctgccttggatgcggaacgatactgggaacagtataaaacaagagccaaggccgccgtttaaaaacaggcagctgcgcagtgggcacagagcgaactattctttcgccttttactaaagaataccgtgtgctcgctgcaaatagcagcatactctaattttttgaggggattttctatataaggagaaccccaacaattatcaaaatgaaattaaacttatttttatttttcctttttttttatgtctggtcacctaaattgaagcctacgaagggcctatgcagttgctcacgcatgttacgcagtactgtattgctgttttgctctcacgctgtcacgtgatatcagaattgttttactctcacgatatgtcgatcagaattgtatccaaattcacaactcgctgatggcatcccgatttgctggtgcagaggcgaatggaggttttgcttcgggtggtgatcagtcctcaaaacaagaccatctgtctgatggagtcagaatgaggcttgcaaaactgaaagtagacaaaaccgtctgtctgatggaatcagaatgaggcctgcaaaactgaagttagagtcaaaatccgctgtgactacactaatgttggctaatactgatccacagtccagagcaaactgatctgtttgtgggtagacagcgtagttttttagtagtaagtacaaagacatatgcagctcaatgcatgctttaagtcgagatgacaccaggagatcagtctccttgtcactgcaggaagtgggctcttctgcactcaaaaggtgcagttcatatctcaacgaggtaacttggtcctgacatagtgacatcttggttcacatcacgatgcatctaattaattattcatccacttttttttttttatctccagagtccagacaagggctacattagatcatctccaacaacctctacaaatagaactctctaaatacccatatagccaactctccatctaatttggctggctagtcaaactagctattcacttcaacaatctctccatctatcctctctactttgactctatgacaccgggacccatatgtcagcctctcccttctttctccccttccttcccctcttcctcttttctcacgttggcaggatacaggcggcggcggcgaagcggcgaggggacagcggtggtgggcgcggtgggggccgacggctgcggcgaggggaggcggcgggccgcgccgcgcgggggccggcggccgcggcgagcggaggcggcgggccggcgaccgcgacgagtggatgcggcgagcagtcgcgcgggggccggcggccgcggcgagcggaggcggcgagcgtcgcgcggaggccggcggccgtggcgagcggaggcggcgggccgcgccgcgcgagggcccgcggccacggcgaccggaggcggcgggccgacgaccgcgacgagcggatgcggcgagcagtcgcgcgggggccggcggccgcggcgagcggaggcggcgagcgtcgcgcggaggccggcggccgtggcgagcggaggcggctgccgtgctcttccctgtgctcgagctcctcccaatgcggccatgcctcctcgtgctcggttgccgtgtgggatggaggatgggctgtgtggggcccactattggtcagccaaatagactagccaaatttggctagtgaagggagagttttggccagagccatccggttagagaaacagttggagttagtttttttagttagaatggctaaattttgacttaaagagtggaatggagaggctgttggagatgctcttagataatgtgtcgatgaaattgcctcttccaccattgttgttacttgtcagaaggtgatggccaaagggaagaagattcatctggaatctgccgttggtgcgtgcagtggcgtcgtggctaaagaggaggaaggagcggggagctggggacggcgagcacgcggcggcgctccggcgaggctagccatgacgcggtggcggcgtttttgctacgaacgtggcgttcggagttaaaaaccccgaccccgtcggacctgttacgaccgttcgacatgtcttgcgcggtccagattagcttgaggcgagatggggctcggcgtgtcaaacagaaacggcccaagaaggcccaattttaggatctctcccatcgatctgatccgcccaactccgatcggacggtttaagatcgacctgaatcggatccctaccatttggtgcacgtttgggcataagtcacagtgctagggtctcttttgcaaaattctcgtggcacttcttttccggaccgatctgacccgtctaactgcgatcgtacggtcagctctgagcgtagaacgccgccgccggaggcggcatgtggcggccgcgctcctgccggagacggtgccgctgccgcgttctcgccacgccggccacgctatgcacggcggaggagcactcccagggtatccgcttcgtgcgtgccgttaacctcgacctccgactctccgactcatcggtaagtcattcctcccctacctctccccgctcaccagctgctcgacgaaatgctcccctacaaacactggagtcccgaacgcgcatgcgcataccatgacatagtacagtaatctgatctcaactcttccttccacctagcagtatgcatgatgatctggtctattcatctgcgggaacaattcctcaaaacaaatgcacataactagttaaaaactgtatacgattgctgctacagatttccgaatttgatcctagcagcctatagatagattggatggctatccattatatagcgccgtgtgctaggtccaataatgatccttatttcttaagtgatcagttactaaggtgcatgtgcaaggcagcgttctcttggtcaagaccaatctgttgtgacttgaagcccttatcatgatatataattggataacaacaaaaaacccaattaattaagctgccatggtgagactgtaagagtgaaaagaacgagaactagacaaatgggccaggctacgaatcgaagctatgattcatcaaatagatgctagtcaaggcagaaagatacaggtacatagagaattagatgtcagtcacccatgctgataaagaatgtctccatgttccctatatataggtgtgcaggagcaccaaccgaccgaatgcttattgtccatagaaatcctgatgcgttcaggcaaaaacatatcttgcctcgtaatgtgattggtgtcattggttcaatcaaacagattttgagccttgtttgattccctaacttgctggtcaatctggcgacacatattattggatgccatattcaggtctcagggcttgatcgtagtacaagtaatcacatgcaagctgcacgcagtttcatgtagcatgggcttcaaacttgtagaactacacaacatggcaccggggtccgggaacgacttgacctagctatgttaggcttgtgcatacactactaggctcgttttcatgtcgtcgctagcttgctagctaggccggctattagaccgtgaatcaaggtttaatatgatctattcattatgaaaatttgttattatagtcgtatcaaagattaatttaattacactcttttgacgagcacaacttatatgtgattagaagctacattttcttttctcccatgtgcaaaagattatcagacttctacaggaaattagggttgggatgggatgaaaccatccttgattttagggttgggatgattccactcgtgtgtttggtttgtagaatagtacgatcccagtttttttcttatttggttgaagggacgagagagggatgggatggacaccgtttgtaaccaccgatgacggccggccgggcgaaggagcgcgactatagcctggcaacaagaaggcggaggagaggcgtgagcaggcaaagcaaccatggccgccgtcgccgcctctgccctgacctccctctccaccaccgcagccgccgccagtggcaagcgcctcctcctctcctcccttggctccctctccctctccttcgcctcctgtggccgcgtcgccgttaggccccgtaggcgggcgtaggagcgcgacgacggacgggcgggcggatccgctgccaccgagtcccccgcctccagatctgccgccgcacccgtccccatcgccgaatccgccgccgccatccccaccacgggatccaccatcgccgaggcccccgctgccaccattgccgagcccgccgccatcgcccgagccgtttgcttcgctcgagcccgccgtctcctaagggcgagtcacgccgttcgctcatcccaggtgggacgagttcatccgccacatttggctggatcggttggtcccggatctgagagaaatattcttctccaggggactaacccatcccactcacctctaaactaaacacctctaaaagtgggttcgttccaacccatcccacccttgcaaccaaacactaaggagctaagcatgcatcatgcatcaatgagacaaacagtatagcttagccacctaacaaaatcagtatctcctgccttttcactggacaaaatgacaatcggccgttacttttggggtcacatggactctgattaataattaatcgaaaattgtgcaagggcataaagtaatgcgtgttagtcacttgtcgcattcgaatatcgttaaaaggtcgcattactgatagcaccatttttatatgcaatatgcttatcatcatcccatacttgatcagactaagcaaactaactgttaaacttcctgtataaatatgcatggagaccaccatgcttcacactccactccacactggcacactgcccatatccatctattctgaatagagcctctgcattgagttaagaactaatccgtttgactaattctgtttttgcacacaagtcgccataatcaccatgacaatggccatggcgtcaatgaagggagagaacgtcactgtatctgcagcagcagctcctcggatgaagaagctggcgagcatgctttgcatgaagggagggaacggcgatggcagctatctcaacaactcccaagctcaggtacgtacgacgtttccaaacacgagctttacagaaagcaggggcaaatcctgtgaaatgaatcactgggatcttaactagggaaactattctaatcgctcgaggggatgttccctcgtttgctcaaaaaccatctaaacggttatgaaaaattctaaaaaaatttgacaacattcatacaacacatatatacaacttcacaaaagtccaaactcaactcacacacgtcgagatataaaaaagacaaattcagcgtatgaatagtagcgtactgtttatatctaaatttgtcttttttgtttctcgatgtgtagatcgaatttgaacatgaattttggtggactagtaggtatcattatactttacattatcaattttttttttagaatttttcacaactattagcatcgaatttggaagaaaaatgtatacgagaggatatcccctcgaggtattagaatccactcctcttaactatacatttagcaaagaaaaagttaggatctgaactgaacccttgtgctctatgaaatgatcatgtggatgtttcaatcgtctaacacttgtgtttaatatattgaatatggctttcagttactgcaacaattttttttacaagtacaaaaactcaaaaattttctgaagatgtgtgcaaaacgacgagtgtttttgtcctgcacaagatatcagatgtagctagccatccaatatttagtcctactttactgtacaagtaaatgcatggtagttactataatacaggttaagaattgatagcgtcagtttttaactgtaaactggctataaataggctctgcacgcccggcgcatgcttcactttctggaggagacactggacgcgatgatggaacgttcgtccagcgacaagctcttcacggcggccgacctgggttgctcctgcggcagcaacagcctcttcatcgtcgacgtcatcgtccgccgcgtctccgaggcgtacgagtcccgcggccgcgacgcccccgagttccaggtcttcttctccgacctccccagcaacgacttcaacacgctgttccagctgctcccgccgctcctcgcgccggtggccggcagcctcgaggagtgcctcgccgcgggcgaaggcgcggcgacggcgacgcggccgtaccacgcggccggcgtccccgggacgttctacgggcgcctcttccccggcgagtccatcgacgtgttcacctccaccttctctttgcactggctctcgcaggtgccggaggaggtcggtgacagcgcgtcgccggcgtacaatggcgggcgggtgttcgtccaccgcgccacggaggccgtcgccgccgcgtacaagcgccagttccaggccgacctcgcccgcttcctgcgttcgcgggcgcgcgagatgaagcgcggcggcgccatgttcctcgcctgcctcggccggagctccggcgacccggccgaccaaggcggcgccggcctcctcttcggcacgcacttccaggacgcgtgggacgatctcgtccaggagggcgtggtcgagggggagaagagggacagcttcaacatcccggtgtacgcgccgagcctgcaggagttccgcgacgtcgtgcgcgcggacggcgcgttcgcgatcgacaggctcgagctggtgaggggagggagtccgctggtggtggaccggccggacgacgcggcggaggtcggccgcgccatggcgaacagctgcaaggccgtggccggggtgctcgtggacgcgcacatcggcgagcgccgcggcgcgcagctgttcgagcggctggagcggcgcgcggcgaggcacgcgagggagctcgtggagaagatgcacttcttccacgtggtttgctcgctctctctcgcgccataacagcatcgcaaacggatgcgtatagcagcatccgcatagtagtaggttcggtgaacccgttttgagtggttgcacacgaatttgctgcagctttctttcatttccttggcttccaatgaaacgagttctacgtgtacgtttgtaccgcacgtccacgtgcacagtgatttgtagttgtattccctctgttttatattatagctcgtttaattattttttagttaaatttgtttaagtttgatcaagtttttagagaaaaaaatatagtaacactttcaatataaaacaaacatattatctaaatatattcaatgttaaatttaataaaacttatttgatattatagatattgctattttttctataaacttcatcaaacctaaaagaaaacttagatcaagaaaaaaaatcgaacaacttataatatgaaacggagtactagtgagcatgcgtatttgaaacagatcgcttgattccatggttaaacgcaactacgcaaatatgattcacatagggaaattctggaagtgaaaaataaattcagcaaaaatattctacggaagaagcaattgctgtaccctctcgcagtcttgcttggcactgtacatgtattgtatggtgtgttggggagttctgtgactatacagcaaaatatgtgggtcaaagatccaggattatgcaatcgttctggaaataccatttatttgggaaatttggtcacgaccaaacagtaaattatcgtctcaaaccttacatttcacactgaacccggagaggcagagaattctctactgtttctaacttcacaagctaaaggaacatcaggaaataaaagtcatccgttcacgtgcttcagactaacatcttatcgcacatcggtcctctgtactgctcaaccaaataatgaccgacccttgtttcgttcaagccgagcctccctctgttaataataaaatacaaaggaaatgaagcatactcaactggaggaaatagtatgagaagtaaaatgttgtgatcattgatcaagcatatatagaactccttggtcattcttgtttatgatataaagaaagatttcgataggcattagtccagataaataaaaacattcttgcaaataaagctcatcccagcatctgaatatatttatgatatatagtcaagttaactttgctcgcaacttgcacgtaaagatcatataccagtttttacttgaatagatttgtcatgggcactgggaccagaggccgaggcccaagattatgtatcaaatatttaaacctgtacgccattatcgcttctctacataggtatttttcagactcaaatattactactgaatcagctaatgtgtttgagagagatgtaacaggagttcaattatcaactaacaattctgatgtagcagattgttgttcatgtgttctggcaaatattccatcacaaacaagaacacatcacagagaaattctaggtgaaagtgatgttttttatacaagcactaaaattgcacattgagggcgctttggaatcagaaaaaaaaaggtttaactcaggaagacggggaagatggagagactgaaggttcagatagacaggcataagatgacaaaatattcaggccacctagaggcaataattttatggtgagttcgtaatgggttcaataactgactactgtaaatatctacttctacggtgcaaacaattggttatacctgaggagaaaggaagtgtagatcaagtcaatagtgcttactagtctatggaaatcttatataatggcctcggatttttatcagcacatggaaggaggaaaattaacagacaagagcattggtaagataggataagaacaaaagcaatcacagtgataaaagagggccataaaattaaactctaaacagaaacagtttccaagcgtttttctggtgaaacaataactactaatgtttgtttgaaggattaacaatggtacacccatggagtcagggacgctcaacaatgtacttgttggtgaactgaatgaaggtgtggcacaccatgtcgcgctgccctttgggtaagcacatcctaattcttgctgtataccgagccattctacatctacacaatttcctgaatagttttgtttttttcaatatcatgtacagtggcggagtcagcgtgggggctggggg

SEQ ID NO: 10114 - DNA, 29945 bp, Oryza sativa
cccctaccccctaatgaatcattagtgtccccattaagaccccctaaaatttaaatccatatatctattgcaagggggctaaaatagaccttgtctgagattgttagaaggtccaaaaggctgagtagcccccactataattttattctggctccgccactgatcatgtaggaacatgaagagcatatatagtcactaatattagcaccacatgacatgatgacagtagaggggaattatcatacacgaacaggacaatatggtgaatatgccaatgccactggtaaggtaatcagggtcatctttggccaaactgtgccaaaagttataatttaggatccaccaaaagtgcttaaggcatgtggccagacaaaaaaccgtcaacaagaacagaaaacaaaacatattgtcttgcacgatcgattggggtcgtaaatcatacagtaccatcactatttactttagacagattaggggaaaataggataatagcaatacctctctctttttgcactccttatagtcgtcgaactgctgctggcacttgctcttgtcttggttggcctccaaacctgaagaaccaacacgaacagaatcagagatcaaccacacacgcgtgaaaatccgagctctccacatagtatgatgactgcgaagggggtcaaggaggcggcgaggagatgggggtagttagatcaagattaggacggatgcatcatacacttgagggaggcggtgtactgggggaagcagtcggagtcggcgatcctggcggcgctggggtacggcggggacgccgccgccggcgacgacgcgcggtgggtggggggcgccgtggctgccttcgccgtcgccatgatgccttcttcctcttcctcttcctctctctgctcagcgttgcggggctttggatttttttttcttttttctttggcctgaatagagtccacatcggcagtaatgggcagaaatatctatagacgttgggccgtgcagcaactcgttttgggccggaatccagcccaacacttgcaagatgattttttatttcagggagttgctaaccgtatatatggggaaaacttgggttcatttgttactcctaaagtcctaaagaagtcatttggaagagtggaatcggccaaagttaaacaattcttggcatgatatcatggttggttggcatgatatttagcttcagaacaaaaccttgtacaatgagctaaatatcatgcaaaaatgtagtacacgatcaaatttaggcatacgcagttttcagaacaaaagaagaaaaaaatcaatgactgtatagtgtatacacttccaatagacatcttgtgcctacagatagaggccattagactgtgtacaagagctgagtcactgcgtcatagataactatttctttgttgattactgcagttgaaatttcgtcgaagtatacgagatgttgagttcctccgaagcaaactactcccgagttgctcagaatatcatctgattagctgccatctaatcgataaggtgtaagcacgaaatagaaaagacggagtgctatcatattgacaaagcaaagtcttctacaaaagtattaaactgacctggacggcaataattttgcagtctcgtgcaacttggtcaataaaaaaattgttttatgcaacttttggttcctatatataaacgtcattcgtccatagcaattcaaacttcaaagtctcgtcctgttcatcttctccaatgtgccctgtgaacggaaagctgcagctgcacgatggcagaactgcctaccacttccagcctgccaagttctggcagaatggtaatgtacaccttgcccttattgttctatcattgtctgcttgaatcatggcgaagttcataacttgtttgtcaaatcgtgtttggatctctgaatttggatggacactgccgctggcgaaactgaacagatccaaatggtacgatgccccttcttcctcctccatcattttcttttcttccattatattcagtcattcagaatgagtccatgcacgaactcttcactcttgtgagcttaaaaacctgtaatcgaaaggtattagtccacataattaagcatattttaccatacacaataaagtttggatgatcattgccaatcatcaggttgtcttggtcatgatcagcataattgcccagtaatggcagtaattttccattgaaatggcagggcctctgtaccacaacggtttgtaccatttcttctaccagtacaacccgcacggcccgctctgggacaccggcaagctctcctggggccactccgtctccggcgacctcgtgaactgggccttcctcggcacggcgatcgaccccaccgacccgttcgatgtcaacggatgctggtcgggctccgccaccgtcctcctcggcggccgccccgccttcctctacaccggcagggacgccggcggcgtgcaggtgcagaacgtgtccttcgccaagaacccgctcgacccgctcctccgcgagtgggagaagcccagctgcaacccgatcatcgccttccccgccgacgtcatcaacaacaacttccgcgacccgacgacagcgtggctcggccgggatggcctgtggaggatggtcgtcgccgccgaggtcgccggcgccggctccgccctggtgtaccggagcgccgacttcctccgctgggagcggaacgccgcgccgatgcactcgtcggcggccgtccccgtcctggagtgcccggacttcttcccggtggcggagcacggcatcgacggcctcgacacgtcggcgaacggcggcggcaccggcgtgaagcacgtgctcaagctcagcgagttcgacacgcaccaggacttctacatggtggggcggtacgacgacgagggggacaccttctcgccggaggagcctgaccgcggcgacaactgccggagatggcgctgcctcgactacggccaggcgtacgccgccaagtcgttcttcgacgcgcgcaggaatcggcgtgtgcagtggctgtgggtcaacgagtacgacagcaaggccgacgacgtcgccaagggctgggccggcgtccaggtcacctcccgctcgccaccatgcacgccggcgacgtcgccatcgatctgattcggcgacgaactgaatatcttgagctgccgtgcaggcgttcccgaggaaggtgtggctggacggcgacgggaagcagctgctgcagtggcccgtcgacgagatcgagacgctaaggacgaagcgtgtcgggctgcagggcacggaggtgaaggccggcggcctgcacgagatcgtcggcgtcgcgagctcccaggccgacgtcgaggtggtgttcgagatcccgaacctggaggacgaggccgagagcttcgatcccgactggctggatccccacaagctgtgcaaggacaagggcgccgcctccgcgcacggcggcgtcggcccgttcgggctcatcgtcatggcctccggcgacctgcaggagcaaaccgccgtcttcttcagagtgttcaaacaccatggaaagtacaaggtcttcatgtgcactgacctcacaaggtaattgaaagttgaaactcctccaagccaattaaaacttaaaatttgtgacccaaacgattaccaatttttgcacaattttcgctgaaattgcatacttgtaggtcatcgacaaaagcagatgtgtacaaggacgcttacggaggattcgttgatgtggacatacagaaggacaagagcatatcactcagaacactggtaaaattctgtcactaaaatcttagttcttcagtacgtaaaccatgcgcatgaactgaaatcgaacgaaaattcagattgaccactcgatgattgagagcttcggaggcggtggccgagcgtgcatcacaacccgggtataccctgagcacgcagcaacaagcagcagtcacctgtacgtgttcaacaatgggtcaggcacggtgaatgtgtccaagctcgaggcgtgggagatggccacggcgaccgtgaactctgcagatgcattggacgcaataacgcgtagctgaaacgtcttagtatgcatggcttggctaattcgatcaatggttactgtgctgtggccgatcgattttatcatttatcattcatcagtcacacgaccttcaaggccatagcctgcctgtctggaggtttattgccttattcccaggataaaataaaggttgtatgttacaaatgtttgatcggttctcaagttcacacagtgatggatgttgctattgcagattatattactcttaagtttttaaacgaaccgacactaacaccaatttcattgaatatagtaggagagaggatacttacccgtaaaaacaggaaaaagatgttatatacagagttttttccgtaggcttaccactctatttataaggataagccaagcgaagaattgttaatctttcatttggctctgaaaattctaatcacctgcaaaagaagccgcttgatcgatcgagtgcagcagaggcaaatggatctcttgtgaattgtgacagccaaggtttagtcaaaagacaatggtggtaggttgatgcaccgaagtaaacaaatattgaattactcagcagagctgatctgattagcaccgatcacaggttggtccgcatgcttacgtacaaatatcgtcgcattttatatgacctaatggtcatcagcgattaagaaaacattagtgcgcacatggtggcaggtgcttaattaacatgtattaaactcggagacttgtaagtcttctcaaatttgcaaactctactgttttgtttgatagttttgctagctgctgcttcactctactgttcggccatggcgttggctggattgcccctctccgtctttgccatcgctgtccatttttgccttgttttctcctcctcctcttctcctccggtttgccctgcaaacggccaccgtgaccgaacggcgtaccacttccaacccgccaagaactggcagaacggtgcgtatgcaattacctctctgagtttctgtgaattcttgcccaaaaatactatcaattcccgttctctgatagtgtatactgtattttcatttggatatatctggatgaactgaaccatgtgggaacggatgaaaccaattagatccgaatggtacgtgttttttttactgatactctgctcatatttctgtcttcttcaatccatggtaatttgtaccttaattagggcgtagtgaccattaggttgttcttaatatgatcagggcctgtgtactacaatggcatgtaccacctcttctaccagtacaacccgcacggcgcgctctgggacgtcggcaacctctcctgggggcactccgtctccggcgacctcgtgaactgggccgccctcgacaacgcgctcgatcccacagcgccattcgacgccaatggttgcgcgtcggggtcagtcaccatcctccccgacggcgtgcccgtcgtcatgtactccggcatcgacgcccgccgccggcaggtccagaacgtcgcgttccccaagaaccctcgcgacccgctcctccgcgagtggaccaagcccgggtacaacccggtcatccctgtccccgccgacgtctcgccggacaatttccgggaccccaccaccgcctggctcggcagcgacggcctgtggcggttcgccatctccgccgtggccgacggcgtgggcgcgacgctcgtgtaccggagcgccgacttcctgcggtgggagcgcaacgcggcgccgctgcacgcctcgcgggacgcggtcatggccgagtgccccgacctgttccccgtcgccgagcacggcgaggacgggctcgacctcgacgcgtcggcgatcggcggcgccggcgccggcgtgaggcacgtcctcaaggtcagcatgccggacaccctcgaggactactacatggtcggacggtacgacgacgcggacgacacgttcaccgtgccgccggaggacctggaagcccacggcgatgactaccggcggtggcggcggatcgaccacggccacctgtacgcgtccaagacgttctacgacgcgggcaagaaacggcgcgtgctgtgggcgtgggtgaacgagtccgacagcgaggccgacgacgtcaccaagggctggtccggccttcaggtcagcgcgcccgtcacgatcaacatatacaatggcaacgcaatcgcaaccctgtgtgctcagtgctcactggctcgatcgtgcgatctgttttatgcagtcgtttccgcgggcggtgtggctggacgagggcgggaggcagctggtgcagtggccggtggaggagatcgagacgctgaggcggaaacgcggcgttctgctcggcggaaacgaggtggaggcgggcgggctgcgcgagatcggcggcatcgcgggctcgcaggcggacgtggaggtagcgttcgagatcgcgagcctcgcgggcgccgaccgcctcgagcccgaccatttgcgtgaccccgacgcgctgtgcggggagaatggcgcggcggtgcacggcggaatcggcccgttcgggctgctcgtcatggcatccggcgacctgcgcgagcgcaccgccgttttcttcagggtgttcaggctctcgcacgggtacacggtcctcatgtgcacggacctgacacggtaagtgtaaaaaaactgacatcttactcgggctgggctaggagaaatccccgtattttgggccaggccgcctgaaggctgaaacgtttagtcgagatctcatgtctgttcttgggccaattttctatttgtacaggtcaacttcaagagcaggggtgtacaagccatcccacggaggattcgtggacatagacatagagaaggacagggctatatcgcttcgaaccctggtgagttcacttcacattttgagcgctcacctgacaaacatttggcactgataacatgctcgacctaacgaattgggcagatcgatcattcgatcgtggagagttttggcggtggggggcggacgtgcatgacggctcgagtgtaccctgaacatgtagcaacggggagcagccacctgtacgtgttcaacaatgcgtcagatgcggtgaaggtgtccaagctggaggcatgggagctcgcgacggctagtgtcaatgctggagacgacgggctgatttcgtatggtggtcctgtatgtgctgctcaagtgcagtaatagctgctggcatatgctctatagtactccctctatttcgaaatgtttgacactattgactttttagcacatgtttgaccgttcgtcttattcaaaaacttttatgagatatataaaattatatgcctacataaaaatatatttaacaatgaatcaaatgataggaaaagaattaataattacttaaattttttgaataagacgaacgatcaaacatgtgataaaaagttaacagcgtcaaatattttgaaacggagggagtactctgtttactccagcatgcacgatggccattcattctgaacttctgataggaaatagccatcgattggacgcagtgtgtttctaccgggcgcggatgaggtggacgcgcgcgagcggcctgctgtgagtagtgacttcaattgggaacaggataacaaataggtgttgggttgccggctgcgtttgatcgataggcggaatcgcaaggatgtgttgtgtacttgtgttggagatggcgagcattgatcgtgcctcggcgacctgtcaatcctcaccgggacggcgagaccgggtgcaatgtatgggctcatcgatctaaatcgggtagtaaaggaacaagttcatctaaggtcctttaacttgacaacgaatccgattttcattctttaaccaaaaacgtttttgatacaacggtccttgaaataccaaaaccaatacaatataggtcctaactcctaaggtagtatagtcggtggttttgtacgacgtggcaatttgacttgggtcagcgccgctgagtcagtgtagggcccacgtatcaattaagttcaccgtcttccctctcttctcatttctctccaggcctccaccttggtagccaacgggagaggtggccggcgacgagcaaccatttcggtgggagaggctcgcggcggtcgtcgagagaggacggtggagaggtgcacggcgggtgcaggctcgacggctgagggcggcagccagcggggagaacggtggggctgacgaaggaggctcacggcggttggcgggtagaggctcacggcaaccccttcctctttccctcatcgccacggccgtgcgctgctgtcggacgtctttatctgtgtgtagatctggaggtgaggaggacaataacgacgcagcaacttcccatcctgatttggtgtagatcttggacccagtcatcgccgcccctcgtcccgtcctgaccttgggcagcggcggaccttgggatgggagttgctgcgtgtgggtaaggcactgtcgccagtgtcccgctggatccctgttggtggattccgccagccgaccgtcctcctcaccacccgccgtcggccgccagcctcctcaccgcccatcgcgggccttctcctcaccactgtaacgccccgattttcgttcgggattaaaaagcaattaataatgcatttcaagaaattatattaaaagttaaatcaatttaatcaagtgaaattatagaggaaattaaaatttcctttaaaaatcattggccgagaatattttgtaatattctttgtgccctaaaatactctctggatttttttcgcaaattttcggagctcaagaaataattttaaagtaacaaagatcatttaaccaattaaataaaaagaaaacaaatttaattctccttccttcccttttgggcttgacccaagccttcccctcctctcccgcaggccgcgcgcctcctctctctctcggccggcccgcgccttgcgaaagtctactttacgtcccccggtttccttcctctctctccatccggccgacaggtgggaccggcggtcccacctgtcagctcctcctcctacctctcgccggccaaccccaaccgccattgccgcccacgtcgccgcaaaatgcggcgccctcccgcacccgagctcgcatccaaccacgtggacacaaccccctccacgtcctccaccttttcccccactcaccccgcaagaaacggcgccggtttgacctccccacgagctccacttcacctccccacgtcaccggccgatcccgcctctcccggccacgatctccatccccgagccctatataaagcaccctcgtgctcccctcctctgttttcccctctctcccaagctcccccatgcccggaaccccctcctccccgtgagcccaagcgccgccgctcaccggcggactccagccggccgctgccgccgctaccgccgtccccgtgccgcgccgcttgcatcgccggcctcgccgcgctttgccgcatcccgtccaccgctccgcttccgcaataaaccacccgggcaccgattccaccgtgaacccgagctccaccgccactttgccgactccggcagcgcgccaccgccgccctagccaccaccaagccacgccactgccaccgtcggcttcgccgcatcacgtagcaccccggcctctgcttcgttttcccgttccaccgcagcaacaccatctccaccgcgaagccgaggacgtcgccgcgtttgccgtcttcggccgcctcttaccgctgttccttgccacctcgcgccacaccaccgcctctactgcgttcgccgcgctcccccgtaccccggccgctccttcaccttcgttggagaccgccgaatcgccgccgtcgtcttcgccccgtggagcgccgccgcctccctccgcggccgctccctccgtcgccgcgcctctcggtgagccgcctccctcctccttttcctcttcgccggccgcctcccgtgccagcgccgcgttgcgccaccgccgccgccggttgtctggccgtctgcgcgccgcccggccatccccagccgtccgatctgccttggccgatctgggccgtccaacccgtggaccggcggtggaccgtccttgtggtcccggtccacggtggaccgccacctcgtctcgctgacatgtgggccccgcctgtcggcgccggccccctctcttgctgacgttagcggcagtccttttcctttgtgaaaatatttaataattgcgcaataaatcattaataattatagaaattcatttagtggctcaaaacttctaaaattcatatctaattcattcgaactccaaattgggccatttaaattgcaaaattcatctaaaattgagttctacatgtttgtttactttttaggtactgtgtccttcgtttttattaggtttttcctcgttttgcgtgctagcgtgtagaatccgtcgttttggaagatcgcggtcgcgaggaaaagagttcagaaaatccaagtgaagaagcaaggcaagtcacacattccccttgagcatgttgatcccaatttacaaatgttttactgtttgcaaataaatatgcatgttttgctaattacatggggtcagggttttacctatctgctcgcttgtgccatgtttacttgatatctgtcctttgtcaaccatgggtaataaatcgcctagcttgtgttactttgatgacctagctagaactatatgcttagccatgcttaattaccactagctcagtcgatgggataattgcagtattagacattctagtatcttgttgagctgcgtgctcgagacatctggccatgcttcatggtcgtaattatccaactaaaatgcgactgaatggtgggctgtgggtgcatggttttgctggtcgcacccatggcagttaaggactggttcgcgggatgccctggaagaacttatcgtacttaccacaagccagcgtgggcaacggctgggcttgtagtgtagctttcctctagtcaatgcatccaggcaagggtgggcgtgatggagcggggcgggccctgcgacggcctctgtcgcttccggattcacctaggcacgagaggggactgcccgttgcccgctggggacgggggtgtaacctaaggtgtggtgtgcttggctagagggggttatgcgaagggtcctgtcacggcctctttccggtatgtcgtggtggcatgtcggcgcacggaaacgtgtcgtggggatgtgtcttgtgggtacagttgtacacctctgatcagagtaaagctattcgaatagccgtgcccgcggttatgggcggtcgaccagattcaccgtgattagtcccatcttaataaatcgacccaatacactgtagttcaggtgggttggttggacctgttcaacgtggtgtagcgttgataagtggagatttaatgttactttaattactcaacagttttactgttttgctcaataaaatgttttacaactgcctttatgcaaatagccacaaaccatccttgtatccccttgcacatctgcattgttggtgtggcttgctgagtacggtggttgtactcagtcttgctattattcccccttttcaaaagtgtagtgcttctgagctgaagatggagttagaggaccaaggctcagaccccagttgagttttgcctgtggagtggagctgaagcctcactaggatcgcctttttccgctgctgtcgttctgtttcggtgtgaggactaagtgcctgttctgtaagtattttacgctttatttacgtttggaactgtatattacttgtcattttgtgtaccctggctggtcctggacagggatttaatacgcaaaatagtctggaaatttgggttaaatttctgggcgtgacaaccactctcccccttttctgcatcttccccatcgaagtaacggcggtggcttagggatggcgtggcgagcaccttctcgagctctacactaaccagcctcgtcgagctcccatgccgaagaagcattctcatatggagagctggttgctggagaggctctccaaggccgagtgcgaaatctcactgatggactagactgagaaggaagccaagaagatccaacaagaatacttcacagatgctatctctttcatgctccaaccacgatatgatcacctccgcctatcatgaaccccccaccgccagatgtcccaaccaccattggcgccgcagtcagcctcctccggctcctccaacaacgggactgtggtggccgttgagatgggaacaagggggaggaagggagataggtgacgaggccttgatatgtgggacccacactaactcaacactgttgatctgtgtcaaactgtcacgtcaaacaaaactaccaactatactgctttggggacaaaactaccatctatactgccttggatggtcaaagattaaaatatttgactcaagacaaacttagaacgatgagtaatttgaaacagaaaaggtagttctactctgtaaaaaaaaacaatcctagagcatctccaagagatgtcttgtattgggagtatcccaaaagatatcgggctaaaaaatcaccctcatctccaagagtatcccaatacgtgagtccaaaaaaaactttaaaatcttccatgtcatcactggtgggtcctcctaaattgatttttctttaattgggagtgcgtagagtacccaaaactagctcctatttggttggattttggatgtgcctaaatattggaacctcctttgggaacccgttgaagggttggttttacccttaattcccaaaatttaacttttaggaaacggattaggcctcccttatagatgttggtttttttattgggcggaagggtaccttgctatccagacttgcctacatcacatatgtatatgttgacaaaatattgataatgcttctataacttaattagattttggtgttaagaacattttgacaaactaacacaaacattttcttcaaccgtcacggcctatgggcttcaccaaccaacagcttgagacatgcaacctatccttggcctacatcaaatgatattttccaaataaaaacaggaggatctacccgaggcgctgcagattgacaggtgtttgcagatttttcgtgttgtagtttctctataaacgtccaggaagaattatggcgatcagcggcggagcttgaaacaaattcaagaaggggccaacttccatggaattctatggaatgaaacactaatactccctccgtttcaaaatgtttgacaccgttgactttttagtacgtgtttaaccattcgttttattcaaaaaatttaagtaattatttattcttttcatatcatttcattcattgttaaatatactttcatgtatacatatggttttacatatttcacaattttttttaataagacgaacggtcaaacacgtgctaaaaagtcaacggtgtcaaacattttgaaacggagggagtattaattaattgaactacaagttctaaataaaggggaaaatataaaacaaaagtttttattataagagctataggaaattttgagaacagaagtgaaaaaaagtataaaacaaaggaatattttcaaaaggaggaaaaaatgggctctgtgtgatccgaacccaaacctgtagagtgaaaggttcacatgatgctaaccaactcaccaaagaaattcataatttcaaaggtgttttgctaacttatatatatgtctatgtgtgttgcattgtcagccaaccctgaaggggccaacaaccaggttggcctcccctaagctccgccactaaatccaataatttgattgatatgcctggtacagtgtcgttattacaacttgtacagtgtcgtgtattcgagtttttatgtttttgctacaaatatggataacgttagcactaaattttaaggatttgtggagtaaggtcaacatgtggctccatcagtactggttggtatagacgtttattttcttgtgttcattataggttgttttcaaaaggcgaaaaaggggcacccaaatctcagtattaaatattttctaacaattgtcaaaactggtggattcatactgctgaatatagagattttagctcctgttagtcttaaacattttcttcccacaaggataaatatcaacatttttgaaatttataatattaaattgacacataacatgtgtttattcacattggaaaaatataatatgataattttgtatattctttattatattagaatataaaagttagtggtaatattaaagttatatttcgagtagccaagtggtgtcgaaaacgacacctagagataggtcgaatgtctcttatccgcacaattgttcatactattaatacattaatacagtatacaccacctatatataatatattttatccatcagcttactggtggtctaacatgtaacgtgtagcactgtttttcctctgttgatgcagttcaccaacttccaagttccaaatcactggcgaatcgaggaagaggataaaaagggagtaaattgcattggtgatacatacacttgttagccgcgtgcaatttaatacatagacttgtaaaatgctcgttttagtacacaaacttttctagtttgggcgaacgagaaccaaaataacttggcaatgttaattttatgaagctgatgttgattaggatataacgtgcatacgtgcagtgagtatgtataagatatgcaatatttataaatttgatatctactttatctttcatcatggaaatgatgaatttcatatatttgtagcacttatatcattgctcagttttttctttatctttttctactatcactatatttgattcttttttttattgaagaggtgtatgtctcatagcaaccttttcagatatatatttacatagtatcctaattagcccctaatcaatcagactagccatgtagtatccttttcaccttcctccgcacgcaccagataagtcgttcatgtactaaaatgaacattttacaagtttgtgcactagattacacccacctgacaagttcgcgtaccggtgatacaatttactcgtaaaaagggctccaacttgcattgctagctgacttcttgttgtgcatactccatgtctagaaatattgctgcaatctactagctgcaattattattcctataaaaaatcaaagtgggtccacaccaatttgagccgatagatcgatttgatctcgatggttcgtgttcatcctcacatggtatttggtatactggactactctgtcttaaacaaatgaaacagaatttagttacgaacctggatacttatatgtctagcttcatagattggattaagaacttttttttagaacgaagggataggcatttgcaattctaaaatgtcacattacccttccaaagttcaaaagctgactttctaccagacgatgttgaacgaaatgacaccaattaccgtacgtgttcaaactgttttttttatatatatttcgattgaattcttgagtgttgcagtgacatgcgtgacgacaactcacctacctccgtacgtatattcatcgagctctctatatatgcctaatgcctctattatcagaagaaggggtgagccgcaaattataatcagcttgttgctaggtaatgccgtgccttacaagcatgcaagctgccaccattgtcattatttatctgggtagttctttcttcctccaaaaatataaggtgctcttagtttaaaaaaaattaacgttcatagcttttaactactattttagataatgtaagattttaactactactccttcatcccaaagtatcgaggattctatatgtagcactaagtcaaactatcctaaacaatactaatatttacaatcaaatgaacatcattagatctatcatgaaatatattttcataattacttctttaatgtggtatatattaatagggaaaattgtatatagtttgactttggacacctttatattttgggatgtcataggctggggatagatcatgcaggtttttttttttttaagaaaaggccagctgcccagcttttacagaaagccagataatgcagtagttaatcaacgacatggatcccatgtgatttatgggtattcacttgaattaattgcccaagaattttggtagaagaaatcatatatatactacctccatcccaggtgaaaaatggttgtgattggttgacataaaaaaatatacgatgaaaccaaatgagagatagttgaaatgaaaaaaagcaagtaattaattaaaaagtagttatattacgagaaaaatttaaatgttagaagtagctataatatgagacgggtagttctatgtctagtgtgcatgcatgtaataatataggtttacttaaaagccgagtgatcgcttgaagattaggagcgccacatcagcgatttttgcaaaaaaataccctgtgtttttgttaattacataccggttccctccaacatcgtccgttcgatctcacggtagagtccatctaaccgtccacgtgtctaacttggcggccctttttcagccgtgggatcgtcgaatcgcgaatgaacggcatagatttcgttcagccggaccaaatcctagttaggatgaaagatcaacgtatgcaacccaaagagataaaagaagccctttgtaaagtcacataagatcaaagctaatatagtaacgataaccagtggctccacgtcagcatgtttgccgcttattggctgcatgtgtacgtatttctgcgtgctatctactgacatcgtttaattttctattctcgattttttgattctatgattgattggtcgataggaagacatataacagcgttcacaactgggagaagctatctcctaatatcttctctttttttttcccattcccagttttggaccatctacgattggttggtaggagttcacacctaggagaaccggagaaggaaggctcagtgctgtctgccttgagagttgagagtatacaaatatctgatgtaataattactatagctcactgacgtaggtttattgtacctattctaattaaggcagctttcacctcattaagaccggtatctgttgagacttgagagtctagagtgagggtaatgctccacaattaataaattcccgtattatttaattcattcaaagtacacgtacgagaaaaccctagtccttgtactacaaaatgcgtgaacttttcttgtgatttacatagcggcaaaatcctgcagccgccatcaacagcacattagttggatcgatttttctctcttagaagacgaaaattctaacgctgcgattacagtatggagttatggacgttgacagtacaattgtacaaattgtggttgtggggatcagatctttcgtgtacccacatgcctagctatctcgtatgcacatccgtcccggccctctctcctctatataaagcattcgctacgactagctcattgtgccacaccacccaacacacatctgctaccatttttatcggaattactacgtacgcacgcacccgcctcagtagttcaagaacacatatacacacttcaaaaatcttgctagcttaaattactttgcattttaaccatacggatagattgatctaccgatcggctatgaagatcacggtgcattcatccaaggccgtgaagccggtgtacggcgacgccgtggccgctccgagcaccgccgacgttgtgccgctcagtgtgttcgacagggcgaactttgacacgtacgtctccgtcatatacgccttccgcccgccggctccggccaactccgtcctcgaggcgggcctcgccaaggcgctggccgagtaccgcgagtgggcgggccgcctcggcgtggatggcgacggcgaccgcgccatcctgctcaacgacgcgggcgcgcggttcgtcgaggcgacggccgacgtgacgctggacagcgtcgtgccgctggagccgacgcctcgggtgacgagcctccacccgagcgccgacgacgacggcgccgaggcggaggtgatgatggtccaggtcacgcggttcgcgtgcgggtccctcgccgtgggcttcaccgcgcaccacatggtgtccgacggccgcgccaccagcaacttcttcctcgcgtggagccaggccacccgcggcgtcgccatccaccccgtcccggtgcacgaccgcgcctccttcttcacgccgcgcgacccgccacgggtggactacgagcaccgcggcgtggagtttaagacttgcgaaaagctcgacagaaacgagaacaacgacgacggccatggacacggccacgacggcgaggtggtggtgacacacaaggtgcacttcagtagggagttcatctccaagctcaaggcgctcgcgtcggccggtggcggccagcgttcgtacagcaccctgcagtgcgtggtggcgcacctgtggcgctgcataacgatggctcgcgggctcgaggggagcgtggccacgagcgtgtccatcgccgtggacgggcgcgcgcggatgagcccgccggtgctggatggctacacgggcaacgtcgtgctctgggcacggccgaccgccaccgcgcgggagctcgtgaccatgccgctgcagcacgcgatgggtctcatcaaccgggcggtggcacggatcaacgacggctacttcaagtcgttcgtcgacttcgccaactccggcgcggtggaggaggagcggctggtggcgtcggccgacgcggcggagatggtgctgagcccgaacatcgaggtggacagctggctgcggatcccgttctacgagcttgacttcggcagcggccagccattcctgttcacgcctagctacctgccggtggagggtcttctcatcctcctgccatctttctccggcgacggcagcgtcgacgcctacgtgccactcttcagccacgacatggacaccttcaagaactgctgctatgtactccctgaactcagctaattctgctggcggtcttggtcgttgactgcacgaagtgtcccatcttttttattgtgtctttcaaaacgtctattcatttctctaggggatgtcatcttgtttttccatgtcgcttaaaaaatcataaaagtttttaaaaaataagtaagaactaaaaaaattataagccgtaaaatccagcgtgggtttagaaagttttgatccctttgttatatggaaatagcttttcttcatatttgcggtgggtacattaggtatattagcgagtccatttcatcttagtgtctatccacctaaacgtccatgagattgttcgcttctgttggctgttgcagcggtagcggctgtggccattgaaaatggctgccagcggcagtagcttttggagctcccgcaactgcagtgggtgcgacaacaatcactaccgatcagcctctatataaaggattatgtatgggcaatattaaaactgtactttcaagtagtacattgttgtatttttcacagctttcgcagttaccggaactatatgtatgagtcaacaactactacaattgaattgtttgggcctactgccgtactcgttatcagtgggaaatcaatatgtggtatatcgttgtagaaacatgcaatgtttaaatttaacttatgcaagtagaaacaaatatactccatccgtcccaaaatataagcatttttagactctggcccagtcttcaagatgctacatagactaacaatatctataaaagtaggatgtttcaaataataaaagtcgtatattatgatagtttgtttattgataaatatagtaagatcagttttacatcattgacctttttttattttattgctatgaatagtcaaagttaaaaatctttgacttgacattattctaaaaatgtttatattttgggacgcagggagtaacaaattttgactttatataaaacttgtaattcgcagttaaatttattatttctgtttctgaagtataaatcgaatttaaacttctatgtttatgaaatgctatatcacatattgatctatattctttatttttttttcaaattcaaatttttcgatggttttttaaacgacatgtagttttgttcggtagatcccaaggggaagggattggaggggaacagagaggaatgaatagttcccctccaagtctccctcaatttgtttgtgggagggattaaccaaataagttctcaagagaaaaaaaaaccatctgatagtatcacagtagtgttcgatctaggtggctatctactcgtttgtaccaatccctgtcgtgataagtctattaagaggattgagtttgttattggccagaagggccttgagagtcattaaaatggagaagtttggataaaagaatgagttcacaatagagaattgtttggccgcggcacgttcacctcggcttatcaggaaacgagtacgccaaagtagcatgagcacacgtactggcgtacagcatatccaagagcagacatctcagccccagcccccaagtcccagcccaacaagcaagactgcaagataaaggtcaaaggctaacattatacacagctttagacccgaaaaactgttttaaacccgaaaaacgtacacccgttttttgcatgtcatctaaatagttatgaatttttttttaaaaaattaacatgataggttaatttttaatatatcacttcacaagcatgcaagttcaaattcgacttctataaattgtaacaaaaataacaaatttgactgtaaatatctgtatactagttagagtttaatttgttgtttttgttacaacttgtataagtcgaatttgaatttgcatgtttgtgaaataatatattacatattaacctatcttgtaattttttttataattatttaggtggtatgtaagaaacgggtgcacgtccacccgagatattagaatccatcctcctttagacccacaaggccacaacggcgcaattttttactttggttttcctttccttcagataaaatgaaccgcttgaaagctaccgatcgatcgtagtagtactacaatatttcaagtttttttttacagataactttatttattcaattcaactttcatcggcagaacatctcgcgtaattaattcaattcataataattgaatcaacaacatcaaacaaatactaattagctaactagtctcaatcaagtgatctagcattaactgcatgtcttgtttttcaataatatagttcatgcaaggctagtagtttggtctttgtcgaatgagtagcagcagttcttgaagacgtccatgtcgcggctgaagagtggcacgtacgcgtcaacgctcccgtcgccgaagaaagacggcagcaggatgagcaaaccttccaccggcaggtagctgggcatgaagaagaatggccgcccgccgccgaagtcgaggtcgtagaacgggatccgcagccagctgtccacctcgatgttcgggctcagcaccatctccgccgcgtcggccgacgccaccagccgctcctcctccaccgcaccggagttggcgaagtcgatgaacgacttgaagtagccgtcgttgatccggatcacctcccggttgatgagctccacggcgtgcttcagcggcctggtcaccagctcaccggccgtcgcggttggccgcgcccagagcacgacattgcccgtgtagccgtccggcaccggcgggctcatccgcgcgcgcccgtcgacggcgatgcacacgctggtggactcgcgcccgtcgagcccgcgtgccttcgtcatgcatcgccacaggtgcgccaccacgcactgcagcgtgctgtacggccggtgcgcgccagccgacgcctgcgacttgagcttcgagatgaattcccggctcaagtgcaccttgtttatcaccacctcgtcgtcgtcgccgccgccgccggacgcatggacatcctcgtcgtcgtcgtacggcttgaactccacgccacggtgctcgaactcgaccttgggagtgtcgcgcggcgcgaagaaggagacgcggtcgtgcacggggacagggtggaaggcggcgccgcgggtggcctggctccacgcgaggaagaagttgttggtggcgcggccgtctgccacgatgtgctgcgtggtgaagcccacgacgagggagccgcacgcgaaccgcgtgacctggatgagcatcagctccaccgcgtcgtcgccgctcgggtgcaggctcagcacctccgccgtcggcttcagcggcatcacgctgtccagcgtcacgtcggccgtcgcctcgacgaaccgcgcgcccccgtcgttgagcaggatggcgcggttgccgtcgccgtccacgccgaggcgccctgcccactcgcggtactcgatcagcgccttggcgagccccgcctcgagggcggcgttggccggagccggtgggcggtaggcgtatatcaccgagatgtacgtgtcaaagttcgccttgtcgaacactttgagcgggacgacgtcgccggtggtggtggggaactcgccggggccgtatgccggcttgacggccttggatgagtgcacggtgatcttcatgtgcagaatcaaatgtgctggtgaagtggtgagtatatacgttcttggactgcttaattaggccgacgtggtacgtgtccggcgaagtgtacaatcgtgtgtgcatttcctggatggtgttcagcctcatatatatatagcggtgttcaggaaattagggcactgttgctggagcctggaagcttaatgcacgtgtaaatcttcgcaagaggtcggtgaactttgcgaggctgaagctgaacagcaatacagcataattagtggcctagttaaaaaaagtactccgtactagttttggatatgcatgtgatttttctttgttgaccgttggagccttcttacaattttttaagcgatcgcaaaagaaaaatgtgttaattatatgcgcatgtgttcttacttggttggtgttctcggttcatcaaacctatacctacgtgatcttgctaataaagaagtattgataaatgataacaaggaataatttcttgtttaaaatgggttatatactatcacaaataccgtgacttcgttagaaggtagaagaatgtcactgactgagaaactactacaataaaataaaagacggagaaataaaaggagactaaggccttgtttggattttagtccctgtcatatcagacgtttggacactaattagaagtattaaatatagactaatgataaaaactcatttcataaccctagactaatttacgagacgaatctattgagcctaattaattcataattagcctatatgttgctacagtaaacatgtgctaattatagattaattaggcttttaaaaatttgtctcgcgaattagatctcatttatgcaattagttttattattaatttgtgtttaatacttctaattagtgtctaaacatctgatgtgacgtaaactaaaatttagtccctaatctaaacaccacttaaagataaaagatggagggaagaaatgaaataaatatcagacgttaaggcaatagtaaaggttcaccatatttcctttatagacataaaaagttattcaatccgtccctaatataagggattttggagaaatgtgacatttcatagtattagaaaatatcacatccctttaaaatcttttatattttgggacaaagggagtaagatgttagtcggaatatcatgcgtatacttttgaccaagttgagccagagctcaagattatactttcaatattgtttttttgacaataaattgtggaagtatattttctattatgcatatgagaaaattgtgtaatgacgttagtcgtgtaatctgcatgggtcactacactacttatatatacaacaaaatattagtgaagttattggaattagcatttttccgtgcaaaatcacagagctaaaaggtaaaattagatatgatatacaactgttagcttctaattttcataaatctagttgtactcactctgtatctaaaagattatagtgttcaaaattagatacagtcctaattagatatgaaaaatccactagttatacaattgctaagagcctatttgagggagcttctgacaactccatcatatcttagaatcaaaaactccctcaaatagtgtagttttttttatttagattataagaagttatagttagagaatctataaaataaactaaaaattcagattcaccagattctcagaagctgactaacagccaaatatttctcatgatcttaagtttcttcagaagggccatatatagtctccatggaataggtggtgattttaaaacagtgacggcgaatttgaagtaaactttcaaatatcattatccataggcctttaacaaagacagctaagcgagacgtggaaaattgaccggccggtctaagcatgggcgagcatatgagacagtaaatgtctaaattattgtgctaatagtgaattttcgctacgtctccaagtagatttgataagaacttctagcttttgtttttacagatacagttttatattgcatatgattgattccggaagtactgatatagtttggacccactacgatctaatggtgcaattttcttttatgtatcttaaattaatgtggtggtttttagtccgcacaagagtgaagatgaggacatctctcaataataatataactagtggatttttatgtgtagtttcgcatggggctacgctttcaatggttaactggattgatatacaactcttatacaatcattgatatacaaatcttatcgactttcaatggtgtgacatgctacgtcagtgatacgtagaatcctaaaggtgtcatgacaattttggacgggaatgacactataacaagtttggggatttaaaaatgttttttaagagtttagaaaccttattaataataactagctgggtggcccgcgcaattgcacggctagcacccatataaaattatatatttttaatatgattttacttaaaatttattaaatagttatttcgatgtcttaagattttgaaaaaccaaaccttatcatcctcgtatttctaattttatagtttttaaaagtcacaccagttactatcccttacttctatcatattattctttattagcttgcttgatctaccactgtttctatttattctccttggaacctttaaaaattggatctaaactatagagtttatcgtcctgttaggcttcatttttataatttctataagtcccatcaaacgttaccattatactcctctacaaccgtccactacataccttataattcttgtgtttctaatgctatagtttttaaaagtcacaccagttgctaccccttacttctgtcatattattctttattagcttactcgatctaccaatgtttctatttattctccttggagcttttaaaaattggatctaaaaactataaagtttattgtcatgttaggcttcttttttataatttctacaagtcccgtcaaaagctgccattatactcctctacaaccgtccactgcatcttctttttattgtcgttactatttttaaaatcgaacataattatcgtttaggttcatttttttactttctagaagttccgtcaaaacgtcagcgactttgtcactgtactcctatacggctcacccgctgccactcttatttaatgtcattgagatttaaaaatcaaacatgattattattgaggttttttatttttacattttgaagcccgaacctttaaaaatttaaccttatagtttttagagtttattgtctcgttgggtttcatgttttttttataatttttagaaatcccgtcaaacgctaccaccatactcctctacaacccgtccgccgcatactctttattgtaattgggattgtaaaaatctaacattactatcgttggaattcattttttttactttctaaaagacccaccaaccatcggcgggtctgccattgtactcctatacgaccctctcgccgcctctcatttttattgtaattaagattttaaaaatcaaatatgattatcattggggtttatttttttttactttcttgaagtcatcgccaaccgccttgaaccgattgcttcacgacctgcccgtcgtctttccttttaatcatcattacgattctatttggtgttttattaatagttttagatgtctcatcaaccgccaccactctgctcctctagaggcctgttacttaaataatcttgtcatttgttttagatggtcttttcttttaatagtttttttatcactaattttagttatttataaattgtattcctagttgaaatcttatttttatttttctaattttagaatttattttattttttgaattgtgttcttttgatatttttattttttattttcaatttcagttgtttcaaaactatattcctactttaactctatttttaatttgcctaattttggattttatattattttttattccgaattttaattaatctactattgggttcttatatgtagtcatgaaataatgcttatatttaaattccgaatttaagttgatgttaaattatattcctacttgaactcttattttcttttcttttttttaatttcaattttttattccgaattttaattaatcttgtattggattcttgtacggactcttctttcaatattccttatttttaattccgaatttcaattatttttaaattgtatttctactcgaactcttattttttactctttctattttcaaaatttattttatttttattccgaatttcaattaatcatgtattaggttcctatctggactgctctttcaatattgcatatttttaattccgaatttcagttatttttatattgtatttctacttggactcttcttttctttttctccgtattaattaaggaggcagtattgttctaatttttacatagacatgaattcgtttttaaggaacgcaagctgtggatcaatacattaattttaatatgagaaaaagttcaaatacttcatatagacaaaacgaatttaaatatcccggttagaaataaacttttccttttcagattggttagtttcacatatatgtacaggccgtttatttagtcgtattgatctcgaactctttttttactctgattcctaagtacgtttctcctttttactccgatttttactccgattcctatttctagtatgtttctttaagcttccgtggaaagatttccattagctgtacaactctgatatatttatctattagatctgaggcgctaaaatctagatatactatgatctaacggttaatatttttctacttttctccgattaatgtgggaatttttagcctccacagcgaacgtggtgccttcttttaaggctgttttaataatataatagatatgaccgcccatatactttatattttttagactaccatcttataggcagaatttacgtattcaacatatctaaaaagtacaattgtatgttatatataatactagcttctatttctaattatcagtatacaattatactttgtatatatacaactattatcaatcaatctccactgtcacaatctgacccatcatgatctaaccatgtaaatctttctctctttttctctggttaatatgaaatttctacacctcagtaccatgttttcaagcttaataatagataatagacaaggaatggatcgataaaaaaaatattgcaggaatttttgacgcaattatccattttatgcatgtccatgttcttagttactactcaattcgtttcatattatgatttgctttgattttttgagtcaaattttaagaagtttgatcaaatttataaaaaaacattttcaataaaattattggaatatatttaatgttagatttagtgaaactaatttagtgctataaatattactatatgtttctataaacttggtcaaactaaaaaaatcaaagtttcttatcatgtggattggagggagtttgagttttgtttttaaaccaaattcttagttactattttttttttcgaggacatatatgtttggacaaggtagtgaagtgtgtacttttcttatagtcaaatcgctctacaccaaccattccttagtcaaacttcttgcttccttgtaagaagtcaaatttctagcttggttttgccattcatacattgttgggttccatgtagtcgggcagttcagaattgctcacaagaattacgttcagaagtaagggcaaatcaacctacgtaaacggaaacagattaccgtggtaggtgcattgatccattgtccatagcaatatatagcatagtcaaagcataacagatcatcagcagaaggaggaaactgagttttcagtttctttctctaggcttcagtttgcatgattggtcaattgagacattcagtagtgctaagccgtggtagttgagtcttccaaaataattacaggtgagagcgactaacaggtgatgaagattgcgcgcggcgcgtagaatgtgttgcctgcacggtttcgtgctgcgcctgcgcgtgatgatttggtgaagtcttcaacaaagtttggtgagtcgcaactgccacggatattccagatcagcggggttgttggcctgagtaagcagacaaggcgacgtgacgaactcacgctacagttaacatgctgacgagcgaaaaatcgccggttgaatgtttggacttgtgatttcggttaacatgtccggatttggacgtttgaacttaaacagttgaacagatagacatgctcgtcgatatgatccgtgatttatattctgtaggtctccctgatagtaacatgtgagagaaaacgatgaggctgctagtgggatttgactaagacaataatacttgaacaagagatactatactgtactacgtacacaagtaacacaagtgctccatcgaatttcgaagggtgactgtgcaatatgcctgcaaggcccacatggcccaacttggatcaagccgccaaacaggcccaacaattgaggcccagtaaatcactaatctattatttgttcctcaatgccttttgccatgcgcagtcacagtgtcactcttccgttataaaactactagtaaagccatgtgagttcaaacaatgagttcataataataattgtttcttgatgtctagattatgcattatattttataataggagtaatagtataacgctattctaacttggaccaagttcgaatcagctattcagttgagctactttcttgtttccagtagagatattttcaaaaagataaatggtgtgtttttgtgcggaccttgtgtataagactttcctaaaatgttcagataaattaatttttaagtttgtaatacgttactagttaatagtattattagatcaattctcgtcctgtaaaaaacaacccaatactagatgtgaagacacattctagtacaaatgtgttatacacagtagtagtgcggctagtgccacaaggtgaaagtggcgatcatagtgggaagtcagattctcgtgtgaagtcaggaatttcaaataagagcaggtacaatagcagtctatagacagctgcagcacggactctaaggcgtaacgtgtgtatgacatgtgggaccaggtattattagcgcagtatatttttatagataattattgtataaattgactattatattgattataaatgatttggagctagcaggtgactatactattaaacttgctctaagctttcagatactgagcctgttcgaaaacagaggtagtatacggtaca

SEQ ID NO: 10115 - DNA, 20188 bp, Oryza sativa
attggtggttggtgccgtgtcgcgcgggagttgtttcaaccacatgcgggacggggacgcgcgcgcacgcacctttccgggacccgcgcgcgcccgcccgcctcgatccatccatccatccatcgactcgactcgattcgatccatccccctgccttgtcgtgccgttagccgtgtcgtacgtcctcccgcgacaacgaccgcaccatgcaaacacacacactagtatgcaagtgtgtactgcaaccgcacgcacatgtgtacacctccatccatcgatcgatcgatctctccgactcgacgaccgtacccatccctgcgtgctaccctcctccggctaattaaaccacaactatagctacatacataatcaaatcatcgttacactactagcgtagaacgtctcgccgattatagagccactcatgcacgacagtatacccgcgtgccgtgctgtgtacgcgcgatccccgcggtgagtcgtgattgatataggcatatcgtggcgccatacgggccgtagcccgtaggcgaaccaccgccccgcacggctcacctgctcacctggtttgtcatatgagcccatgaccaataatttcaccgcacgcacgcccgccccgcgcgtccgaggagaaaacggtggcggtcacgctggattgaaggtttttccttctagttttaaaccttttcttttctgctgcaacatcatatcaacggagcggcctctattccgcattactcttctactgttagcggcagttgaacaaattaaagaaccaatcatgaacgattgcacgagcgggtaatcttgatccactcgtcagatgtcgtactttcgtgctaactggttcctgctccagccagcagcaagcgactactcactccgtctcatgaaaaaccaacctataactaaatgtgacacatcctattttataaatataaacatacctctgtttcgtattcgttgtattataaagtgttatgtttcgttttagatttattttttttttggacggagggattacatactgacgatctggagatagtaccggccagaacgcaaacgcacacgtacgtacgcatcgatcgaccgatcaattcgatcacctcatcatgcatgcatgtcgatcaacatgccaagttagcgatcgagagctagccataatgataagcactgttgaccaaatgagaggacccggccggcagcaacccttgattctgtgcatcagcatagagctctagtggatgaaacagttgcactactgcacagcagcaacatgcagaagacatcaaaattcttaaacctccaagacaagagccggccggccggccgggtcgccttgttggctacagctccacgatgaccatgacactctcccctgcaaatgttgcagcaaattaagatctcggctcgacgacacaaacacgaaacgattgcatatatacatgtattggtccccctctgattagctagcaactaatggacgtctaaccatgccaattaatgggaaattaaggtgcagcattatgtaattaaaacagtacctgtgctgattgattcttagctggcttgggtaataagacgaaccaaatttaaggggaaattaacagatactcctcctagctgtgatatactcatagtggtgtccggccgtttgtatatacggatattagacatagcgcgcgcggcatgcatgcagaggcttgttcctttcatgaaaaagaggtggagtgtcttgtaaggcatgctacatggaagcatcacgatttaaatacatttggcaaagttcttgcatagatcatcaggtctaacctcccaaattgagcatgcccggccggccctgcaggctgcagattgcttaaactgcttggcttagcttgtagcctgcatatatattatctggaactacatgagtactactattcgattagcgtagctggcataacatcttaattaattagagtagtagaaatgtctgaaaaatgcaagcttgtttgcagtcagaattatattttttttcttgcattcggctatgtaacttaatcccttctattaatataacgctaaccaatctgtttggccgttaaaaaaaataacatcttaattgatggactcgaaaaattaatagtactgtaaaaatctagcatgaacaatctatataatataatataatgctgctgccacccccgttgctcagcatgacttttgcatgtttggcgccgatatggatgaatcgtcttgtttactacttgttgcatgcatgtgggctaaggcctctttaggggaccaaatcaataagatgtatacaaagtggccctattgtaatctccgaaagtaagtgggatcccccatctcctagtcctacttcttggaaccttctttaattataatctgctgctagcggatcataaaacaacggaatctatccatcatgtcctgcatagataagggaacatgcacgcatattatcacattcgtcaaagcactctatcatatcatatacacttgtaacttgttgcttcctcattggctatctctagagccatttaattatttatttatatgtgattaatctctcgtttttttaactagttgtgagtctcaaacatgtactgacatcgattaattacagaggtagtacagactctactttagttggagacatgggtgtgtggttttggaaggatgtgtcgtagtagcgttagttgaatgcagttggatgagctagctttactcttcggcttggcaaccgctacctttcgtaccatagtgcacgagctcaacatgaacaatgccattaaaagagcggcggctacttcaaaagatgaaagtgaaagcattatattgttaattaattaggtcatctgattttgagaaatgttaaattcttaatttctccaggatttcctatacttctcatcaagcgtccggcgatgtatactatcttaaactacatatcatactcatatagtttattctgcacttaagatcagaatgcatgatcaatctgcgatttgaaaatatttttcagcagctatatatacatagcatatataggtcatgcgatcctatagcttttttttttttgcggggctatagcttaattagttaggaccactgttgatgtagggaaaaaaagcatgcatgtatgcactggcagattctttcattcacacgtacatatctataaagttttattgcaactcaattgttaaagtgcatactgtattaattctcacgtatgaatttaatgtacagttatatataattcagtaatttgtttaggagctaggagaattaatattctgactgaacttgcatgtatgcagacaaactatacacattcacttcaattaattggactgtgatatttttggtgcatacgttttttatatacagtaattgtttaaatctgtatttatgctcttcggccacatatgacgaactggacatttaaacatgataatgacattagaaggtagggggtatgtttctgacaggaactttaattatgtatcttaacacgtatattttggacattctgagacgtttgtggagataaccaaacttggttttaatgatattttagaagtacttattgtaaacggtgaaatttagaaattttcgttagttaagatcgggtcaaagaaggaattcacgctgtgagtatagaagattcagttaggcaagctgatccagatttggtattaaccttctgcaataggaaatgtgtatcttagtttttttatatatataaatagagtcctgaatcgatgagttgtgttgggatcagacttagggtgtgtttagttcacgctaaaattggaagtttggttgaaattggaacgatgtaacggaaaagttgaaagtttatgtgtgtagaaaagttttgatgtgatgaaaaagttggaaattcgaagaaaaagtttggaactaaactcggccttaggtgagttttctcttttgatcagccgatcaaaagttgtgtcagagtcaaagttgtaatgataatttttttttagagatagagtcctatatcaatccgattgtagtagaatcggacttaaggcatgttcagattgtagctaaaataaaccttaccaagttttggcaatgccaaaattttggcaggatggtaatattgcaaaaattttggcaggatttcttatgtattgaccaaatttggcaataaactaaacgtagacatatttttggtaactttgtcaaaaaaaaatggtatggttgaaaatggcatcaaagtgaacaggcccttagtatagcctatgggcataaatatgtgcacccagggcctttgtaaacaccaacagttcaataatcactttttcgacgcatcgccaccctagtttagcttcaactggttcttgttcgagtttgtgctgcatcgatttcgatctccagcaagaaagtaagccccgtcaacttcacttgtattggttgggctgtactttctcaattaagtctgatatattaatttgatctttgcatgcgttgcctatctaatgtatcagatctatctttgattgttttgctctcatagttagggtattatatcaaatcactttgaattttaccaatcggctagtttaaatctatcaaacttaccattaatcttgaattatcttggttatgtccaatctactaaaattataatttgctagataaatttattcaagtcaataggtttaaacaattgtttcattggagtcttaaccgatgagttatgtgtttattataaattaatttgctacatcgtttgagttacaagatttagcataatcggttaactgctatttttgttatcttcaatcttatactgacggagcgtggggctcctcaccgggagaccgcgcaggcccccctttgccagttcagccgggggcgctaagtgaggttcttcgccctcgatctgaggaacgtcagcgagagaggaaatgcacaagacacgggcgatgtagacaggtccgggccgctgagaagcgtaacaccctactcctgtgttctggtggatctatgcgtgaaggaatacagagagccggagagcgagagagagttcaggctctagaacccattccccagagtcccagtccccttctcccctctcctcccttttttctcctaggcctgggcctcctttttatctggtcaggggtcaccacatgggcctctagctgcctaagaagggaaacatgctttttacaatgagggctagtctacagccggaagtgacctctgacaagcagagcacacgtctcctgccccgctcgcctgctttcccggtggacgcccatttcaaccttcatttaatggccagcgacttccttaccatacttgcgctgaagcctggaatggatttgaccgggactgacataccaactccaggagttagcacgccggctccggctagggacgagagctaggaagctctcatcattccgacgggacggggcgaggcgtgtgacaggccgcctattgccacctaaccagcgatctgaccggtctgtgaccggtcacacaccgcgaccggtcacggaccggataagcgtgcgctgcgccgcattaaatgcggcgtggtgcactcgtccaacctgctataaatgcggttaggtgagccccgctgtgctcacctaacccacacacgtggcgccaaaaccacagggggtcggggcgccccagccctcggggccgaaacgggagcgggccgacccctcggggagacagagggaggggtggccacgtcaccttcgggcccgacccccccgagggggtcaggccacgtgggtgaccgcggctacccaagcctctagtcacgatacccccggccccatgtcaccgacatatactgtctcgatttgatccgatctatcaagattgtggttaataatcataggttgttaatgattatactttaacttgttatagctgatgttgtttttttctttactttgcgaatgatgataagcttcaattaatattttagtgcattggcctacatctaggaatatatataattgttaagttgatatctttactactttcaatcttatattgtctcagtttgatttgatctatcaagattggttataataaagttagaagattttgcaaatatatattatgtagattttggtcgatgtcactttgatcctaaatatttatatccatcggttacagccaatcgatccaaaatttcatcggcatcggatgggcacacgatacaatatcggccctatgaccaattgactccacaatctaatcttttcgttgtctatcttgttaattctaagatcaaactaactggcatgccctgaacccgattgataggacttgcactagatctaaacaaatctcttatgcctttgtgtatgtgacgaattttacatcaacacttatcaattcaacttcctaatgaaatttaaaattttgacaattagtccaattttatgaattatataggagtatttaaatttgccatctactccctccgtcccaaaatgtaaacatttttagaatagtgtcaagtcaaactttttaaattttgactattaatagcgataaattaagaaatattaatcatgtaaacttgatgttactatatttatcattaaacgaactatcataatatgcaactctttttatttaaaatattttacttttgtagatattgtcttggagaccgtgtcgagatccaaaaatacttacattttgggacggagggagtactatataatactctctaaaggtttcttggatgtttatgctcgatttgtaagctagaacccatgccaccacctatatatatattcatgtcaatgtatagctagcctatttgaaaattaatgaaatgcataaagtccaaagaaataaaatctattagtgttactttgtaaggcaagaattttacaggatttcacataattaaatcggttcaattcctgcaaaacttctcaaagaaaatcatccattccaaacacatgggaatatgagaaaaaatgccacacctttttgaacggagttctctttatttaattaatttacaattaatggaatgtctttaatttctccaactaattagtagtatataaaaaaaaatgacacacgagttacctgtatgtggtcgatttgtcaattcgttataattaaaaacaattgctacatataaacccgacagctctaagaacatgatccatgcattggtggcccatggttaggaaatgccggagatcaggcgcagcatggatatatcattagaggttgggcagagtatttatctcgttgtttaagcatcattattgggctcgaaccaatctgatgaaaatttggtagctttctagtgacagcattatgagcataaccactacaaaattaattaagaacgccaaggacatgtacttataaaatttttacattagctgcaggcactaacaatattaataagccaacaattgatgattggtgtgaatatgctcatatgtttagcctggtaattaaatggggaagtatatatctcgactcttcaaatattgcatgtcaattcacatgatgtgattaattataggaacattacaagtccgttcttaattggcaacatatagacatagataccatgcacatgcgtgcatgatatggtatgatcgatgcatatgtatggaatatggatccatgactagcttagcctcttgcatatggtcgatcggtcggccggctttgctccaataattagagtttaatcgtcgccttgcacgcctaattaatcatcccgttgatggcaacaagtcagcggtcacggaggcaacacacgatcgatgatcgattatcaggttaatttcccctgtatatatatagcttaattattaatttgattctctctccttaattagctttctagctacctccctgttgatttgtgctcatatgtgattagcaagtcttaaccatcggcgacaactgataagtcgttgggtttagacgtgcgaccaaaccacgaccagattaattagcagctaattaattaggcccccttcgatctccctctaatttgattaagcctgaaaaatgcatacaataatgcactccgtatacatacacttttatacgctaatcaatacattaaaatcaatcgaactagtattataattaaaaatcgttttcagttgacccggcaggccgggggatcgatcgagagcgaattaaggatcagattttatgagcacgatcgatcacgattgagcaggtagctcgatctgctacataacgtactcagaaattaattaatttatatttttaagaaacacggtataaacacaaacgttctcgcgtgtgacactcacctatatgagcatttttagaagactgggcatattgacgtttcgttgtcgacgggtacgtcgtccactactgaacgaataattaaccgtaaatgtgaacacccatatcaaatttaagatttgaacctaaacctgctccgctcatttcgtgaaattaattaatttcgttaagaaggaaaaaaaggaaaaaggaagaagaaaagtacatacttgatgcgtacgtagctgcgtagtacgcttggatggatcggtgcaatatatgcaatgcaatcgagcggctttgtagtttctctctctagctagctaatatagcagctagtctctctctaccgaatccatcgtccgtccatccgtcggaggaggtaggtgggccagggcagccatgtgcgctcatgtggtggtttgcaacgcttggccccaccaccactttctctctctctctctctagactttctctctctttctcctcctctccaacccaccactcactaacctgtagtacccccaacaatgcgtacacggccgtcaccctcttcctcatttctcttttataatctctacaactttaaaaacatagtgtcctcggttcgttcttctcatatatgcataaccatagtatgatccagtaatttacctaggtcaaacctgttacaaagcagagggcatattatactatataagaaatttcacgatctttattatttaattataacttattataaactgtaattgtattggcgcccttgtgactcgaactaccccatgaaggagggagaagctgtaacacttgcgttcgcgaaaaacaactgtgtaacacttcaaaaatagtttataaataaaacttatatatatttgttgttagtaatttaaaacttaatgttgagaaataaactaaaaaaaacatcaaaaaaaatctaaaattaagatttaaaatttaaatttcagttacgactaacaaagctaaaaagcaaatgatgtagcttagctagggtttaaagtttatccataaattgatctctcctacaatttcttcgatctatccaacaccgctatatttattactcactgtggtaatattatatgctcctagaggcattggaatattttttttttctttttacctcaattttaaagcttgccaattaacctaaaatctcttaaaatttgaacggatcaggtagctacagaattagccactgccttgtttatctctctaggggattagctagctaggggcctgtactgtatctatctcaaaacgccctaacgggaacggaacgaatcggcatggaggcgcatgttacctttctgcaaagcgtgtggcatgtgttgcccaagattacgatcaattggtcgatatttgatcgagatcaagttgttgcctggctccagcaacatctttataatctctctgctggattaattattttaatttttctccagctgtgcaatatacacacacatttgcgcgtaatatgtgcttttgcacgccgattaggcgattgctactatagaaacttaattaacattgcatggcgatggtttgacgaacgtgtcaaaccccaaatcccaggccggtttactcgttttacgttgcttccacgcagacgaacaatttaacaacaaatcgagttaatgtttcagacgcggacggcaacgtgatgctgatgctgatttgcatgaaaaaaaaaagcattgccttaatttttcctcttttttttcatccaattgtaactaccactaccaccgtactcatatatctatccagcacatgcatggatatgcatggttaatagtagtttagcatgtgttgtttcctcatgttcgtcaatgcaatcaggttaattaaccaaatcagcagattgcgtaggagtagatgtatgtgaccgatcgagtaactgaatcaatatatcgatccgaccaaagtccgaccagattgcttttatatccattagcccacatgcaagcaagagctaaccaaagatgagtctcatgttcatcttggccaacaatttcttactttctttctctacagtactagcagactaatttttttaataaaaaagaataatttggattgtttttgtctctcgttgtcaactaggtattataagacaccggatcttgctcaggacatttgtgtcagagccgtgttcctcgctctcttccctttcctttttttctctctctaaaatcgcaacccacaaatccttctgatccgtttgtgtcagagccaaatcttcttcttcttctccatctctctcctctcctcttctcttctctcgttggaaggtgaggaggtgaggtgaggttgggggcgccgtttgatggacgcgaagaggacgccgccgccgccgacgccgccgaaccctaaccctagcgtaattggcagcggcgccgccgcggacggcggcggatttgggaggggggaagcggcggcggcgacgaagcacatgctggccttccacttcctgcgcgcgctgtcgcggatccaccgggcgacacccgtgacgcggcgcacgcggaccatccgccgggcggcctactcctccatggcgcgggcggcgagcccgcgccgcgcgtggagccgggcgctgctcggccaggtccgcgcgcggaggtccaggacgctgatgaggcgcgccgccgtgctggtgcggaggcgcgtcgtagccgctcctgcgccttctcccgcctccgccagaggcgtcaggattattgctgccggagagacgtcggcggcggctcgggctgttccgccgcctccgcggcagcagggcgagccgccgagggccgaagcgctccggcgcctggtccccggcggcgccggcatggagtactccagcctcctggaggagaccgccgactacctccgctcgcttcgcgcgcaggtgcagctgatgcaaggcctcgtcgacctcttctcctaccaatgatccatccatcgagtaattaacatatgcatcatatggttaattatttattcgttcgtcttgcacgcatcacatgctgctgttgctgcttctgttctacttctctacctacatcatatcgatctatctcttgttcatgtggatcgatcgatcgatgcatatgatggttggttaagataggggattattattggggtaattaaggggaggatctaggagattgggtggagtgttagtatacatgttttttgtttttgttggtaattaagattattggtaggtgatgaaaagattgttggatacatacatccatgtatagaagtataggccgaccggctgggagcacaatgaattgaatcatatataccaagaagaaggctttatagagagagagagagagaggggtaattaattgtaacatataaagagaaggatgaagttacatatactatatgatagtgaattagtgcagtgttaattgttgtcaattgtcagtaaatcgatctatatatctgcgtatatgtgtgtttgtgaattgtgaaaaattcatgcatcctactaacctacctttgtagctgtatctgcgatgttggtatatatatattttttcatcttctgtaggtacgtcttctatctgattggggaagaaacaggtaattacttaatcaaagaacttaacaatgaggtcatagatgaatggatgttgcatatatatcatgcatgataatctgcatgtgtgcagattcgttttgttctagtagaattaagtattaattggttgctagctagctgcacatgcatgatgcatatgtgtgtactacctctatatcatcgttcccatgcatccgctactcgtattagctagggattgacagctagatgatgctccattagctagttgttgcctagcttgtctaattagactattagagtactgctagcttgctaactaggagggtggttatgttgaattggttgtttggtagagtgttttttcttttctcctctctcaaatttgggaaagtgggagccacaatctatgagggatagggttgctaatctttgagcttgatgagaagacacacataacttgtggccaaaggaaccaaacaaaagacattctctccatgggcggttagcatcttttgattaaagggccttgtgtttttccctttggaaataagcatatatgtatttgtgtttttgctattatttttcttctctcttcttgttgcccttccatcatctctctctaccaacttatccctgttcctttttaggtgccaccggttctctattgagtattctttgtgtacttgatgctgctggcaagtttttctgcttggctcttttgtcgtgtttttttttctctcagttggctagctttgacacatgcgtttgttgcttcctttatggggtaagaatccgaaagggttgaagctagcctcttctgcttgtaagcttcctattaagtgttatgttacatcgggatcatatatatatgtacaacacaaacagtagttaatcaactggacgtagaaaaagactagctggtaccatgcaagtttgacatgcatggttgaaaccacattctttacttttacttaactgatataataatatagttaagtcttttgcatgtccctgaaaaaaaaaggtaaaaagatacagacgaagcagatgcaaagaatcttagtagaactatatgtatttacatatgtgtgttttcacactagctagctaacagattatgtcttgtgcaccgtggtatattgagagaagaagagcctgctgcctgctgcatccataaaataccctaaatttctgcttttgcttttttaatttttttatttgtacttgcatatattgtttttagttgtgatcacagagctagatataatttccacttaagacgatattgtagtgtgtggttttaatctgttttctatttggatattcgataggggggcgtttttggttcagatatcgaatttgctcattggccatagctagctgtcatatatgacaaaattagtacacctattgacaggacaaagctagctacatgcatgtgtgcattttgcttggaatcatgtaagatcaccatccaattcgcaattgggccacaaaatagctatattagggagccatttcacatcactaaaaacatttttggtacttgaatcaacagctaatcataattggcccactgattagctgtactcatttgatcagctggctataatcatctccttcaacagacatgcatgtatatatgctatatagtactataccttggaatgtacatattgaaataaaataaacatggatcggtgtgtagcgtatcatatatgcatcgagacacatatttgtgacagtacatcggaattttctaacatcatgcatgtttaattactgcatatatgactttctgtcacttctatttttcagaatactatctttgatcatctgctggttagccttgccattagttcatatatagacttatatataattttgttttcaatgttaatgcactaaaaattgtgctccattcgaacaaaatgcagagaaattaaaagatgattcagattggtccaaaatacatatatatagttagcatggtcaagtaatttaatgagtttgccgatttgatatatcagttttttatttcgtcaaatacacgatgatatatataggtgcatgaaataattctcagtattgctaattgatcgttatttcagcaggatgtgaaattagttaataattgccgctatatatacctgtcatatcttcgtattaggacttatccacatggacacatccattttatgtcactgaaagctcactatacttcttaatttttaatatgcttgcttataatttatctattagcgggagaagcatcaatgatatacgatggaataataaattaatgcatgatattttatccatcatgattaaaatacagtgcgatagcgcccatgaatattacgatacacgagtatatatgcttttaataagattttagtgaagctagtgagttacaatcgctactatagcttcatctctttgagcatatgttagggaacatatttagagatgagtaagtgtggtgtgccgcacgcgtaagagtactttgtgaaatcggaaaaattaatctttattaacagaccgtgcgtgggacatattttaggccgtgtgagtattgtggtaatcgaaaaaaatattgttaataaaccatgtgcacgagatagatggatgtactagttaatgggggtactagttattttaacaagtagtgctgttgcatatcaaatatgcacatttaatttctctcttatatatacagcatatatatgtatccgggataaatatgccgtgcaaattaaattgatttttgtgccatcagctatatattcttatgcacggaatgcagatatatagaaaattcagtacatggctttctttataccgtggctaacgtacgtatacgcatccatatgcatggatccgtatatatgcctccagggacttttgtatgtgtatcgcctcgtactctctgttgtttgaatgtttttgtagatctagcgatcaatgtgtttaattaattaaccgaacgctaccaacagtactacaccacttatacagcacctgctgactttaatttaaagtatatatactttttgagatttaaccaagttatagttgatgaatgttacgtgctacacagcgcttgtgctttaattagatcgaccaaacctagctggctagctagcgtattactctaattaatatactcgatcggtatatatataagagcttagcatgcgtggaacagtacggtacaaattaattttgtgtcattttgactcattgtgtgtgtgtaagtctgtatagaattgttcattgtgtataattaagcttgtatacaattaattaattgtgcaattatatatattgtgtgtaagattataacatgggaaagctgttcgtgtatgcaccatgtatgcgtgtaagctaacgaggatatattgcggccgatggatacatggcacctatccctaaaattcatttttttaattagtcccttttactgtcctttcctgctgcttaattgagcccatatatattaatctactctggcatcaatatagaagaaacgagaagaagtctaaggcccattccattatttgtactgagagctgcagaatttgtaagaactttggtatacgaaatattcccactaatttgaatgttggttttcctacaaaattctcgatacactagagtgaagtgctcaagacaacaaacatgaattggagtgcgtgtagtggttagctagctaattataattaatctttgattaatgatatagatatagtaaagggaaacatatatcctatgcacacaaactttccgtgcataccaactaataaatatcatgaaaaattatagaaaaaattggatatttattcataatagtcgagatgatgcagtacatatatatcctatctgtttctaattaacattaacacgagatttatggcgaggggcagcagaaaattactcagaattaaataacaaccttttctgtcttagcaagtagtagcaacgtcagactgacgtcgttgcataaatatatgtacagttgtctccaactacaaggacgtacagactgacgctacggagatatgtcgaatacgtcataagttaggaccatgtccaaagcatgcatgacattgttgttgttttcctgaaatatttggaaattatatattcagaagacttagctatatatatacacgcatatatataataattaattaaatagctactagctagtaggtgcgagtaccacgcgcgtacgtacgtacacctctctagctagctgtattcctgtacgtatttagtgtatggtacagggacatgatcagtacagattatatattattcatggtaacgtgtaaccttgtatgccatatggacgtattatgcatataatgtgactgattcaattggtgcaaatgcatggctactaagcaagcttcccctgctctagaattattgattagttaacaaattttgtcggttcaattccaacctggtcatatcataagtacaggttctgttagttcttcccttgcatcttgacgaacactctcaatttaatttcttgaatcttgacgagtagtccgtcaaaatcttaaatcatagctatagagactaccgtcctggtaagaattcattaattacatcgatgaatgtctggcagtacttaatttaccagaaaactggtgaattaatcagccatcgatgatcgttgcctgttgccacaatctgttgattgattttttttcccctacttccatcgtcaaaacgatcaattattagtcttgcgcaacaccaagttgaactccgtacatcatcagacgatgctatgttgtttaatttgcatatcgtcggagctctgaactcatgaacttaagtacgtggatacactatcatcattctacctacaccgccttctgtagaaaattatacgggagtttttctaatttatatggaatttaactgtttaccgcagctgtaaattaaattcctaattcctgtacaacagtacaagaagactgatcatatatccaatatccatgattttttagtagatatagtcggtccttccatagttatgtggtttaatttgtttactatgatctaactagtttagatatcctcaagttgttttccactttatccacactttcaatcaaaaccatgcgcgcttaatgcctttataaacattataaacacggcgagaagagattgaaatgtcctgacgtcgcatagatcgaaagctagttaattaattaagctaattaattagacgtccagctgaaagcctgaaagctaaagctcgaaatcatacacgaaaaaaagaaaagaaaaggcaaaaaaaaaagttattacacatgatgagatgaggacgcggcggcgctagctcgcgttaggagatcggaccggagtcaggcgacggcggccgggagcgcgagcgtgccgacgaaggggaagctgagctgcggcagcgcgaccagctgccgccgccccgccgccgccgccatctccatcagcgccttcctgatcggccgcagcagctccgccaccagccgccaccgcaccagccgcgacacggccagcctgcaccggcccgccggcctgcgccgccgccccagccacaccgtcccgccgcagtactgccgccgccgcagcctctgccgcgccctccgctccctccacccgccgccgccgttccaccccaccaacgacgccaacctcgccatgcttaacactgtgcacacacgcactgatgtggtgatctgactctcccggctgagctgagcagtgtttggctttcgcagctgtatcactcactgatgacttagtgaggaagcttaatttatagtacgagaaagagcaacgcgattagctagctaagtaggtgaggtgttaatggtaattagctagttaactatagatagcctgcagctgcatgcgctcactctgatgatggtgatgatgatggcgtgatgataacattctatcaaagcttcatttttttaacgtgtaaaagaattacacgttaatatactagaaaaaggaaagttcaattatgcatcgcaaccagtcagaggacaattgtcggggggcaaggagaaaagaaaactgaaaaaaagagagaaaaaaatggagctaaaactggacactactcctatacgagagagggggagccggagccctactatacactcccaatatatccccaaaagacgcgacgccagtaaatgaccatgggaaaccttcatgtagaatggacttcagaaccaccgaaaccgacgagagagagtaatcgaacactctggagttccgctcctttcatagctgcgaggagaggaggactaaagagtcgaagcacttatgacaatgcttaggcaggcaggccctagaagtaggccactagacctgaagagaggagccacggagcagagtgaggtcagaccagtcaggtagagacagaatccggtgtcagacttggcgagcgaactcacagttgaggaggatgtgattcgccgttttgagttattggacgcaaaatggataggccgagtggctgtcaataccacgcttttaaatgctcttaatgtagttgtatcaccttaatttaactccttttgtcttaaaaaatcaaagctatcttaggtaagaagcgctaagctcactacacttaggaattgagaaggccgtcgccctctacatgcataatactaatcatttgcacggcagcttattaattaagtgtacatgtcccacaagaaaaggatatgatctgtgatcatactatcataagctagctacacataaagattaaatgtatatgtattttactaaataaagtgtaccatgtacaatactacaaaatggccaagagggtggctagctaaagcatgcgagaaattaattaaagttaatctatcagcttgatctctagctacctaatgatatcttaaacttgcttgtgctctcgaaaagcaaaatggatatataagagcgtgaaggccagctgatcttggcgagatgagaactgatgagaaaaagctttaattggcgattttattaattaagcaagtctgggcctgaagcagaatggatttttctcttttttactgcctagttggtcctttcaggtacgtacgattaacgatacaactgatttgttaactaaatcaatcaattaagatgttggtggtgcaatggattggatggcctagcaagtgtcaagttggataaattacagttgatgtgatgattggagccattgatgtatagctagctgctagcctttgctcatcagctgcttaattgttagctagctgcaacctgatgtgtcaggaaagcaaagcctaaattgcttttgatttgcttgtattaaattaaggaggaagctaggagggcaatttggacgttggtgtgtgaggtgtaagtgtgccaaaatggatagactaattaaggtctccggcgatggctgccggtttgttgctttcgaaacaggacggggctcgcgaatacaaaattaacgcaaaattccggccgatttccgcgtgccgatctcaaaatccgggcaaaccacggcagtatctgatatctccgtggccacgcgagatcgaattcgcaggaagcaatcattaatttaactactgaattcgaattctaaactgtgttaaggtttcggtctttcagaggaccacaaggagcagaaagctaggataaattgaactagagaggttaattaattaaatgattaatcaagcacgcaatgagtgaggtcaggagattggctaatcactagggtttgacattggtaatcacccggttggagtaagcatttttcacagtctggtgttagtccactcgtaggtggcctgtggcatcgccgccccaatttggtctgcttaaaataacccaagataacaatatcatcttgggttacttcagctatagtgtgctctgctttgctttacccaggtagctaatgctttctgattagctagatttgactctagcagccggcaattcgttccatttctaaagcctaggtagcattttgatttaaatatttcaaaatcaaagaattgccacacaagtttctcttgcatgctttgtcacttcatagagcatgacgaagaaaagaaagtaacggcagaatattgttggactccttaccaatttggatcagctttaggctctgtttttttctagatggaatattgtttgaaaccggcaaagttgtaatgagaggactcagcagctaactaattgacacgttaacagttacaagcctatcgtatccataatcta

SEQ ID NO: 10116 - DNA, 58012 bp, Oryza sativa
  unsure (1)..(58012): unsure at all n locations
cccacccccaccgccacccccaccacgaccgccgccactgctgctgctcgcctcctccaccgccatgagctcaaaccctaaaacagcgcgcggcgcagcgagattttgtggggagggattgcagcggcggataagggagggagatttaattcgttttaggaaggctgcgggtttgcggggaaggaataaattgggggtttcctccgagaagagagagaggaagagcaggagacggtggaggtggacgaggaggagatctaccgcgcagcggcggccgcggcgggggaggagtgtgatggatgttaccgcgaggcgaggcgaggcgaggcgggggatattttggttcaccgcgacagtggctggctggctggctggggggagtgcggtgtcgggtcgggccaggcttcctcctcggggaggaaggagacagacagcggatgcagacgcggacatggccgctggctggcgcgacgccggccgtattatttctccgtctcttttttttttctttttttttcctttttcattttgttctctttctgtgattttgtggggagggacttttctttttgggtgttatagatgtactagctggttactactctctccgtatttcaatgtataacgtcgttgactttttaaccaatgtttgactattcgttttatttttgtgtaaaatgaaaatatttatatcatgcttaaagaatatttgatgatgaattaagtcacactaaaatgaataataattatatacattttttgaataagacgaatgatcaaacgttagataaaaaatcaacagcgtctaggcagtattaatcatgagttcgtgtttatctcttcctgtcgctgtccatatgctcctgattaccggtgatagcgagagcatgatttgcatcttttcaattatttatattcaacaagttttgtcgtgtttcaagcgtgatagcggtttataaagaacagatatatttaattgttttaccaatatagacatataatgtttggcgtaaataaatgttctcagttcatggatatatgggacttatctagttatcttatatgtataaaaaatggaattcatgcagtaaaatggaggtaaatctatgtctaccagtatattagttatctaaaaaggctatttttgaccataatactctacatcatggatttaaatattacaaaaacaaatactccttccgtctcataatacaaagaattttagaggggagtgacactttctaggactacgaatcttgacaggctctttatccagattcgtagtcctaagaagtgtcacatcccttcaaaattctttatattatgggatgaagtgagtaattcatgagctagaattataacatggttagttacctagaaggatcatcccatcaccctattatttgtttagctatattagcaccaccctgtaagcttttaagtagggatgaaactggttcggatagttttcgtccgtccggaccatttttcggattaggatagtttcagtcggaattatccggaaattctcggattcggaaacgaattcggatattttttcttggaaacgaaaacgaatacagtaagggtaatatccgtcggaatcagaaaacggtcggaaactatccagaatttttttcagatatccgcagacattaagcaaattatataaaaaacacgtatatatacataactttttcatacggaatcagatgaagacaaactttatatcaacattgtagagctcgatgagatctacaactttattattgactattttattatttgaggtcatttatgggtctaaatattcattataatataccatattaatttttacaaaatctcagatctacaattcaacgacatctgaggagatgtgttccatatcaaaattgtagagctcaatgggatctaccactttgcagtttataacatttgtatttgaaagcatttaaagtacaatacaaacattacaagtttcgaagatgtgaagtaaaataaacaaaatctccaatttatacaatggtaagtaagttatacatctagtgaaaggtctcgggaatagaaaatgataatcatatttgcatatggatctcttagaggaacagccatgaaaatcgatttccacatacagttgtgggaccgtctataaaattgacgatataaatgttggagatgttgaactaaaataataagcgatatctcttccttgatcaagaaactcaatttgaggggttttttatataccgataaatattcgctaccgtattcgttccgtctcgtattcgctccgtatttgtattcgataatattcgatttcatttccgtatccaagttttcgattccgattccgatttcgaaaaaaaatattaaaacgaatatgataaagctagtttccgtccgttttcatccctacttttaagtaatagtagtacaagattatttagggactgtcattagatacaacagctgagactataaatctctaaccattgactaattttttattactattctctcttttttttcacccttatgtaaccatgttttcaatatagaggtcaaaagtcattgttgagccactgttaactacagtaacgtcatcttctttttttctttttcgtattagcaaaatattcccaattggtaggactaaaaacctcctatgtctaatgattattgcacatgtccttagagcatcataacaatactgaaaacatggaggcatgaaggagttactagtaaatatacatgatacgatgaatataaaacataagagagaattcattatatgccactgacttgtcatacgtccacgatttaccactgactttgttatgttctacaatatgccatcggttgttgtttaacttctacgatttaccatcgccgtccggttagcctccgttagcacggtacaatttcatccaaatgaccaaaatacccctaggacaaaaacttccaaaatttggataaacttatcaaaatatcctattatgaacataagattgtaaacatccaaaatttggcaaaaacttaaaatctgacattttaaaatttgcaaatcttgttttaaatatgtcaaaaaagtccaaataaacaaaactttgatatttcaaggtcaaatgagcaagggtaagaatggcaatttatcccttagttaacaatgttatattgtcttcacgataaacaaaaagccttgatctgttttcaagagggtcaaataaacaaacctgaaaaaacaagatcagattgatagtttgacttcaaaagaggataaaatgagcaattgtcccttcatcatttgataaattaggtgaaaccccgcgcattgctgcgggaatttagtatgataacaataaaaaaaataacgtgtaagatagctagataacatcagattaattaaattaatgtggtttatgatagtttaaatttaaatagtatgtagaacggtgattcaaacgtaaaaagtaaggtgatatgactttatggaagaagaaaaatagggagataatttggaccgtagattaatcatctaaaggctaaaaaacaattgatgtgatatgacttaattagaggaaaaaagaagaaagataatttggaccatagattaatcatttaaacactaactaagtgaggatgaactatataagtatataggatatcataaaacacaataaagatatacattaaaacattatatgaattatgttggatgataatttaacatgtttatatttaaaaaactcttaaattataaaaactataaagatatagcatgtttgcatgatgtttaaatgtgatgattgttaatggatgatgatgtggcatcttgttaattagtggattaatggatgatgatgtgatatctttgtatgagcttaaggaattagtgggggtaactttatagtaagataggattagatgcaattaatattcaaccattttttttaaacgaaccggtattaatattcaaccattgggcaagttgctatgggtttactccactcggagaactgactatatttctagctcttttagcgattggttcttgatcgatcggttctttctccaactttactaactcatctaccttgttttacacgggcacgctttttaaactactgaatggtatttttttaaaaaaaattatctatacgaaagttgctttaaaaagatatattaacccattttttttaaaaaaaattagtaaatatttaattaattataaaaaaaaatatgccgctccgttttatacgtgaagaaaatgggtttccaacgcaaggaaaggaacacagcctactagctatggtgtgttgtttctctctgtaatttaattggaatgtttgcactcagtttctaatcctcgtccccaaatcgatcaaagatgttatgcttttttaattgtcacagcttttcctgaagaatgtttcacatttcaaacggtaagcataccaacgactcttttttcactggtgatttgggtaaacgagaattacaggtgtattttcattaaaaataaggggaaaaatatgtggtgttcccaaatcccaagcaggccctagagaaaaatacaccaggggaatccaagctaagtcccccacttcctactacgcgcatatcgttccgactcctatagttcacctccttttggcactaaaagaagtgattttggtataataatcctatttttgagctaggatagcacaaaccttaccatttttttttatttcggcaagcatgtcccaattcaggaaacaaaatctaagacatactcccttgtttcaaagcgattaataatatttcaaagcgacttaattattataatatgaaaggaagacttataatatgatgaacagagacaaagtaagatagaaaaagtgaaaccaaaaccatgaaggaaaaagtgtaaccaacacaatgaagaatgtgagccggtaaattagtaatccgttatttctatagtgacgttcttttctcttgaagatgaagttttatacgcaaaacgagatgatattaatatatgattaattgggttttaattattacaaactagaaaatagattaatatgacattttaaagtaactttcatatagaaagttttcgcacgaaacgcatcgtttagtaatttgaaaagcgtgccacgagtatccaaaattttatcaaattttgttgaagaaaagaacagggtcacagtgataccaattaattacagttataattatgatcctagagctcaacactcggcaagccaagtcgtcactcatataaggagataacacaaattaagagtgccattaaatggtagcatgacttcattacaaaccactgcagaggtgactatcaaaatacatcgaagtatgaaatggacagcacaggagaatgtccgaacttgttcacaacactgcccagatggtatcgctgccagcatacaatctcgatttatgagggatcatttggagttcccctttcctactgttgtcgttgccattggcatgataaacactcggcaccacctccacaccggtcaagacagtaatgttcttcccaattaattcatcggagtccccttggggagtcttattgtgaaagaaccttgcaatgcagaacttgcccgagccaaggttgacaagttgagaatccttgcatcgcttccattcctctggctggtcaaactccttacaagtagctagtagctgtggctgggaattcatcgatgagagatcagcagcagccaagtcttgggtgtcggcagaaatgccaacccagagcttgagctcaggtacatactcaaccttgccggtgaagggtagcatccatttgccgaggtggctccatgtgaagctccgcatgtccatacaataggtgccgacaccttttacagagatgcagatgttcgagccgtcaccaagcaaagcataggaactgatctccaggtacctgcccaagtatgctctgtcatagatacatggcggtggcaggaggatctggcgggtccaggacttcaaggtgctgcttccacgatagtggcagtagatgaaggcctcgaattgattgtttcctaactttcctgttttactcctcttatccattatgtaaaggttgccaccgtcgaagtcaccggcttcctccaggcaggggacgaagatggagatgggtatctccttgggctggtgaagacagggcagcataaccacgcgtcttcttccgcctcaaagataaagcagcgtcccgactggtctgcacacaccaccctgcgatcaaaaagcggcaagcagtctatcttccaatagtcgtcaatacctgaacgtgaagcttggaagttgaagatggggcttggaagttgaatcctatccatgctgcttacggtggcggtggcggcctcctccttattattgttctgcttctggatgcaggcatcagccgcgacaactttggactctggtccgtttcggttcggtggagtagcgttgaagaaattgtggagcgtgaggtcgatgcagcgcagcgatttggattctgggaagcggctgtccatgatcagattcagaaacctccgagagagggccattatcggagtgaacttcaagataaaaaataaactacaggaaaagcatttgttaccaagaagaaggatgaaatcatcaaaatcaaaataaacaggaaagatttgtttaccaagggaaggggaaaaaacatgcctaccttaggtccaggtacagctgctattgtgagggaatgagtgattccagcaaggaggagagcgtatagctgcagggttggcaagaaggcatcaagtgagcagccttataatcatcagagagaacaaggaaagagagtggatgtagatctcggagaaagggcatacctcgccaagccggagaagggaaggaggagcacccagcacccccaacagaatggcggcggccggcggggatgggagtagggagatctgctagggataggttctgccgaaatcgctaaaaagcgatcagtcgcgggcctcccctcctgcgcggcgcggccacgtggcacgcgcggagagggggccgcggtggaacggcgcgggagcgccgtgcgcgcgtttctcgttttctttttcgttttttttctttcggtttttcttttcgtttttttctgtttttttccagatttggcgtttctcgttttttttctttcggttttcttttcgtttttttctggttttttttctatacgtggtgttttttttgtttttttcttggttttcggttttcaaatatgtatgtatttacatatatacaaagtttgtatacgcgtacacaaagtttgtatacagtagtgtagtagtagtatagtagtacaccgaaggtccctcaacttgtcatcgagttaaaaaatcatcctcgaaccgtaaaaccgaatacaacgcatccctcaacgtacaaaaccagtgcaaactaggtccctcgggaagaagaggctgacacgtgggacccacgctgagtcggctaccatgtcggacaaaaccggagtcacgctgcccgctgttctccttctccgcgctagttgttcttctcctattccagccgcaccactagcttgccgcgtctcacgtcgcagtgaaccagcaggtgagcttggtgctggatgcggcggcggcggaggcggccggggtcggggtcaggaacggcgcggtggtggacatgggcgacgaggaggagaaggggagtaggtcgaggcggatgctgatagtagtgacgacaacgcggtcggatggcggggtgcggcagcggcgcaacgccgcgctcgcccatgtcgagaagcaccgcctcttcagcgtcgtccacttcgcccacgcaagcggtgtctacgacgcctatttcttcgatgagatccgccagatcgagcgatgtcatggccggtgagaaggtcgccgcccactggcctccccaccccccttgcttgccctacctcctccctcgatggcggcccgcctctgcgcctgcggcctctgcaatggcgggcgagagcggtggcggagcagcggcggcggcgcgtcgctagttgccaagcgtcgccgtcgtgtcgaccatcgtcggccgccaacgccctcgtcctctccctcctcgccccgccgaaggcaacagcccgccgacgtcctccctagctgcctacccaaacaggagaagagtgagagagagagagaggagaaagggagaggagggagagggtgatgacatggccagctaacatgtgggggcacacgtgggtcccacgctgactcagccgccaagttagacaaaactgggttggaaaaccatcgagggacatattgtgactggttttggttagttaagagaccccgcatatctggttttacggttcgaggacgtttttttatcctgatgacaagttgagggaccttcggtgtacttattccaactatttatatatactagcaaagtgcccatgcgttgcatcggcaacactcaaatttcacgagatgattaatttttaagattggagcactttaaaagaatgatattgctagagaaattacacagttacaactcatccctaacaaataaatcaatccaaacgtatatgacggatctaccttctatgacagataagtaaaaagcaaggaaataaaattactacttcctctgttttataatgtaagtcattttagtatttcccacattcatagtgatgttaatgaatctagataaacatatatgtctagatttattagcatcaatatgaatatggaaaatgatagaatgacttacattatgaaacggagggagtataacacttccattgaaagtaggatgttcggcataatttgtttcgtatagaatggcacacaatcagaaaaaagccatgaagcaaaataatcaagctaactcaaataacttgattagctcaaattctaagataaatacttaaaaattaaatggaaaaaaaatacaacttgattagctcagatcttgagataaagacatataaaaaataaaagagaaaagagaaagctgtcatctcgttgtcgtcgtccctacgccatttggtgcctgaagggaagttcctcggcccggtgcagttctccaccgccgggtgcatcgctggcttcatgtgtgtgcgtcgtcgtcgtcgaggggaacgacccggccgccgtcggcagccaggagatcgcggtgccctaccgctatacccgctactcaagcacatgcagcaggcgcaagctagggcatggagatgtcgaggaggacgaagctgaaccgtcttcggtatgtcgtcttgcccgttgctgacctggcgagctcgttgccatgggccggctcgtcgccactccccctgacgttcgcgcttctccccaacggtggcccgacgtggagcggaaggcaaaagatgaggtagcaccgatctgatgaagcggaaaggaagggaagagaagagatatagtcattgacaggtgggctccacaagatgactcggcagcttagaccaagtcaaagcgtcacatcagcgaaacctcccttcaaaaccactgatagagttaaattaaaccagttctaatagttgagtgtaaagatatgtggtattgtgattcagggatgtgaattagattgaagttactccctccatccctaaatgtttgatgccgttgacttttttaaacatttttgaccgtttgtcttattcaaaaaattttatgaaatatataaaactatatgtatacataaaaatatatttaacaatgaatcaaatgatagaaaaataattaaaaaatacttaaatttttttgaataagacgaacggtcaaacatgattaaaaaagtcaacggtgtcaaatattttgggatggaaggagtatatgggagggagttaaaattaggggtgcaagtggggctggctttttttatggcccgtagtcccgccccacaaaaaagcccgtaaatttgcgggcgggccatcccgtatggttttgcaaaattgtttggcccatcccgcatagcccgttgggcgccaccacattagggcacgagactgggtctctgggagacgcgagacaccgccgcagccgagacgggagacggcggcggtgctactctcgtcttcctcgtcgcccatccatcttcctcggcgagacgacgccgcagcagccatccccaacccccacgtgtgttcggtgcgagcctgctacgctacccgtgctgctgcctccaactctctacccatcactggctccatcggcctgggagactgggagcaggtaacttcgagctgccatggaagagggctgcagttccaattggccggccacaccttgtgccgcagcgacgacggccggtcaattgtttttcctccttcaagatttgtttgttcttcaagcagcaggggatttgtttcttcaagatttgtttgttcttcaaggagcaggggatttgtttgatgagaagtgatttctactcgtttggattattgaataagaacttcagattaaataataagcatttgggtgagatttggttttggatcaagtcgctaagaatggttagcaggccaggactggcttggactatacttgttatgtcattgaaaaatgaagtgttgaacacatgttaacatccttatgtaccagtttgatgtagaccatgtgcaccgggcttcatccgagctgtcgatggtcgcctggtcctttacgttgccccatcacgccggccaatgcttggtggctcaaggtgaggcatggactatgagcagcaataccgtcattgatttgtcccgcggtcccgccaataacttgttgcacctccttgatttctctgctctagcaacttgtgcgacttttatttttcttcttttttttctaggattatcggctggtttagttctaatgcatgcaagactatgattgctcgattgttttttcaatcgatctttgatgttatgatttgtactccttacgcgattaggattttgtatggatctctctctctcttttgctttggttgttgtacgcgattacgcacgtgcggagacggagggcgtcgctcggtcggactcacggacgaaaaaattatgatgatcagaaagttacttatttttgaagtagttaatgtgtcccgaaataataatgatgttttcgccgataatttagtacgtcgtccgtatttgagtcggtttctaagttcgttcgtttttttaatacatcaagtatttatcttgaaggttagtgaaatatgcgttgaaggttagtgaagcgcagggccttgctaggggtgaaaaaaactgaccgctggtgagtcgatcatcggattctactctgcggtacggtctggggtttatgaagatcgattcttgttttgtttatccggtctaggtacccgaaaaagccgaaataccagatgatcatgtgctttcccactcccatcatctatcccatccctactcccagcgcttgagctcccccatccgccgtccatacatccatcaatggggtgggaaaaaaaaagtccaaactgaaagagcatgatggagactgaaaatatcgagactaagaaattccgtcgtaagtatttaatttattttagttagcagccttcattaaccgaaacgagaaaaatatctctttttgtctgacagagtacattatactccctctattcgaaattgatctacatattttaaaggtacatcaagaccaagaaaagttaataactctcttatactatatttactctagcaacaaactcaatgcatgcaccatccccactattttctggctaatagcaaatcaagatattgtatgtgggttataaatgcttatgtgcatggatgcatgcatcaatgttcatttactccaatgtacaaataacaaatagacctaatgaatgaacacaaatatgtagatcatttaggaataacctcaaaaaagactatatataaatcaatttggaatcgagggagtagttaatctattgaatggaagtaggagtacgtactactaagagcaagtctaatagtacagcccactactagctctaattcatctatagccaatttaatagctaattcatacaatagttgtttactatactattaatatatggtcccacctgtcatacacacagtatgtcttaaagtctgtgctgtagctggctacagatctgtagcccgctgctcttatctctcattgtatatctcattaaaatatatttatagctggctaatagcattagcctgctattgtacctgctctaattgaatagtacgagcacccaccagtagcaagtggtcccatcgatttgcacgtcgtgttcaccaaaatactattttcggttatttttgtaaatagaaatgtttttgcaattttactattttctcagaccaaaatacccttgatgtagaccccacctgtcattccctctccccctctctttcccctcttcctgtctcgaggacgggcgccggtggccggcgagcgtggcctaatgcacgtcgtcgagctgctcctcggtggcacggcggcatccccggcttggaacacctcgaatttcgagaagcacgggcaggggaagggcactcataagcagcgcccggacgagcgcggcgtccccgttgccggcggcgaggaagagcgcacgccttgagccacaccaccccggcgtagttcacgtccgcacgcccagacgcgagcagctccccggcctccctcaaaatatgcggtggcgatgctctgctctggtcttgctgagttgttgcttctgctggtcgccacatcttgaggagtaggggcagccagcgacaacagtagcagtggagagagttggggaagatgagttgctgttgctggccgaggcctaccagagcgccatcgcggatgtccgccgcgcggcgggggcttccgggaccatgggttaccccgagggcggcaggcgcctggatgacgagcccgtccacaaggagctgcacggtgttccgcggcgaggagacccacgtcgagcgcgtgcgcgaggtcaatggcgaagccgacgtcgagcaggacctcggagatgcggacagtgatggcgtggactacctcagcggcgatgaggactacgtcggtcgcgagatccaccggccactgcccgcctcccggccgccggccactgcccgcagcacgccacccccaccagccgacggcgtcatcgagagaggaaaagtggtaagagagagggaagagactatgacaggtggggctcgcgtcagaggtattttggtccagaaaaatataaaattgagcaaaaacatttttatttacaaaaataaccaaaaatggtattttagtgaacaccttcaatttaggatggcattccagtgaatcactttgaagcggtagcatttcagcgaaaacattcttttatgatagtataatcccaattttctccctacagagaaaattgggattaaaactcccaattcatcgctgctcccctccagcaccgcgcctctcgcttcctccgtctctggtcgcgcctctcgctgcctccacggctccaccccatccgcgccgctcgctgttttcctccaccgcgttgtctctatccccaccggcaccgctcgctgcttccatgcatcgctccgcagctccggcaaccggattagggacggaagggcgcggggaagacggagaggagaggaggcagatgaggctgccgcagccgccgccgctcaaagcgtccagatctgggtcgtcctctccgattcctcctgctttctctcatccagcatgatcttgtggctataagatctggcggcggtgagctcgggggcgcctgatccagcaacccgcccgctgtagtcgttgaagaagagggtgaaaaccctcaagcggctagaggtagaccaaatattagtttttttaattggtatttttatttgttttttaagcttttgttcttgttcttggctttgtggtggtagtattaaagctatgaaactttgggacaattattccaactttgggaggattttgttaatacaacttggttttcctttctttgattctgaggatgcaaacaacgatcggggttcaggacgatgggcgcgatgggatttgttcttgactgttttatttatttcggattcttttcgatccgagtaatcgggtatgatgcgcaggggtggaggggatcgtgagcaatgcggacaattagcgcttacacggacgaaaaacaagtgacgaaaggaaaaatacgaatcttttaattaggttattagttaatataagatataaaaatacgaatcttttaattaggttacccaagtcgggtagacctatccctagcagatctccctactcccatccccgccggctgccgccattctgttgggggtgctgggtgctcctccttcccttctccggcttggcgaggtatgccctttccccgagatctacatccactctctttccttgttctctctgatgattatataaggctgctcacttgatgccttcttgccaaccctgcaactatacgctctcctccttgctggaatcactcattccctcacaatagcagctgtacctggacctaaggtaggcctgttttttccccttcccttggtaaacaaatctttcctgtttattttgattttgattttgatgatttcatccttacttcttggtaacaaatgcttttcgtgttgtttattttgattttgaagttcactccgataatggccctctcccggaggtttctgaatctaatcgtggacaacggcttccctggatccaaatcgctgcgctgcatcgacctcacgctctagaatttcttcaacgctactccaccgaatcggaacggatcagagtccaaagttatcgcggctgatgcctgcatccagaagcagaagaataataataaggaggaggaggaggccggcgcaagcagcatggatagtattcaacttccaagacccatcttcaacttccaagcttcaagtgtggcccatcactgggagattggatgcttcccgcttagaggtcgcgaggtgctctgcatcgaccagaatgggtgttgttttctcttcgacggagacacacgcaacgctgttaccatgcccggcctctgtcagcccaagcgattcccactctccttgtttgtccccagcaccggagttgataatgacagcggcagcctcttcatcatggagtctgttgttaaaccgaagtcgacaagcagtgggccgcgcagcgatcagtttgaggcctttgtctaccgcacgccctcccctcgccgccacctttcgtccacctgccaatccctccctccaccccctttcgtccgagaccccaaattctccaacatacgcaccaagatcacctcgtacgcagtggttagtggtggctctgagatgtgcatatcggttgaaggggctggcacttactgcatggacacagtgaagcatacatggaggcatgtcggtgagtggatcttgcccttcaacggcaaggttaagtatgtacccgagctcaagctctggtttggcctctctgccaagaccaaccacttggctgctactgacctctccgccatggacgacgactgcttccagcagccagagctattgaaaacttggatggagctttccccacccaagaattggtgggatttatccaactctcatcttgtcagtctgggctctggcaggttctgcattgcaaggtttttctacactcgccatctcatgggctactattatgatcaaatagttgataatcgttttgttgtcttgactggtgtcgatgtcgtgccgtgtgtccatgatactagtagtggcattgcaaatggcggcacgggggatctccgaatgatcaagtatgagtctaaacttcacgtgcctaatggcagcggtgagatcgagagagtgttctgaataatttggatcttgcgttcaactctcttatctattactccctcaatctctaaatatttgacgccgttgacttttttaaacatgtttgaccattcgtcttattcaaaaatttaagtaattattaattcttttcttatcatttgaatcattgttaaatatacttttatgtatacatatagtttacatatttcataaattttttgaataagacgaacgattaaatatattaaaaaaagtcaacggtgtcaaatatttagggacggagggagtatgtagtatgtctaaataattttgggactagggctgtaaaagacatctgggtattccgtttggtttggtagtgtgtattatgtcctattttagtttcgttaatttattcctgagatattgatgttttctgtcacctacggtagtaccctttccaactagtaaggcagtcagcgtgcacgtaaccaaacaaaacactcaagtttatatagaaatgcagcaacatcaaattaatttaattaaaattatctttgaatatacttttgcaatagtttgtttgttgttgaaaatagtactacctccgtttcacaaggtaagttattctagcatttcctatatttatattgatgttaatgaatctaaatagatatatgtgtctagatttattaacatcaatatgaatatatgaaatgctagaatgacttacattgtgaaatggagggagtactgttttttctttagatctaatcaaacttccaaaagtttgatttgtaaaggtaaattcctttcatttgataacagagggagtactacagaatccatttattaagatactagtgattgcgttaataaaaaaaacacaacagcaaaataacctattttttggcttgcaagcatacaatgacagatttgagatttctggagagagttattgtattgtttatattgtttaactaagggggtgtttagatctatggttgtaaagttttggcgtgtcacatcgaatatatggacacacatttgaagtattaaacgtagactaataacaaaataaattacataatccgcatgtaaattcgagacggatttattaagcttaattaatccgtcataagtaattatttattgtagcaccccattgttaaatcatagagcaattatgcttaaaagattcgtctcgcaatttacacgcaatctgtgtaattagttatttttttcgtttatatttaatactcaatgcatgtgtccaaatattcggtgtgagagggtgaaaaattttgcgaggggatctaaacagaccctaacaatatgccggtactaacgtacggtggcatttgttcttttaactttcactatgttgcttatgaaaagcaagtgcacagaaattgcttaacaaaagttttggtacgtagcctcatttgtaaaataacatcgcaactttgaaagaaaaatgatatgccttggtcttttttttttttgctaaaattactaaaacatatatactggctttcatttggtgaataaattcatataacatttgcatctggtgaatagattcaggcaataattgcatcctcatggtaaaaggaggaactatggagacgacatcatgagaaaccttttcacacttactgcgtctgaatttcatttcctggagtgttagtcatgtacctcggctatgtaacagagtagctcatgaactggcagctatgggtagtgtctgcgatccgacggaggcccctgttttggctcctattccggcacaaatgatgtacctggttgttgatgattcagcattgtcatagtaatggaaatcctgatttcccctaaaaaaaaaaacttttcacacttgcatgcctatcttttatttattttctgtgatacatgattaagatggttaactaagatcttattagtgctgatgagcaaaccaactgcaaaattcccaagaggttaatttagcatgttggcaaactctatgttggtcgttagacctcaaacccagagtataaacctcattattatgatagttgatttttgtacctaacatttcgtcaaaataatacaacgcaacttttctagtgcatgcacaacaatttggtccatacacgaacaagaagtctgcccgttcgtcatgggaatatcttcaggaagttctagtgttgcgctcgcaattcacacgaacaggaacgcattgcacacgccacgggcctccctcttttctgctgctcctcctcatctcccttttgttgtgcatttgctcacatgatcagcaattataatcctccaaaaaaactttagctccattcaaattatctttcaattctccagaatgaagcataaaaagttaaaaactgctttgttccaacgcataaatgtagaactagaagctgtaaaagaaatgaggtatttaataaagctaagtaatttgataggaatacagaactgctgattgaaacttgaatactccctccatccacaaaagttacacatatttcacatttgagtttttctaaataaattgttcctatttgtagtctttatgcacttaagacttaaatgaatagataaattaaatatttgattagaactcaaggattcatctaaatactcattggttgcatgattgcatttactctttaattttgtaacatccaagatgatttaatttctccttggtcatggtaacaaaagtaacaggaagtaataggtgtaacttttgttgatgaagggagtataatataagtgataggcatttaacattgtaataatatatactccctccgtcctataatataagggattttgattttttgtttgtattgtttgacctctcgtcttattcaaaaaattttggaattattattttttttgacttactttattatccaaagtactttaagcacaacttttcgtttattatatttgcataaatttgttgaataagacgagtggtaaaacaatataagtaaaaactcaaaatctattatattatgggacggagggagtaatataatataggaaaataattatatactccggtgagtacgtacacatgcttcagtcgaccgtccatccattcaaccaacgcagagatcacatatccgatcgaacctacacagccaaagagatcccgggataatttaactaaccatcgctgattatttctcagtaaagcgagacatctctggcgaaacagacgcggtggcgtgcgtccatggcgctatccatcggcaattcggccatgatgccagcgcgatccgtcggcgattcggccaggaagcgaggcccggtggctacaggtaatccatcggcggtacagcgacgacggcgtggtggtccatctcggccgatcggcgtcatgacctgggcacaactaggcactactcccccgtcctaaaaaaactcaattcctgagtttccatgtctaacgtttgactgttcgtcttatttgaaaaaaatatgaaaaaattaaaaagataagtcatgcataaagtattgtttatgttttatcatctaacaataaagaaaatactaatcataaaaaaatttcatataaaacagacgattaaatgttggacacgaaaaccgaagaattcggtcattttgggacggagggagtagcatcgaaggagatcgtcttccctgtcgttggtaccaatccttgatttctgactgctagatattctaattcatggaatcatggtcgcttctaaatctctgccatcttttccccactttcgcagtgagccagggatcaaacagaaccgtacgtagtatcaatattggcagaggcttccataacctggaggcaagctgtccaacgatggcagcttgctcacacggatcctcgattgacgatggtgtctagtcaatgaatcacggcaacgtccggtagaaacctatccgccgtatcttgatggatggcatgtacccggattacaagggatatcgcatccttcttaccgccgatcaccctgcccctaaataaaggggatcggcagcactcctagggggttaggcactctcttcactcaacactcaatacacagataatccaccaaacaactggactagggtattacctatcctgagggactgaacccgtataaataagtgtcaccatttctttctagcatctagcgcaccctataaattttattgccgatcttagaaatcgacacaagtgctaggaggccctcgtactccaattatacttatttcaatttcagctgaaattaatgagctcacatactcctattataagtaaaaacttgccgcattattatgcagtgttctaaggtcatacaatctgcagttttgcagttactgaaatgttcacagattcaggcaactcaatgctcagcaagcaacaacaaccactcatataccaaattagacatttgcaaccaggttctcatatatccctgttcagcacatcagaactgctgaataatgtttcacctttttttatgacaaaaatcaagattacataatcaatttccacgatacagaacctgagaaccacacaatacagaaccacagagcaggggcaggggcatttcacaatacagaaccacacagccttgggggcattttcgcaaacacctcgcggacacaggaaacggtgcagcgttctccactggacgaagccgtgcgacggcgtcccccctcgccggtgacgaagtgggtgactgaccggtgcgggctcgtacgctgaaccccatcaacgagtcgaggccgccgaaattggaggtgcggcgcgggcggagtgtgttcctgacgaccggtcggagcaccgcggcctcctccacccgccgggctcgggatgtggccctgcccgcctgcatcagcgcgccatcagccctgccggccggccgcctccacgcacccccggtcgcagcggcagggcagggcggcctggcgcctcttcggtcgcggcggcggcgctggcggacgccgatctggagcgaggtgcgaggccgtctcaggccgcgtggcctcctgttaggcatttgttttgcctgcgtgcgggcccaagtaaagcagccgttcgattcggtttggacggccaagatgcacgcagtgtcatcctgtgacatgcatatactaaagctgtgtttgtttcaattaagattattgtaatctagattattgagccagattactataagctggattataataagccgacatagaataaattgttacctgtttgtttctctggattattagttgtttgttagctgttagccacctaataatctaaaaaaacacctttagagtggattatcatattatagtaatgtggcttatagattataataagctatcacaataagctatctgtttgtttcaacttactcctaataatctagattataataatcctaaggtggtgattggatccagggactaaactttagtccctgtcatatcggatgaatttggagtattaaacataggcaacttataaaactaattacataaataagagctaattcgcgtgacaaattttttaagtctaattaatccataattagtgtatgtttactgtagcatcacataggctaatcatggattaattaggctcaatagattcgtcttgcaaattagtccaagattatggatgagttttattaataatctacgtttaatatttataattagtgtccaaacatccgatgtgagagggacttagtaaaagttttagtcccatctaaaaaggctaaggccctgtttcttccagcttgtgattattataatctagattattgagtcagattactataagctagattgttataatctgtattagaataagcggttagttgtttctttcctagattattagagtctagattattgggtttgcaagtctaaagaggaagtggggtggcatggtgggtaatttttcactcaataatctaaaaaaaaagttcacctaaatgagcttatcagattataataagctgagcttcaaattataataaactaatttaataagttatctgtttcttttagattactcatgataatctggattataataatccagaactgcaaaccacaccccaccccccccccccaaaaaaaaaaaaaagcgcaaagcgacgggaggtcggagcgagcagagaagaacgcatttgattcagaaatctccatttgaatctctctcgtctcccctcgatccctagcttcctccctgacaccatgctgccgtcgcacctcaacggccactcccccctcgcgcgccgctgccctcgcctctccgccgcctcgccgccagccaccggggattccgatgcggcggcggcggcggcggacgctccgctggcggagcacgaccgcatctacttccagtcatactcccacatcggaatccacgaggccatgatcaaggtaagccgccatgcccacatccgtacccgattcagtcgccctctccgtccaaaccctaaacccccacaacccctgggccgacccgtgttgtgagtccgaagtcgcgatttggtggggatgacgtgtgttcggtttcgttgggcaggatcgcgttaggacggatgcttaccgctctgccatcatgcaccaccagaagttcatcgaggggaaggtaaatttgctcgccgaattgggggtggatgattattgcgtgctgttgggattggattacaaatttcggtgattgatttcgaaactttatgctatgcaggttgtgatggatgtggggtgtggaactggaatactctcggtgttctgtgctcgcgctggtgcaaaatgtgtaagctacaaaatccctgtgctgagatgattggccaatttaaatgcatagcataatgtttggatcatgcttgcaaaactaatttgaccgtgctctctcatccagtgaatcctactttagtgtaaagaagtacattttgtgctgattcagaggtactagtatagttttgcatgcttgcaaattgagcagcgataagtgttgtaagatggatttttttcaatgcttcattttgttgtgctatacaaaaggaaaaaccagctcagttcttgtttgtgaaagaaaaacagcttttaattttatcatttctatgtcctaacaaaagtgacatggatctgtgtgtgctaactaactgatggcagctgtgtttttccctgattcaactagatgttaagtcttgtagtatatggcactcttaacgtatttttctgttttcactggtccatttgtctgccttataacagtgaactttttccatgtgtattcaaatggacttacaggtgtatgcagtggaagctagtgaaatggcaactcaggtaacattattttttaggatatatactctaatattaaattgtattctttccatatcttgtttgttgttcttttgttgtttatgtgtggaccatttttttagttatacaatataaggacatagaatacacggttgcaaaatgacagcactcaagtgtattcatgaactaggtgtttgtagtggtatccataacaaagattgacagtgaagcttcctactcatcttctataaaataccagttaccagttaatactaccagtcacaactcacaagagagtatataacaatatattaaaatagtgtattgatcttgatctttgcagatattgaatattagtgtcatatttatagtaatctagcggatcatactattttgaaaagtaactactcttatgggtatgctgcggcaaataaatgtactcctttttgcgcaggctcgtgaaattgtaaaggcaaataatctggatgataaggtcgtcgttgttcatggacgcgttgaggtaagattctgcatttatgttttttttggttatatgtattctctcaatccctaagtatttcactggaagagttatctgcatttgccaagtagggtctactagattgaatacaaagtttggattatcagggcataaagcttgtgtttccttctctattttcacatgatacaatctctgagtcattattgtttgaaaatatatttacattagtatttttacatctttactttttttatctgcatttttttaacttacactgaattgacagtgcaggatgttgaagttgaggataaggttgatgtgataatatcagagtggatgggttatatgcttctctatgaggttcattcttttatatggttgttttttgcgtcacaatttgatattctcttatcttccctagttctatctccttctgatttctctagttctgttttcgtctgatctgcagagtatgctgcctagtgtcctgtttgcaagggataaatggcttaaacctggtggtcttatccttccatctcatgctacggtatataattatcacatgtcattttatttctcatgcatgtgcatataaaataagatagacctagagaaaaaaaatcctacttttgcaaccaatatcttacctatcttacatgtgcatacaaattacagaacagttctaagccttggcacaaattgcagaacagttctaagcctgattaactatgtatccttcttttcgatagctcttcatggcacccataacaaattctgagaggtatgaaggaagtgttgatttctggtctgatgtctatggcataaatagtaagttactattgttttgttattagagccgcattatgcatcacattcaccatctcatgttggatgctgatttttgcacactataacttgatttcgtgcttgtactgctacagtgtctgcacttgtgccacttgccaaaaagtttacatcggaggagccctccattgaaataatcggtggagagaatgttttgagctggccatttgtggtgagtcttcacaagactgttgtggataatacttttcaaataaataaccatatttacctgttgaggcttattaacttctttatgtctacttacaggtcaaacacatagattgctacacttttaaggccgaggagctcaaatctttcacaactaaatacaaagtttcatccatgatgttaggtgaatcgtctcttttcctgtataatattattcctgatgccgaatctgctatttgactcgaatctataaaatcttcttcaatcttcatccacatacagtttatcatatgaaacatcaatgctcagctgcatttttcaatgtttattcagttctgaaactactgatcggtctttgattgctcatctttctgtttatacaccatacatatcctatcttaatttgctgatagaaaatatcttccatgtgaagctcccattcatggctttggtttatggtttgaagtggagttcaatggcccttcaaatcccacagacaaatctccttccgatttgaatccactcgatgttattcgtaagaaaaggcgccgaggatcagaagatccagtggtgctatccacagccccagaggatgagccaactcattggcatcaggttctgatttctgaaaatggtgttatccttaattgatctattcaatatattacgctattcctgctcttcttggtgtaaatgtgtaatatggtcatttcttgttctgcagactattctgtacttccctgatcctatagaggtgaaacaagaccaaattatagaaggctctgtaaaagtgtctcagagtgaggaaaacccacgttttctgaatattcaactagattgcacgtaagttcttactagagattgctattttgtcgtccggctcaacacagttgctcgatagatgttataatcttgtagttacatggattcagatttagccaagctacacaagcactctgaattccttatagcatgctctgttttgaattttgtccatggtgtcaggatgtgaattatgctgcccatatgggcgattgaaatttgcaaggatgataaattgcatacattgcctgcttgtgcctctagcggatcattttgttggattctgatatagaagtccctgtttcctagcaagttcgaatttacatttgtgtagtactatagcttgatttagttcattttgagctttggtgcaagttttgttttaagcagctgtcctgctgtatgtatattctaacttggtacaagttttgtttgtgaatgaaagttatataatttctcgctttccctctctgacgctatgtttgtgtacaacagcacgggaggccaaacattggtgaaagattatgccatgcgatgaatggtgttcttagtttgctgatctggattccccgacttctgatggtaagatcctacaacttgcaagagggtctcttccagcaatcatgaactgaggtcattggcaattgatgctgaattgttgtatgcatgttgataacagtaacgagaattcctccacttattttctttcctttattcttttgagtttttccttgtgtttattttttctagttttcactggcgatgtagatgacccgagaatgcaaattttcggtttaagtgcaggggagataggattgcattatttcagtttgtcgaatgctttagttttgtggatgctttttcgttggtatcttgtctgactttgatgtgcttaactccgagtctccgtgtcagcagtcaggatgagagataagggtaaagtgagaagatgggaaaaatggagacgagctgtttttctcttgaaccaaaaaggctacagcataacctttgcctgctgtgacattgagcttttactttcttgagacgcttgtactttagtcattgcgtcagcctgcacaaagtgagcctctttttttttgttggtggtgttccagctcaaagcgaccaatgtggttgaattggaccttttggtttcacccaatcgtgaagcaggatgtagacttaagattttctgtcagatagattgacttaatgaatctcgtgatattcttctttcgctgcagtaataaactatagttaacgtgcctgtagattaaagctgctgtagccatcgtaaactttaaccccttgaattcttacttcccggtgttgactggtgagtgctgacagtcaggtgctttgagcgtgcagtcgtgcgtgtgttcacgtggatgcgactgacactggtcttaatttactaatcttttccctgacactgctctgtttgaagtttccagataaattatgttaagcgtgatcttacgtgtgcatcatttcccgcagcaaatggctgctagcgttgtctccacatctgcacaggccacaagcccacaacaggtcaggttgaaatgcaaaagctgatgtgctacattattgttcccaggacatcacccctaacgcaagcaaagctaacaaacttgttacatttgtctgcaccaggggctgtattatcatgcatacagatacagtggtagaactgaacctgtcaccaactcaccatgcatggttaactcatcattcttccaacttgcatgcattgcacagttgcagtacatattacagtacttggccatttgacaagttcagaacttcaggaaaggcctaatagctgcactttctctggacaatacttcctccgtttcacaatgtaagtgattctagcattttccctattcatattaatgttaatgaatctagatagatatatatgtctagatttattaatatcaatatgaatgtgggaaatgctagaatgacttacattgtgaaacggagggagtagtatctatctatacataatatgtacggtcatactccgtatgtgcccatacttggcaagcacgtgtgtgccactcgaggggtatacgtgctacatgtggagtagtaaagtataggtacttggtagcctgatagcgagtacgagtagtgtactgcttatatatacttctagcatgtattgggtccgaagccgacgtatccgttggctgagtcgacggtgatctggatcccttcctgctgtatgttccccaggatggagatccccgacgacgacggcgcgaacgccaggcagaacacggcgccgccgacctccaccagcaggttcctcgccggcagcgtcagcacggcgccctggtcgaagtagaacgacacggtcggcacgcgcacgctcgcgtacccgctcaggtcgtagcacgtgtcgagcagcgacacggccggcgagcgcgggagcgcgcccatggcgccgtcgaacgcgccgcgcagcgcggcgtacgcctcccgcgggaggcgcgtcacggccgtgccggtgtccatcaccacgccgccggcgccgtcctcggtgagctggaacaggctgtcctgcagcggcagcctctcgccgccgacgccgatccccgtcagcccgacgtagtagaagctcgacgcctggttgttgcgcacgagcggcacccacacggcgcccacggggacggcctcggtccggccgaggacgagcgacccggcgccgccggcgccgcggctcgccaggcagtagctgaacacgccgcccgccgcgccgccgagctggccaacgagcgacatggcgccccagccgaggccgagcagcccggccgccccgacgaagaggccgctgttgcggtggccgcagccgatggcgacgccctgcaccgccgtgccgcctaacgtgagcgtctcgagcgcgagctcccccttggtgtacgacccgtcgccatacgtcaccgagtagtcgcacttccccgcgtcgccgccgccgccgcacccggtgcccgacagcgtccggcagatggcggagccgcacgacacgccggagaaggacgacgaggcggccgggtcgaacagcgggtcggtctgcgcgtagcactgctcgcaggggcggcactgcacccagatgacgtcgctgccggagtccacgacgaggtactgatccgtgggcggcgagccgacgccgacgcggacgaagtactcgccgctgccgtcgtcgacgccgggcaccacctccgacaccaggtcctcggggaggtacggcgacgtcgaggccaccagccgcttctccaggtgctcgacgcgggcattgtcgcgcgcgacgaggccgacgacttggtgccggcgcgacgggtacgtggcgccggagatcgcgtcgcggtgcaccaaggagagcgaagggttgttgttgttgcggctacggtgaacggccgacgccgacgccgacgacgacgatgacgccggcgtggtgaagttgtgagggttgatgtagtggaagcgcggcggcgaggcgggggagacgatgagcaccgatgtggagacgaagaggaggaagaggatgaccttgccgttggcgacgaactccatggttttcttggcacgttttttccctcttggtgtagttgaaatgctttgcaagtgtgtgaggaggcgcgggcgaggctggtgaatttatctctctgtgcctgggagcctggccgtggcactagtgcaagtctcaaagtgtcaaggtctgcaactagtgctatgtacttgtacagatgtagtggtatagttgttgggagtagatgtgtcttcacctttcggatctttgacgctatcaattcttccatgagtgaaattcttttgttggaagagtgaaactatttcttcatgcatgatatcaaccactgttttaagggagaaaaaaaaagttagggagttgatcaaccagagtccagagcccaagactcaagcaaatgtagtttttgcttgcaaaatgcagaaaagtgaccgactttttgctaccgatggtttgaagtttagaacctggacaacttctctgggttcattcagaaatttcttcaggaattaacttgtcacgttagtaaacttttccttatcggtgatcacatcctgacacaatggaaaaaacttgaagacaaaagcattcatcagcctaactcgtgcgtgcgtgcagcattagtggagttggattacagtcagtttgacagcgaggcaacatgattcagttttgtccgtttttgggtttttgaatcttttaaggtgatgcctttaatagtttgcacgaacaaaaaggcctttcgcatttagattcgatatcgtcctttgcctttcttgatgcttctttttcttcttcgccggcagatgcagcacataaacgaatattggtatgtatatacttgctaattccagctctgacagaacaagttcatgaaaaaatgtggcaagttaaccctttgataccacatttttcgctgtaattgtgacagatttctggaggcatgcagccatggaactcaagtactagcacaagtgtcatgaactgaacctactcgccaaggtagaaaggaataatctttattaatcatgcctattggagattgcagcatggtgacgactgacgaggactaactgattgtgttttgatgagaaggtgctttcagatgtccctctagcctgtatcgatcaaaagcatgaagggaccgcacaaaattaagctccagtttgcatgctggattagcctttaagattggttctgaaaacaacaaaaaaaattctgctagctgatattcaaattagcaggtactgagatacttctgcacatgctcaccaaggcagggaatcatgtacagatacaaaattcagcataaaaatacaacagagtctactatacaatcaaacatgaaaagtataaacagagtctagtatatatgccatgctgcatctagaaacaaaacgtttgcatgcatgcaattgataatcaaaacttgattacaagaagaaagttactatcattgttgtctttttccaactaattatgatgtgccagtgagtgggatgagttagaaagttaggtttcttttggttacttttgtaggctgtgtggagagggattgtgtgtaagcatatactgtactaacatatcatcatctaaatatatgcaaacacatgtcattgttcaaaacatgacatctgagtcggccgtctttttgtcgttgaaaacaagttgttcagtccctttccaagcgttttcgaaatggtgtgctcactataccaaccattaaataagtagtagtagatcgatcgagttagttgaagtgttgaacacaaagttggcagtccattgcgtgctgaaagattaattagcgtatgatttgctcctgccactagtactatcattctctttctctaatctctgcattgtgatcgctgttggttgcatgcgtggttatcaaaagccggcgacaaaaatggtgtctcattttgttaacttgtacgatcgaaaatgacagattcacgccttaacctgtatagttaatctcatatctttacatgagcagcaaaaatattctcaaatgctacagacatttgcatatataccctctacgaaatgaacaccaaattgactcatgtaaagcctcatatattccatgtaaatattgtgtttcagtttgattgagagtttaacagacaggctcagttctgaaggactataatagcaacagtagcttaagctatgacaagtacatgtggacctgccaaattaggagctagcactaagttgctagccaggtacggacacacacaatgctatacggcacaatgaatcagttggtttggcgaaaaggaagggattggttaaacaaactgaaattcagagctagcaaagcatgcttacatgaatgggtgagtgagtgctgaaataatagaggtgggcgacaagaaactaattcaggtttggttttattagtatgtagtagtggggatgttaccagcagcagcagcaacaggtagctagtgaaagagcatgagagaaaggattaactaatgaattaatcgaggttttttggttaactacgttagcgcctcagcggtgggaggcactcatctagtacacctgtcgaattattggaggaaggcaatcggaccaaatcaacaacaaagggggaaaagtggagaaaaataacgagcatgttagtgttgataagataatttttgtttcgcgaaagcataagaaaatttttttcgatggttccaaaatccaaatgatgtgctcttgctggtgatcatacatgaacggtcctcccatatgcaccatggcggcgtgtgttatgagtagtttggtagtagacagtttgacgcatgtttcttttcttctcatcgggatgaccagaggaaagaagatcattcaaatattattaagataaaaaaatgttacaagaaaattttacattctaaaactattaacagatgagccgagacccaaactaattaccgctaagcgaacacatgattatgttccgcttagcatttgtgagagtcctctgcttccgagcggtagtggcggctacaacgaatcactgaagcgattcgcgacgtgggcacttcacttcgtagcgttggcaggtcgcggataggcccactcctggggggcggaaatgggcatgggctcgagaagagctaattgggctgcccgtgcgcgcgagcggctggagctggccgcgccgcagatttgggctcaacttttgcggacttttcgccaggcgtgatctacccatgtcgacccacggctcggcctgggtaggttggaaagtttatgggacaacctgcacgcgcggcctgccgagaacttcggctccaccttccgcgggatacgggtgcgtactgggcctcggcctgcagcagcagcagcatcaacaagtagcctgcaaagcccaaaaggcaacaggttgctacttcttcaacttgtttccgaacagggccggccaacgcatcgatccatccaacctacatctgcgccgatgcagcgttgcctcgagaaatccccgtcggctcgtccccgcaccaaagcagagcagcctcagaaagcaaagtttgacgtcaggtgatagatagattagcgcatcatctgatcaatcatcatcgtcatgtactaaagcagagagccctacagtacagctggtgttgtttgcaaaagccgatcaaaggccacgatttcagtgctccctttttcggcttgcatggacgcaaaagccacaggatcggcggccaaagctctccccatccgggtcccctatctccgtatacatacttcctccgtaccacaacatagtaacctagaattagatatgacatcatctagtataatgtatttagatatgagatatatctcgacacattattacatgtgatgtctcattagtcttaggttgctatattcttggatggagggagtatatccaccatcgatgctgcttcagtctctctctgggccagctctgtttgttctcgcaaagctacacacaccacagcacagccttgtacagtgatactaacctcttcctctgtcacattcatttcagagtttcagataaagcgattctcctcccagctttgattaatcattttctaactcaaagagaacctccgttagtcaagccacgacggaaatatataatttacagaaaaaaggttttattccgaatgcagcataagtgagtttcaaggcaatgcttgagtacttgttcagagttcagatgtgaggctaagaatcttgttcgatgtacaatggtagatgcagaaattacgtatccaatactagtacttaccgacacaaactgtacgcttagctaatctgtaacgaaacgtgacagaaaaaactgaagacacgattcatacatgggaaacgaaatgagtactaaattttttgaggaaatttcacaaaactacaggtattttgcacaatttatcataaattaaaagtttgtttcacaaaattacagatttagtatttccgtttatcacaaaactacaagtactttgtacaatctatcacaaaactacagatttaagaacttgttgacaaaactatagatttagtgtattcgtttatcaaagaactacacatttagtgttttcatttatcacaaaactacaaatttagtgtctccattatcataaaactacaaatttaacaatgctaaaacatatagttttgtgataatgaagacactaaacctgtagttttgtgataaatgaagatattaaatatgtagttttgtgaaataaattcttaaatatgtagttttatgatatatattgtgcaaagtacctgtagttttgtgataaacgaagacattgaatctgtagttttgtgaaataagttcttaaatatgtagttttatgatagattgtgtaaagtatatgtagttttatgaaatttactcaaattacttttacaaactttctataaacactgatgtgtgttgaatctttcagttgattcaatcaaacggttgaaatttttgtttgcaagaaactagctgggtggcccacgcaattgcgcggctagcacttaaataaaatcatatattttttatatgattttacttaaattttattaaatagctatctcattgtcttaagagtttgaaataccaaaccttatcatctacgtgtttctaattatatagttttttaaaagtcacaccagttgctacccctatgtcatctccttctttatttgcttgctcgatttatcactatttctattcattctcattggaacctttagaaattggatcttgtagtttttagagtttattatcacgttgggttcatttttataatttctagacgtcccgtcaaacgttgctattatacttctctatggcccgtccactgtctcttctctttattgtcattgagattttaaaaatcgaacataattaccgtttgggttcatttttactttctataagtcccgccaaaccgtcagcggctttgccttgtacttctctacggctcgcccgctgactcccttctttattatcattgatattttaaaatcgaacatgattatcattttttttactttttggaagttccgaacctttaaaaactgaaccttgtagtttttagagttattgtcttgttgggttttattttttataatttctagaagtctcgttaaacgatgccactatgctcctctacggcccatccgccgcctactctttattgtcattgtaattctaaaagtcgaacataactatcgttggaatccattttttattttctagaagtcctgtcaaccgtcagcggctctgcaattatactcctatacaccccgcccgctgcttctcctttttattgtcattgatattttaaaaatcgaatatgattatcaatggggtttatcttttttgctttctagaagtcccgacaatcgccttgctcgtttgcttcacagcctgcctgtcgttcttccttttaatcgtcattaggattctatttggtgttttattaacagtttttatatgtcatatcaaccgccaccactctactcctttataggcttgttacttaatttatctcgtcatgtgttttagatggtcttttctttcaatagtctttatttttatcacatttttagttatttataaattgtattcctaattgaaatcttgtttttcttctttttctaattttagaatttattttttaaaaaaataaataatatgtatcgtgttcttttaatatttttatttttttattttcaatttcagttgtttcaaaattgtattcctacttgaactctcttttattttttctaattttggatattattttatttttttattctaaattttaattaatctcatattgggttcttatatggatttttctttcaacagtgtttatttttaattccgaatttcagctaattttaaattgtattcctacttgaactcttcttttttttttgctaattttggattttatattccggcttggttcctgagcttccaagcttccaaaaatcatggagtctggttggttccgttgattttaacttggaatcagtatcggtattatgttttacttttttaaaattagagttacgctactactgcttcaaaaaatactgtcatgatacgatttcacgtttgcactgctgcctaagtgcctagtagcatgtagtagtcttctatgttagagttctattccggcttggttcctgagcttccaagcttccaaaaatcagactggagtctggttggttcctgtttggtttattgacactgtttccataaaatatgtagactcatattaaatcacaaccattaatctagatctattttaatccaatggctaatatttttctttttttttccgattaatgtgggaatttctagccactacagcgaacgtggagccttctttcaaagctgttttaataatataatagatagatagatagatagatagatttttcgtacatgtagtactactcttcgtacatacgctggtagcaactagcaactgctaactgaataaccgattattcatcgagtgcaaccaccacagctcgtagccaacatcaaaagccatttttgcgttgcgcccacacatgtcatgcgatccaacatgtcccgcgtctgctacgaacggtaaaaaatcaaaatattttcagagaacgctccgaggttgtttcaggctccctcccatggcgcaaacacatgaacacactaaatgctcgcgacgcgaacgcgaggctcctcttcccgctataaatactcctcacagatcgcactcgcttctccaagaaatccacacgaaaaaaaaaacaagataaagccttgcagtttctgaattctgatcagagagtggcaatggcaatgcaggtttcgaagaagtcgcgtttggctgcgccgagcgctctgcttctccttcttgtggtggccgctctgctgccgccgccgcgcgcagaagcggggcacgatggcgccggcggcgacgacgaaccgcctccgacgccgtgctcgccggccgaccgcgccgcgctgctcggtttcaaggccggggtcaccgtcgacacgacggggatcctcgcgacgtgggacggcgggaacgactgctgcggcgcgtgggagggcgtgtcgtgcgacgccgccacggggagggtcgtcgcgctgcagctggaggcgccgccgctgccgccgccgcggcggagctacatggagggcgccctgtccgcctcgctcggcgggctcgagttcctggagacgctggtgatccgcgacatggcgcggatcggcggcgccatcccggcgagcctgtcgcggctgtcgcgcctcaagcagctctacctcgagggcagcatgctcgccggcggcgtccccggcagcgtcctcagcggcatggcctccctccagtacctgtcgctcgccggaaaccggttcgaggggaagctgccgccggagctcgggtcactcccggggctggtgcagatcaacctcgccgggaatcggctctccggcgaggtgccgccgagctacaagaatctctccaggttggcgtatctcgacctgagcaacaacctcctctccggtgcaattccggcgttctttgggcagcagctcaagagcctggccatgcttgacctcagcaacaacggcttctccggcgagattccggcgtcgctgtgcggcctacgcaacctcactgatctctccctgcgccataacaagctcaccggcgtgatcccttctcagatcggcagcatttcttctctgaattctctctccattgacagcaatctgctcgtaggctcgatcccagagtcactgtttggtctgcagaagctgtggaacctgaacctgtcaagaaacgggttgtcaggttcacttcctcccggaatccgccatggattgccgtctctcgtgtccatggacctctctcacaaccatctcgtcggcggcattgatcacttcttcagaagcatatcaccagcaaggaggctgaccaagaatgcaagctcagacatgtcagtgatctttcttcctcggcaactacaacacctggacctgtccaagaacagtatcaccggagccttgccggagttcggcgccggcgcgagcttgaggtggctggacgtgtcgggcaatgccatcggcggccagataccaagctcggtgtggaggctggtcgggctccagaggctggacatctcccggaacaagatcaggggcaccatcccggcatccgtggcgtcgatggcgagcctccggtggctggacatctccggcaacgcgctcgtcgggaggataccggacagcttcgcccggatggcgaggctccggcacgcgagcttccggggcaacaagctgtgcggcaagataccgcaggccaggccgttcaacctgctccccgccgccgcgtacgccggcaacctgtgcctctgcggcaagccgctgccgccgtgcaggcagatttgaccggcgccgccgtgcgtggcagtgattgctgcttcgccatgggtgacatatatggtgcatttcgatcggtacagcacaagactactttgtgtgagatgttttacgaggtttagagaaatagagtagtagtgcattgtctgatttgtaatatctcctgatcatatactttgtaaatcgggaagttacacaaatctagtttagggtagaggaggatgataaatgttgtggtcgcactgtaaaatgatgacgtggaagtcggtattgggcactgtagctgcgtactaatttcgtttctgtcatacgtatctaattgagttttaatgttttatcaaggaactacctatatatattgatcaaaggagaaagacctgaaaccaggtgtgccatagttgaggtaggcagcatagacttttaatttgtagaccggcccattaagaccttacttggatagacccataccaacggggcggctaaaggtgttctttttgggagtgagtttatactgaaattgcttcagttggggcatgccagacgaacaaattcgccatctttattgccattttcaaagaaattcatcgcgtatgcattttcatatatacatcggtgctcatacattaaacctaatctgagtagcagagcttccaaaaacggatggattcacagaaactagtattggtaaaaatgtaaaaatacacgcctctaccacctgctaatctcaactcaacggatggattcacagaaatggagatggatcaacgcctctacaaagctcgatcagaccttgagcttgaagctgcagctgttggagcggatgcggatctgcctgccggcgacgaggttgtcgacgacgaggttgcaggtcgccttcccggtcatcttccacagcttgatggcgccgaacttgatgcggatcggcacgcgcgcccacaccgtgagcggcacgaacccggcctgctgctgccgcgccagctgcagcgccacggcgctgtccagccgcgtctcgccggcgagcaggatgacggggcgcaccgtgctccggtggccctggtacagcgccgggaacccgccgcggcacagctccgtgccgttgaacgacgccgtcacctcgccgccgtcgtagtagatcccgatccgccggttcgggttcgtcgacgtcacctccacctcgaacgcgtcgctcaccgtcgccgccgtcgcgttcacgtcgaaccgcgtcacggtgagccggtccacgtggaagtccggtatcttgggcttgaacaccgcgtacaggatgcccgccgtggcgcccagcgccacggcgaggacgagtacggcgagcagcgtccagcacacgcaccggcagcaccgccgcccgcggctcctgcgccgcggcggcggcggcggcagcggtgccggcgcgtacggccgtggcgcggtgatcggcagctgctccttctcaccgtagctcgccgtcgacctccccttgccgacctgctgctggctgtccggcgccggcgccggcgagccgacgcccaccgggtggattcggtggtaatccattgcgatggagatgctgctttgcaccgtcaagggaagaggaggacaatcgacgaaatggcagagttgatttggtgaaaacgttatggatgtctaagtacacagtgcaatttatacgtgacgattcgtgacacgttttcgtttttggtttggttaatttggcttctagacgtgatggatttattagtttatcatgttcagctcttgacttggttgccatggctgccgcatgtgtgattgacttcaaggttgctgattactcctcagtctcaaaaaaaaagtgtaattttataccgtccaatctaatatttgaccattttatcttatttaaataattttatgattattatttttattgttattaaatgataaaatatgaatcgtactttatgtgtgactaatttttaattttttatatctttttaaataagacgaaccgtcaaacgttgtgcacagatagctacagctgtacttattttaggtcggaggtagtattatttgtacttattttaggtcggaggtagtattatttttttcttcttgaaattaattggagaacacaagaaatctatgctgattctcgcaggaatggtcatgtccctttccttttaactttctgtgtgttcagattttgactactctttgtacgacgcgttacatttataatcatttacagtagcagctggattagttattgattaattaccgtcatgtgatcgctcaggttatcgccgtgttgcgtttcgatacgaattaagcgacttgcagaaatgtatccctccgtttcaaaatgtttgacaccgttgactttttagtacatgtttgaccattcgtcttatttaaaagtttaagtaattatttattatttttatatcatttgattcattgttaaatatactttcatgtacacatatagttttacatatttcacaaatttttttaataagacaaatggttaaatatgtactaaaaagtcaacagtgtcaaatattttgaaaatgatgaagtatgagctgcgcccgagtgctacccatgtacgctgaatctgatgtcacggtccgtacatcgtgttgaatggttgttgttaaccgagggacggaattactgacgagatcacatgaaaaactcttgaaaaaacatttgctcacaaccataatgacatcatgtcatgcgtagctgccgtcgatcacgaagcttcaggttagcaaagagcaagttcgtcaggagaaataggttgaataattgcctggaagacgcctctctaatctctgaataattaaccacgctgcagctgaccggacggctgcttgtcgtgttgaaaattcagagaggctactgcatcaatttggggatcttcaggcatgacgtgatcaacggttgccgacggtccttccgtattttgtatttacacgacaagcccaacaaactccgtgttaacaaaactcaaatggaatatcaacgtgtgcacatctagtagcatatatataaaaacaaattggtgtgacacgctagctactacctaacctatgtaactcaagcctctccaaaaacatatgtgttttttttttaatggaaccaaaaacatatgtgttgctgctactgaagcttgcaagctacatggtccttcctctgatgatttttataggatgttttgttttttaaaaccggatctttgttatgatttttaataaacaattagtcaaactataaatataactagttcaatacataatattccctcctttactaaatgtttgacactgttgacttttttaaacatatttgaccgttcgtcttattcaaaaacttttgtgaaatgtgtaaaactatatgtatacataaaagtatatttaacaataaatcaaatgatagaaaaagaattaataattgcttaaattttttgaataagacgaacggtcaaacatttttaaaaaagttaacggcgtcaaacattttaggatggagggagtagataaattgcatcatggatacaccaaattgcgtgagtggatgtgattaagtactttatagctaacaagaatatattttatggcagtccatggatagccaaacaatgcatattgcccgctttgccgtcatacactaaaatgtcattccatttcctggtggaatgcaaatacattagaaaaatctgggacaccttatctaattagatggcatgtgaatagctcaaaccgttactaatatctttgtcgttttacatacccgtacttctctatcttaaagttaactcaaacggggcgcttaggtagtgtttgaatctagagactaattagtccctgtcagatcggatgttttattatggattaattaggtttaaaaaatttatctcgcgaattagctctcatttatgcaattagttttattatttatctgcgtttaatacttctaattagtgtcaaacatccgatatgacagcgactaaaatttaatccattagcagcccagacagaagtgtgaattcaacaaggcaagtcttggtttgtggcctctcactctgacttcagtcagataccagctaatgatcagtttgattttcaaataaatgcatagtagctactgcataggatagacagccaaattccttcagtgcagctttcaacaaaaattcacaatacaaaatacgatccacccacaattccattttgcacaatatgtactttccatttcaacacaaaaatctgatcgtatatatcaacatttctaacaacatgatgaatttacaggtacatataatacatgtgtaaagtaccgacatttccgatgtgggtcatctcgatctcaacctcgatgtccatctcctggtatcctgaggcctcaagagctgtacaggagcagctgggattcgcagccaccactctctcagtctcctcaccaacttctcgctgctcttcttcctcgccggcatatgcctcgtgtatgcttccagcacaatcagtacaagtatgcttctcaagggcaggtacgcgaatatcgcagatgccacgagcattgtagctgctactttgttcgtgctctgaccagacaataacaattgttatatagtaattgcagaatgttgcaagatttagagttttgatgtgatggtttacaaagtaattcgtagttgtgagtgataatgtgagaagaagtaacgtacttgagggaacgctgcaagcaggagggatcggagcttgagaagaaaaatgtttccggcttgcacttgtgcctctaattgcgagatagcttgttgcagcgccagtagctgttctacagttcgtctcctaggtggagttgtgacttcaaatgcgcctatcatctgcccgttcccggtatgcctttgccatagcatgaagatggtagaaccaagcagaaagacagggaaaatgtaccaaatccagcctctgcagggtttagtatggaataggtattaacattgctccgtgaaacaaaattttttaactactggtagaagtatttcagttcgttttagccaaaaaaaaaagagaggtgatttcagatattacctgtaaactatgaagaggaaacagaacaagaagacgtatgatttaagtggatcttcccactcagccaaaaagagaagccttttgcctatttcaattaacggaaatagcagttcctgcatattaacagtaaatcaacaaacattaatacacttaataatggcttgaattgtgatcaatcttgatgacattggaagcaactatcagtctacaattattgagcaatctaaaactatgaatggaaattcaggcttaggtatgcctgtacaggtcactcagagctcagtggttgttccagaactcaagacttttcctatctgaattcatatcttagtttagaagattatgagaaaatgacatttagtaccttcaggacagccacattagtgtcgatgtcttccactttgacctgatcaagggtcgccctcgcagcctccactctgccagagtaacctacagatctctctagagccatttgcactgagctagttcctcccgtctgcacatctcggacagtgagatcccattcctcgggattgtcctcctctttgagtgtcaacaaacccatgttcaccaaagtatatgcagaaagtgggaaaggatcagcaagcgtcagatcatctgaactgctttgaacagaatcttcatctactctgaaccttgaggaataatctttcatctgaccatacaatgcttccagtatcttgtcccccttgggcaatttctctgccaaattgaaggcaagggtagtcttgaaatgtgcaggcagtatgtggaatccctccttcaccgtgcggtatctgagaattcctagtgtcgcaacagaaagcgcctcggccttatgtaaattgatcatcctgtacttcctaatgaacttgtgagcgtgcaacacctctttgatgattgcaaaccagtagtctcgacgagtgtgacctttgaattgaggaaattcgaagaacaccggctctcttctgtcaaagtaaaattgtatgagcaaagctacaagatgagcagaaacttaaaaaaaattttattctacagtagtaattactcacgtagagctagatttgtacatgacagctttgtcaaatagctgagcaccccatgggccagttgattcacgttttatagactgcttcaagtcccttgacagatcatacaccacagcctcgttgtatgagaaatcaacactgactggctcaaagtacaaagcatgggttgtcagtgtgagcctccctgcaaaatatgcaccttatacaccttaaggccatagtgaaggaaacaattcaccaacactgatcaaaattaccatagggaggattcttaaccaggccaagtggacgtcccaatgtgttgaagaatcggcttggttgtcgcggcaccatagatatcaaggatcacttctccatcagaaagttgaagagctggagctttgtgtccacctgatatacgtttcgcaaatctcagcaccctaacatcagaaaccagaggcgccatagtaaggcaatcatgcagtgaaagtaaccgagtgcctgaatattcagtaatgctcattgttcaggtttcagagaatgacaataactgtaacaatgaagagaaacaagagaagctggtgccaatgcatacttgtctaaacatttgaggtacttatggtagatgagaaaatgcaggcggcctcccgtagagtttgtgagcgcatcaaataagttgcgaacagtgatcgcgtgtgccattgcaggacacgcaggaataatcttggcaaatgcttcaggactgaccgttctcctcccatcaacctaaatatttcatcaaatgtttggattgatacttgagaaaccacaaaatatgtcaaattgacagagatatatatataacctgaatggccatttgtgtggggctcaaacagaacatggacccacaatcgtcgtcatccttgccgtcaacgaagctaaatgacattttctgttatagcgtatcggtttctgatcagagttgcgtatgaacaacaaacaagatggtgatgttgaattgggggtgaaaaaaaaaaagaaaaccggggtgtcatcacctgcaacgcggcgtccgtctcgtcgtcgggggcttcccaggcgatcatcatgtcgtaggtgagcgagtggaactcgctgtcgctgaggtagtcatggcgcttggtctcgacgcgcagggcaatgtaggagcagtactccacgacgctcctggcgtacgccagcggctggtcccccttctccggctcgaaccgccgcagcagctgctccacctccacgccggcgatcctgcagccacgatcgataaaaaaatacacgaatattaagaaataacgacctaatatcaaataatcagaagaggtgaggtttcgaacccaggttgacgtttctcgccgcgatcgatcaggaatcgatcaattaaatcaaattggacattaatccatacgacgaggaggagatgagggagatcataccgggcgcatcggtggacgacggaggcggcggttggggagaggggagggatggcgtagtcgggcgccgccatggcctcgccgtcgccgccgccaccgccgtcgacgcgcggggcgaggaggaggtcctcaaggagacccatctggggtggcgacgacggagcaccaggagggacgcatcgttcgttcgttcgttcgatcgtcggcagtgtgtccccgtcacgccgcccgtttaaggcaagcgagatttgttggagacgtgccgtgcttttgacggatgctctgcgacgcaatgcgatgcatgcgttccgccttgcccttttcgcggacagttaggcgcgcgcgggtttttttttccttctttccttcgtctccgacggactcggccgtccacccagccactcctccctgtgctgtttgccctctcgaattatcggattgtaaacgttattattagtttgaattaaaaaactagttgtatatggtacttaaaagtaaattcgagcttttggttgttctgatcaaccattgttttatagatacagcaaatggaacataataatgtattaccacaaataacgttgcagaatacatagttcatgcaattagtataccgttaaacggctcaggccgccgattaccaaccaagatttcgtaccccggtcaccggaatcttaaacaagacaaaaatccatatggccatatgggcacaccagattcctgatgaatcctgggacattcttttttaactcgtatacaacgacaatgatgccaatattattatcaactccatcgacatcacctgaaaaaacagtaatcaaacaacacagtagctaccagaaaattgtgcaggcatggaatagaaaccacctgccatactacatggcatcgacgataaatagagctctacataatggagttctatctctcctcattttaccagcaaatctatgtaacgaaaggcaccctgcgaactgcaggggctgatacggtaattaaattgtctcccaaagatggactatgggagtaaaaacaagcatagcagtttttgttttgccacttaacccagcaaaatggcgctaagaagacaccgtgtagcgattacttcacgatgcagatcttgatcacggatgcgacgccaatacggtgcagagcaacaacagcatcaccaggcttgcacaactgcttctgtacagctgacttgagagcagcatcaaggatgacctctgtcgactccgaatcggtggctttggcagaaccctcagccaggagaggaacaagacctctgtagattaggctgtgccttgctgggccctccgagctgattgtccagtcgaatgaatcggttgtcaacacggggacaaccacagagaggattggaaccctgggacgatacttggcaaccagctttgccgtggtaccaccacgagtcaagacaacaatcagggctgccttggccttgttggctgtgcgtacagcagaggatgcgagagactccaatgggctcatcggaaggggcgcagacctgatcatctccttgaagacagcttcgttgtcaagggaagactctgcctcaacacatatacgtgccatgatcttcacagctacttcagggtatgctccagcagcactctctccactaagcatgacgcannnnnnnnnnnnnnnnnnnnnnnnnnnnnnnnnnnnnnnnnnnnnnnnnnnnnnnnnnnnnnnnnnnnnnnnnnnnnnnnnnnnnnnnnnnnnnnnnnnnnnnnnnnnnnnnnnnnnnnnnnnnnnnnnnnnnnnnnnnnnnnntgcaaggaatatcttctcaactggaatctccattccaagatcacctctagcaaccataaatgcatccgtttccctcaagatctcatcgaagtttacaacaccctcttggttttcaacctaaaaacaaggaaaaagttaagaaagaaattagacgcacagcaacataaccagcatggtaaattaccaggcacctcatatgtattatcatcatcacgaatatattttatcatcatggcagtaagacagggtcatttataacacggtgaaccatctagatccaaaatttcagttagcagcaaagaaatgcaataacctgaattcctcattttaatgcatatcaggcaacaagctaaaccctatcagtgaaagtgcatgagaaaataagtagctgctatttgaacaagcaaacgtgaaaaaaggttattctgaaactagttgttcaagcacatagaaaaggaacaaaattgcattttattacctaatatagcacaaaaaggggtcaaatggtcaatgtacaaaggcagagaccaaacaattctggctccagtatataccagaaagggacaacaaaacattaattaaagcatctaactgagaagtattgtcactcaaccgtcctggtaattaaatacttaagcaaactgtggaactgaaaacctaacaggacccaaaaaatagtgataatgattacaaacctttgacatcagcttgatgcgctttgcatgctgtccaagaagttgtctgacggtaaccaaatctgatcctttacggacaaacgacagagcaatcatgtctatgtcatttggcacaccccatcccaaaatgtcttctttatccttctcagtcagtgtaggaaggtccacaacaattcctggcagattgcaattctttctctcgccaagcattgctgtgttctcacacctacacctcacagttccagcctttggatcacaggacaaaacagtcaaagagattgtaccatcggcgcagagaatgacatttccaggcttcacatcaactggcagtttcttgtaactcatggtaatcatgttctcatcacccttgatctcataatcggtggtaacagtgagttcttgaccctttgttagcttgattggcttgccatccttcaaaaatccagtacgaatctcaggaccctgaagcaatgaatgaaatgttcagaacagtcaccacagaatcgccttaaatatgctactaaacaggtaaaaataatggaactaattgcagtacaagaagtgataaaaaagataaactgtgtgcagtacaattctgtaagtaacttatttgaactacaaagcaaaccatgaagtgtgagagtgtaaaaagataagcaccaatagttacgtgcatgacagaaacatcaaggcataatagaagaaatgactacactaataaagccttcttttacgtgttaatcatatcctcctacaaaagcaacaaaatcagaacactaggatttgaacactccatactccaaagccaccgatcccaagatctgttaaccatccttccaatccaactctacaaatgaataaattaacttgaaaaagcatagagacgaactgtaaagctaaatatgacaaacaagatgcacgcagctcatcaatctcaccaacaccgcaaacggatcacactacgaaccagttacacacttacacttgctcagaatccataagactccaaaactaactacccacatggagacgcaagcctgagcccccaatccaagatccagccatctgcgacaaggcaaaagcgcaagcgcaggcaaatctaaccccggataccattttgtcgagtcctccaaagtcaaaccgctgtaaactcaactcataatcctaccatgctgcctccaaatcaaacccagcttctcccgataaaaaagacgagcagatccaaatcgaaatccgctctgtatcaaacgcaagctaccccgactggtccgatccgaacaacccagcagcatacaagcatgtagagatcgacaagcaaagcagtgagggggtaaccttggtatcgagcatgacggcgcagaggacgccggtgttgtgcatggcctggcggaggttgtcgagggtctcctggtggtactcgtgggtgccgtgggagaagttgaagcgcgcgacgttcatcccggcgcggagcagcttctcgagcatggggacggagcgggaggccgggccgagcgtgcagaccagcttggtcttgggcacccgcgcgtcgtcgttctccagccccgccaggatcttccccatgtcgatgttcgccatggctgctccctcctcctccggtggtcgccgcgatccgggaggcggaagcttgcagacgacgagagagagagagagagagagagagagagagttgtgtgagttgtgctggctaaacgaggcgagatttgggggaggatttttatagagatggagtggaggaggggaatttttttggcgattcagtgggcgaagggagggaggaagaagagaagaggactggaggagaatagcggagaaagaaagatgagagatgtggacgcgtggtcaccaccgagttgaggggcagagggtcgaggtgaggcgattcagtgcctgcctcactgtctccatttctccacatggaaatcatccccactgatcttcttggggaagaagttacaaaatgcaactagtaggactgtttgatttgggactggtttagttctcaatttttttttcaaatttctaaatttttttatcacatcaaaactttcctacgtacataaacttttaacttttctgtcgtatcattttaatttcaattaaatttttaattttaacatgaacttaacacaactttaaggtttataatttgaaacttgtggtgtcgtggctaatatgcagtgtggctaattactggccaaaatcgcactgaatggagttggttgggtaaagtgtgtgggcgtgctaatcttggggtgagtttgacatctcgaggagatgattccaagacaacggcatataccagcgaacggcgatggggcggtgggcaatcagggcggcgccagcatccggcaaaaccagcgacgtccgcgtcaaaaaccgcgacctcaccctctgtttcccattcgtcggtccagcgatccatctgctagctggctgcctggtctttctcctcttccgttttcctttctctctacatctccacaactctgcttctattcctccatcattttgttatttttgctgtgtttagttccctttaaacttttaatttttccttcacatcatttgcacacatgtataagtattaaatgtggacgaaaaaacaatttacatgtaaattacgagatgaatcttttgagcctaattacgccatgatttgataatgtgatgttacagtaaacattttttaataacagattaattagacttaataaattcgtctcgcgatttactgacggattctgtaattagttttgttattagtctacgtttaatacttcaaatgtgtgtatgtatatgataattttttttccaaaacaactaaacacggccaaaacattaatttgttttgttttgccaaaaaaaatttagaaagaatctgcagttcgaattctcttgtgacgattgaccaacagtgtacgtacacgcgatgggcagacgtggttgcgtccattgatcatcctgcaccgaagtcaacttatcagaaacctctttaataaaaaagaaaaaatatgtaaattttgtataacaaatggtttcttccgcgagacagttcacaattggcttgcttaattgatgagaaaataagcgcatgaaagaatcaagaatggaactttcttttgtcctcttttcttcttctttagtcttttattaccagagaagaaacttctttagtcctttgttacaagaggagaaggttctgttgagtttggaatttctcaatccgtttgacgatcatttttgtttcgtaggcatggttctagaattggaacagtcaccgtcgaccttgacaacaacatcgaagaaaataaaataattttacagcaaaacagaagcaggtagtacatactccctccgtccaaaaaaaaaaagacaaactctggtttccgtgcccaacgtttgaccgtctgttttatttaaaaaaattataaaaaaaattaaaaagacaagtcacgtataaaatattaattatattttatcatctaacaataataaaaatacgaattataaaaaaaaattatataagacggacagtcaaaattggacacggaaacttagggtttgacttttttttgggacggagggagttctttacatggtaggttaggccaggtcaatacccgtggcatgtttattgaagccaaaactaaaggagtatttgattttctcgttgtgatagtggatttaatctaaactagcaaatcgcatgcatagcttatactacaacattaaagcaagctaagctgggtgaattcctaaagctaaagaaaaagccaaaggtgccttggacagtttgaccacggtcagttgcggctccctccatccgccatcagccgcgcaaagtagtaatgggctatacttttcccctcttaagtggatgggctttttagagaggaataagctcattttagatcccttaatttatcgtcaagtctaaaatttacccctaaccgcaatatcagacatgatgtgtcccttaagaaaaaaaaacattcaacattaccctcgcaataccgactaaattaagctagctcacaataaaaaaaaatccaaccagatctgcaagctaattggagtagccaagaaaatataacccccgccaaggactcgagtactgttgcatcgacattaagggggtgtttaaatccaccggcaaatttttttttcccgtcacatcgaacgtttaaacacatgtacggagtattaaatatatacgaaaaaaataaattacatagtttacgtgtaaattgcgagacgaatcttttaaacctaattgcgtcatgatatgacaatgtggtgccacagtaaatatttgctaatgatggacattaagtgtttagtggacattaactttataaaaagaagagatttagttacatactcaaatgtcttgatataacttataaagagacagcgaaaagaaaaaaaaaaacataacaaatgagggtagacaattgttgtccaaagacaatcgcgctgacagactccttttggttgatgggacaagaatgtcattgctgcaagagtgtgatatttttctagggttgtcccgtaaactttttgattagcccataaaacatgtagttatctctaaattgattttaaatcggtcttaagactggtttgttctttaaattggctccgcctaatcggttttgattttttttctaaacccatcttcgtcacgagcttttctagattaagttagttggcaactctattaacaccgcaaatatttaggtgagtccatgttaactgaaaaggcaccaataatgttatcctttggttgatctcgtttgagtagatagatagatgcagtatattgtgagtaacttattcagattaacagtagcagctgccagtaaagcccatgcagtttttcatgggaattttcttgcttagcagttgctagattaaattttaaaactatattgttcctttcatatttttttaaatgtatatacttcctctgtttcacaatttcacaatgtaattcattctatcatttcccacattcatattgatgtatgtctagattcattaacataaatataaatgtggaaaacgctaaaatgacttacattgtgaaatgaatggattactgtttttcgaaggatttatgaaaatgtaccaaagtcgcggggagtggccttaacaccacaacaccgatttttttttacagtgtgaaaaaggagtgtaatgatgaaaaaaagatgaggcaacggtgtatttcaaaatcgccaattgccaccattcccatctagcggcatgcatctcccgctcctcaccgaagtattctcggttagttgcgccacgccatgcacgctcatgcagctaagctagctatcgatctcatcgctatttatcgagcaacgcagcatgctgagctctagctataaacacggataggagcagcaaccccagcttctcgcagccacaccacccaaggcgcgaagaaggaaacgtagtcaataaaggcagccatgtcgtcgtctcgctcctgcagctccagcttcgcggtagtgtcagtgctcctcctcatgctcgccgtcgtcacggccagcgccgccaccacggcggcggaggagcccgcgcacgaggaggcgacgcacaacgagcggatcctcctggcagactccgacgccgacaccgacaccgacgcccaccagctgctgcacaatgtggaggaggagttggccgccgccaccaccatcgcggcgggccaagctgccgcggccggcgtgagggtggcgtcggcggccgaggatcagaagaaggacggcggcggcgacgcgggcgccgcggcgatgccggtggcgctggagcggcaggaggcgaagacgaagacggcgggccgcctcatcgcgacgcagggggacgacaagagcggcggcggcggcggcaacgagcacggcaaggagggaggcggcggcggcggcaaggaggcggagaagtcgaagagctgcgtgaccaaggaggagtgccacaagaagaggctcatgtgcggcaagacctgcaccatgtcggcgcacaccaagtgctccgccaagtgctccaagtcctgcatccccacctgcggctagctcgttcttgccgcgattcgattcatccatcgaatccttcggtttcgtagtagccttgatcatggtaattagcttgttttgcctgcttggtaaagaagggaataagcaggggcatgctgcacttgcatgagtgcctctcatctcatatatgtcgtcgaattaatttgtttaggcccaatgtttgttgttgttctagtcttcttaattatatggtgtttttgatgttgcatggtaggtcctttgtcgtgtgaaatgtggttacgagtttaatgagattgtatgttggtttgtttgattttgtgaatgtgagcagaattattcaggagtttactgttctgtaccctgaaaaaaaattgaaggtacagttgtgtttttacccagaagatgaagcttaacaatgaaatgttcatgaccctccagataatactccaaagggcatatctcacttacaagcaaagaaatgtttcatcaaaactcagacattagctgttgtagggacgtgacaagccaacgagtaacaaaggtgtcgatcaagagtatagatctcaaatactattcaaaagaaaactgatgtacaggtgtacaaggagctcaatcactcttcatcaatcttgtcattgaatcgaccagacatcacaaccaaacaataaactatcaaatgcaacccgctaacacaagacacgagagaagaggctacagccagcaaggcattacaatcgctgacattcgctccatctcacggtcatccacatctatcaagggcaaactggtatcttcagaaaccaatgagacaaacgcgaagaacgctgccggcagatgtcaccgctcatggcagcttcccttcaaaagtgacaacagacaaggatctcgagcactgttggttagtgtgtgtacaagaggaacaaacagtggcaacaaaatgttatccactgctgctgtgccttggagctcggtgactgggcacgaacgaacagctctccatggcaactgatgcccaacattggtgccatcagcgggaatgcatttcccattcagttgtgtatgtatgacagtgtgtggtcagtcaactacataacttcctggaagacaagactgagctcctgtgccgtgtttgcgactgccccttttcttctgttgaaaaaaacaagggaaaacatgtaaagattacaaaaatacataccacagaatcatgatagcctgacattcgttgtttggtttgtattataacattgcctagggttgccatagttttcttgccaagcttgtctaaggttagacgaacaaatttggcaccacaatatggtgaacaatgccatgtgggaccaaggtgcttaaaaaaaaatcttgccacaagcgtgacaatgaactatctcggccaaagctacctaagttgaggtgtggcaaagagtgaccatgaaccaaacggcaagtgacagggagctatgcatttaattcaggaaaacgtaagatccactggaaagtgccaattctagcagccagagaaagcaattcacgagatctgatctgtgggttgtgcattgttttgcgtggttattttaactcagcaactggcactcaaactttattctcaagcagtaaatgcaggtgccgtttcagccagataactcataggcacttacataattcattcaggtaaaaagtacaatttcagtaaagtatcatatgtattgcatcccatacctggaaagaaatggaagcttatttttgaccttctccaattcaataaagcataggttgcaacgctcccgcctaagatgaaaaaacagttaagaaaccacattactgaatctatcaatgagttagtaatactctagcaatataacataataggaggacagttctagcaatatactgtagcatactaggacagtctgactgaaataatacctttgctctgcttgcagatctacaccaacagaagagggaccagctgatactgttgaatgtattactgatccaaacgtcctgacaagcttcaccaacaattccagtgaaacacctaagtgcctgtgtagatttagcttttgtaagaaatacttttaattgcaatttaaaataaataaatgcatggcatataagatgttaaggcaatcagtgcagtacggtacatacatatgaataaattgtctctaaccatttctatatactcccacaacaggatcataataataacaaaagcagcggtaagttacctgtcagttttactctccagaaggtcagtaaggacgggcagaataacagtacataaatctagtgtgattgtttcacttttctccatcagaacacttgcaacatcagcagatacctgcacttgccagaaatcaggttgttataactatgttgtttagtgcactgcacacggaagagaaatgttcaaagtactgacggcatgatcagacatcttctccattgctgcaataatgccccgtatatcatttctttgccacatttgatgaacaatctgcaagtcacttaaaatagtcagatacagcattcgagcaattgcattttgaaagcctacagattttagtattgaaaattctgagaatgcaacagagcaatttagctaattcaacaggtcatatttcagtataaagtatacaagtatcaacagcctgtcgtacactagaacactgcaaaataggacacaacgtatgcctacctcttttttctccatatctctatatcttattaatcaactcaaataccattgagaagtttgagaataaagatactagaagtggggggggggggatcttaaagaaaatgcaaagtaccatactgacctgcaattttgtcaaccgagatcgagttgagcttagaaatagctcatgctgctccattagaacagatagaacatcctcatcacttgctatcgttggagtttcagcagcttgactgcttcctctctgcaaaatataagatacagaaagtgactctccatgtacaagagaagatcaaacatgaaaataggtgaattcggcaaaaccttccaggtataagctagagctgccaaaacaaagttggtttacagctcttcattacagtaagattcatgatctgttgatttatctttggttgaatattcaaggtatagaatggatttgttaagccctatctttggtccatgatattcacatacacaagctgggtaacagaagtcagtatgtgctaattcaacaactagaaactaaggggcaaaaaacagatccatccatccatgagataaagacataacccattaagcaacatttgctgctcttaaataaaacaagcactccctccgtttcaaattactcgtcgttttagcttttgtcctaagtcaaacattactaactttgactattaatttttaaaaatttatatagtccaacatgataagatttatgtttttagattcaccatgagaaatgctttcataatatatagtttacatgttgttgaactatatgaatttctagaaactgatagtcaaagttaggaatgttacttaggacaaacaaaaacgataagtaatttgaaacggagggaatacatgttgaattcttacgacatcgttttcctttattcatttatactatattttaattccatactggttagagatgatacaatcaaggtaaaatggtgaattccatatagaaaagaaacattgtggataatgaattgacaaggaagaacagaaaatcaaaagtagataaaatcttattggtttgtgtcacacatacagatgaatataatcggcctgtaggagccatcgaagaagaattgcttgttgtcggttcttcattaccaggtgactgatctct

SEQ ID NO: 10117 - DNA, 43254 bp, Oryza sativa
attgctgcttacgccgagtaacacagcaaactcgagtccaagtgcaggtgcattcatttactcatctaccaaagagaagatcaagcgagaaagaagcaacacttggttcctggtcggtgcggcattccgtcgagcagatagcgagctttagttgcttaccagataacaacagctgctgcggccgtggggatcccctgcagccctgctccggcgatcgccgcagcagcagggcgggcgggatgatgcagcgcgctccaagcctccagctgccaatttcctcctcgtcctcgaggaggaggaagaggaagtggaagtggagccgacgatgaggaaagcggcagattcccctcccctgcaaggaaggattagcaaggggcaggaggagacgtggagggaaagtggaagccacgtggacgcggtgcgggcccacgtggctcgccagctcacgacgcgtatcggctacgccaccacacgcttcgatcctcgccgtcgatctgttcgagcaacgaacggcgatgggcgcatccccgcttgaacccggggcggcgcgtcgccgccccgccgcccgccgccgcgacgacgcggcgatgcgccacccagtgcatgtcgccggggctcctggtggctcgcgcgcgcggcccgatgcgccgccgagacctgcggggccggccacccggtgcgccgcggcgagaccggcttctagccccgcccgacgccgcgacgccacgcgccgctccaccgcgcggggccggcccaatgcgccgcgagaccggctgctagacaccgcccgacgcctcgacgcgacgcgccgctccaccgcggggccacgcccgacgctcagcctcgccgccggccgcccatcccggccaggccaggcccttccgcgccgacgagtcaagaggaagatttggggatttgggggagagagtaacggtggtggtggtgatggtatcggccgaatgttgatgggcctgtagcttgctaacttgggtttcaccggcccattcggctcaaccctggcaaattctaagtttctacttggatgagaaagctttatctctctgataataatcataatcataaaatcatgcgatttcaacgccaaaccaacatcgaacgaaaaaaacgccggaacctacactgccgagtcagattcaacattttacgtggactaattgatccccttacataggaatatttgaaaagacactcgaatgtaacatttcaaaagaacaatgcaaacattatctgaaaaaaaaaagaacaatgaagttagacgaggggaggcgaggtcgaagctgaggaagatcggtgctcgacaggccacggatactacaaacagcaatatagcatgtcaagcaagaccagttaagacaaaatcaaggggtttgcacccaagcaaccttcacaggacggtgaaaggaatcagcatttttcctaaaccaattgttttgctcttacaagatgtacggcctgatggttacataatctattcccagaatgttacacgacgcacaacaaaaaagaatgccgaaggaagcgatactctaaggaatggcaggatctgacgaaaactgcagtacagagttaaggtgcaacaagttttcaccccgggtctataagagacccaatttgaagatgtcgccaggaatctctcccacggctttcaaaatttcggtgtcagctctccaagttggatagctcatttcaagataggatgcaattacatcagatgatgtgcatgcctgtaatatctattgatgtactttgcctgcaatacagtagatacaggagttaaagccaagacaactatatgcataatcaactgttccaagatacacctgagctgcaatgtcacatacctttacgttgcttacatcaggggtgtctggagtttttacaggataaaatttgtaaaatttgatattttcaaatgcctctttgaccttagggtccatatcatcaatagctttctttcttgcttccttagcctgcataagatttggagaaacagttagtacttgaatgcattaaagtatctggtgaaggcaattaacatttcgtttgactatgacctgttttagctctcttttcctttctctaaccctctcctttatgaattcctgttaaaagaaatgtgtcagcagttaggaaggagtactcagtgaggtaattattatagactgactattcttctgacagcttaagcaaaaaattaagatgcaccttaaatttttctttctcatcctctggtagcacctcatctttaactttctcatcagcaaagtcctgcattgcaacagaatgactcaatgcaggtgcctttcataggaagcatcaagcaaaacaaccaaattagtacaaacctcgtaatcatccatctcccagtcgaagtcacatactatctgcaataagcagtacaatgtgaatacaaaataatttgatgactgctacgttatcaacattggaggcatctaggtgaacataagcaatacaagtaaatctaataaatatcaacattggaggcatctacgtgaacataataacttcagtgtttatatcagctaagaaccaagtgactcaggctacattatcgcttcagaacaatgaaatgtttgtatcaatagcaggaaataaacactgcaactaagcttccatccagtgactcaatagtgatcctgtttggttcgaggaatgaaatgggtttgtccatcacctcattcctcaaaagcaaatgctaagctattggatgaggaatggagccattcctcagattttgtgggatgatcctatgatggatcgtcctgtccaagatggttttcatgtggtgattcctcaaaccaaaacaacctgtaagtgaccagcctgaaagatcaagactgacatgattgcacaactgcctaccggtcaaacttgagtgtaggtggcatgaaaacaccacatgtacacctatgcaattatgctgacagactaagcaatgccataacgccagcccagcaagcagcaattattcgatttagagggaaacaatcagtacgtctatgcaacagcaattaagagggaatttataagcatgtggcagcagttaggaaataatcatcctggagcagcaatcgtagaggaaaacaatcagcacacagaagcaattaaagatgaaaatagtccgcatgcagaggcaactagaagcacacataaataaaccaaaataggaaatattttttcagattaatgaagcataaagaagtacacatctcctgactcaacagacacaagacaccaaacttcagaagcatccaactgaaaatagtgagggtgacaacaatacaacattgcaggagtgctagtgcgagaaatgacagcagcaaaagtcacgatttcatagaagtaggcaaggggaaccagcagcatgtgggttggttttgacctcacaagctaaggcaaatgaagcaccacagacaaaagaacacaaattcataactggcaatcatgacatggatgcaagcagcctagagatgcatacaaataagagaagatcaattcttagctgcaggaaacagtgaaacacgataaattttatcttctcacataggccaggtgcccaggttaacaatgcagtttatagcagtggagaagatacagctgcatctgggctcttccctaaaatgactagctgacttaatgaatcccaaatataggcctaattaagatcacaatccaagaaatttattttagttttgcccattacacataatattttaggtttgcactaataagatacctccataaaataaactaatagcttatgttgaggaaaatttattaggcaatactggaataacaaaaaacactaagagaagattaccgggggttctaggggatatatgatgttgacaactgtatcatcttcgtcttcgggagggttcagtggcatataatctgcaacaacattaaacgagattcatttgcagactacatcactctcagccattttcataaaacactctgcatcatataagtgtaacaatgtaaataaaatgatctgatcaaccagttgagcatgattgttgaccttgcgccatgctcacacactttataacaagacttacacagtgtgcctatgtttgtgccacaattgctaacattaaaggaacaaacaacactgaaaactggctcactacagacaatgttacatagctggaaagaagtgccttcctaagttaacacaggatatgtaaatggcatcaaattattatattaaaattaagtactaaccatccaacgcaggcaaataagccagctaaaaagcttatcaaagtcaaaaggcatggcagcaatagcatgtaaatatatctagcgttcacccattccaatgaaattaacaaattgtcatacagaaacagaatggaaatgaattaaagaatgactagtaaaaagcttcttatcccatggcatactgacattgcaaccatttaactaagacatcatcgatgtcttgcaggatattttgcaattggactggaccaagccaaggaaccacactcaagttaacaggcactcaaagaatcctatgaaaacagatatttgtacacacaaaacaggccaacagaaataatcccaagtcagcttacatggcatgcagtagtcaaacaatttgactctctcagttttgaggtgcctcagcgcagacctgcaaaacatacaaatgaggatactctagaattagtcagaaaaaaatctagggaaagatgttaacagtgaatttatgttgcatgcttctggatgataacgttccaacaaacaaacaaaaataaaatagaaccagaaatgccataaagcattaatcgcgagtaaggagggaaaaagcatgaattactaacctccgctgggtgcagccaagagtaaatatttttgttttcaaactgtcaatcctactaagcctgtagaccaacaaaaaagaatgagtaaaacacaaagctgcatatgatgattggtaaaaacagaagccattaatgagggagcaaggtaaggatacaggttctcaaaagaaatggtaagaaatattgttcagaattaatagtatgggagtaccgatcctccagcggaacataaggcacccaggccatcttcatggccttcattggcactatctcttcattttccctttggacagaatttatgccaattttgtctgagggaggaaaagggcagtcaacctgcagcacagaaaaggtagcaagtgctaaatgagattcaacatgaggcaagtaaatagtaaaatcagtaatatataaacaagtcaactgccaatgacgttgtaaccataaagtatccaaacaatgttttccaaattgcactgtatactcaattttaaagaggttagggttaaagagcaaacaaacaaattccagagtaaaatagtgtgataaaaaaaaaagggggcattgggtaggccattactgcagtgttctaggctatgctgtgctgccctgcccagccctgcggcacagcgtatttggctgctgcaggaagcagccgcttactgctggcaggctgcagcacctgtagctgctggctggctagctgcagctagctcttccaaacagcgccaaggaaattagtcccattggcttttatgaaactaaggtgactatgtttgtactggcatctttcaaaaatgacagaggtaggaagtacaaacatagtcaccttagtaaaatcaacttgttagcgatggtgcataaacgggataagatgttgagttggcataagcatgagataaatgttcagatttaagagtatttgctaaagtggactgtttcctcatgcaaatttccatatcaagagaatggaagcgaacttacagcaacaactataggaataagcactatctttgattcaccattaacctccaatagttgagctgcatgtcagcaaaaacaatttaatcagataaactgtatcgatgattattaaacaatctggcacatcccaagaacaaatgaaaatatcagagacaagaaaacatttttccacgacaacacccaacatatctaaagtgcacatggtaaaacaaataaatgctgataccaatcaacttaggaaaggcagtagcaactcgaacattgacatggaaaaacagcataagaaataaatagaagtatggtcctaaaggggacaatttcattgttggaaatgtccagagaatctttcagtaatgacaaaaacatgcaagtgtatatctacaacaatgtgcatctaagttcagagaaatatataattttctcagggtgctactgcagtcataattagtgaatttcaggggaacaaacaaactgatagatttgatatttaggcctgtcaggaacgtcaaaaaagaaaaataacatggttcttgtgggaataactatttctgtgaaattaaaccattcaaaacaggccttcaagttatatgtcataaagtacacaaaaaaacaagctaatataatcagtttagttcagttactaaatgctagcaagccagtaggagaatatatgtatcacgaactggagatttaattttaaaactagcacgagtatgaaaacttacgctccgtgcttccaaacaagtaaactgttttcccataaagctcccctccttcttctagtgctttctgctcaccaacaggaaaccttatgtcatgctgaaagcaagtgtgataataaaaaaagagtagtattggaatactatctgcccatcgtacctccaaattttcaaagttccagttgaactcctttatcttatcaatgttttcccactgcagatgagaggcccggatatggataatagttagcggagcaaatatccatagtacacagttgaaagtatgtcaaaacatgcatcactaattgactcagccataaataaaaaagaaagaaatagataggcccatagaaagtaacaaacctcggtcccaaccggaaatgctgatagccaaagatcctcctgaacacagtaacacaatattagccataaaactataagtaatcattttgcctgtttgcaaagacaaactgattatgctcaaacgttccttttatatccatcaaacacatttccaaacaattaattgccctagaactgcttaaataaacccatgtgagttttcattgttccaataatagctcaaacttcacgataacaaattcaagtaatcgtttcatatagcaaagcacttcacaataaaaaaactattcctaacactgacttagaagaacataaactgtacaattcagtcccacgcagatgtggctcaaactctacaacataacattcaacacaaaaactattcctaatgaaatggggagcccctatagtccagccaaatccagtcacatattaaccattcgtatttcaacatcaaccaccattaccatcatttggactaatccgaccactacgaatctcgccgcagaagcagcaaccaaatacaccacgcggtccacaacgccaaaacgaatccagaccaatcaaaccccccaacctaatcggggcataacgaagcgaagcgaagcacgcatccgagacaggtaatcggggaagcctcctcctcaccagattccgcttctcggggaagtactccgtctccggcttgggcttgggtgacgccttggcacgcttcccccgcccccgcgcggccggcttcttcgcctctgcagcctccggcttgctggagtcctcctccgccaccgccgccgccgccgccgcacgcttcctgcctctcggacgcgccatcttctccctctctctcgattgctagggctagggtttcagcagccgtttcgattggggatcagtatttatgcgttcgaggggtgggggtgtgtgcgatttgggggaatcggcgcgtgaaatcgacgcgatccaaatttgaagcggggttggagaaggggactgcgtggggtgggggcgggggaggaggaaaatggtgggcggcgcgggccgcgtgcgtggctgtcttgagggcttcgaggaccgtccgatccgttttggaagatggttctgagccgtcggatttcagggtaggtgtgatggtccagagagggcgagatggtcgacgaccagtgtgggccccgtggggaagtggaaagcaaaacaaaattgctagtgccatgacatgtgggaccaccaggctcgttcaaaacgtggatgcctccatgggccgtgttgggctgtcgggcctctgcatgaactactgcacattatattatgagagtacctatacatctttcgaaagatttttataatcgtatcacacagatttttaatctttgtattaaaatccgatagatataataaaaagaaaaaagcaattaagaaacaccataatgaacattaaattaccatatcctcaagaaaaagaccaaatcaaatacaaaatttaaaatttacatgtgaagattcaaaaattacagtgtaacttacaaaagttacagtgtaagtttcataaattacactgtaacttacaagaaaatacactgtaaatttgagtgagaaaatcgagtgagagataagaaaaaatctttcaaatgagatatagcaaaatcgttatattattacttttgggcttacagtaatacagtactaactactagtagcagtttatatctaaaaggaaaaagtacactttgactccctcaactatcgcctgagtatcattcataacctccaaccacaaaaccgggaatatcgaatcctccaactatcgaaaccggtgcaaacaatgtccctcggtggttttagaggtggttttgtctgacgtgacgcccacgtggcagtcttgaccgattctttgtcctatgtggcgcttacgtggcattagaataaaaacaaaataaaaaaaatatgtgggacccatatatcattcacacaaaaaaaaagtgttgtgggaccactaacatgtgggacccacatgtcatcctccctctccttcctttcttcctctcccctctctctcccttatttctctctcctctcggcctttctcttggccggagcggcggcatggacggcgatggggagcggcagcggcggcggtgggaacggcggcggcggcggtcggaatacgcccagaacctgttccccatgagtccacgacggtagaccacgcatatgcatcgctgggctatataaaggaccttagctagctcaccaactcgaacctggtgttagctttggttagttcgtttcgttcgtgtaggaggagagaatatcttcaagggcttctcgtctcgtctcgtgaaatcctcatggaggtacagtgcagccccatgtttctcttccccatctccatgctggctctccccgccggagcgctcgtcggcgtccccggtgccacgttcgtcgccatggtggcgccgggcggtggtgcttgtgcgatgacgacgaccgcgaggcgcatggtgctggccgcggcgcccagcgtcgcgctgcaccagggcggtggtggggggccggccggcgcatgccttcgccgcggcatcgtctgcttcaaggcgggcgacactccgtcatctggagacgacgaggctaagttatatatccaatccaccggccaccgcgctctttgtctttttcttttgcgcgatcaatgtcatcgacgatgtgtggggtgtgcgttcttggattgttcggcgcctagccaagaatttttctgccttggcgagggcgaaggtggacggctcggggctaaagccggtgcggcggtaggcgaagcggaagaactagagggcgaggtcggcgcagccggcggcggctgccccggagatgacgccatggacgagcggcgcggcgagcatcgaggagagcaggcggatggagttctcgaggcggcaagcctcgtccccaccgcaatcgccgccgctcacgaccaccgccccgtcgctccccaccgccgtcgtcccgaccgctccccgtcgccaccaccaccggctccgccgccgccgctccccaccacctcgtcccgaccaccgccgctgccacttcgtgccacccccgccgccgcgctagccagtcgtcggcgactccgacccccccaccggggcggctcccctctcgtacccctccctccctcccgacggccgcgggctatagccgtcacctccaccgtgcgttccccaccgtcactgccgccaccgccgccgctcctgaagtgagagagataagggagggagagagagggaggatgacatgtgggtcccacatgaatagtgggtcccacttttttttaatgacatatgggtcctacatattttttatttttgtttttattctaatgccacgtaagcgccacgtaggacaaaaactcggtcaagactgccacgtgggcgccacgtcagccaaaaccactgagggacattgtttgcaccgtttttgatagttggaggagtcgatatacccggttttatggtttgaggttatgaatcatactcggacgatagttgagggagtcaaagtatactttttcctatctaaaaatgttgagtaagacttcgggcctattcagattgatggcattttcaaccataccattatttagtaaaattgataattatgtggctatgtttagtttgttaccaaatattggtaatgcatatagaattttggcaacattattaagccaatcctacaaaaaatttggcaatgttgccaattcgccaaaatttggtaaggttcattttagcatcaatccgaatagccacttcatatctacaccattagcagtttaaaagccaatagccaatgctaaaagtgcactatgataaaaagaaccaaaatcaaatcaaaaattaacttttgaaatctaaattttggctaatgagacatggaagcaccaatagatattgaaagaaaaactattgatcggtattattgctgtagttatttgttcctttcgtcgatgaaagtacaaccacccattttccacactttttcatattgacttaagtcagcgaattactcgcggcgaggaggagtttagctttgagagttggaaaggaaatagggcggtgggtaaggcctatttcaaaattttattggtgggtggtactatatgtgtgactgaggtccatcaaaactgtaggtgcattcgtctaaagggtagacccttgaattcactttgcctgctttcggcaattgcattcaactttacctgtctgtggggctttgactatggtgactcctcctttgactctaacatccgctgggtactttactttactttgcaggggaagatcatatagatatcaactcatcgacgaagtcctaggggctccctggccggggaggtaaaggggattgctatcatacatgataagctaaaatcgattatgttttgcttatcatatgatatgatatgagaggctaatattgattatgttttgctaagcatgtctaaagttagagttgttgttgtaatgtacatgcatctggtcatttttatttgatgcaactaaacttaactactcaactcttttgacgtaaggtaaagaataccaggaggaagtatttttgaaacactatctttcaaagcacaatgttgttgcccctcccttggaacattttgaatttaaagatgtgtgcaagctgaaaactaggtggataggaaaatgatattatcacaacaaatcaaaataattgcctgggtaggttagtcacctgaataacttgaagggtgtcaacgtttagctacacattgtccatgttgttctacgggtaccaattggttagtaaaaaaaactttaaataaatgactctaagatgaataaataaataacgtgaacttgcaaccaattatcaaaagtgggagttgggctagtaatcaatactttcactacacgtactttttacaagcataaacaaaaagcgcaaaaataagatatatccaaatttctaaccttcgatccgcaacgaagttttattctaaaaaagcgcggggacttcaacaatgatcctagctacttcaaggcgagcatcttctctcaagcaccatggtttgtatttaggtttagatctagagtcactctatctcgatactattagaagacctcacttttttgggaggaagggtggttggtggaggaccggcgatgagtggcggtgctttgcccatagagtcgagggatggaagcaagggcaacacgagcaagagatctagaaggaggcaggaaacaacaacggatctagtagtggcaaccatcatatacaaggaaggagagcaagacaagctctaggcggcgggttcgggacaaggaagggaatagctagggtttggaagggaagtgattatatatgagttatatgcggcacaagatccattagagccttatttggtgggcctcaatcccagcccattcacaccgcggactaaaaattttagcatccaagtagcccaaatgagatatcataatatttattttgtaaagctagcatttaaaagatgggtacacaagcccgattaaaaaaattagtctactataatgttggggaattggaaggttcaataagaaaaagaaaacttaaacaaagaatactctattggaaggatcaacatccaaataaaatgaaatgaatcattgagtttgcttgaagtgcttctaagagaaaacatggatattagtcgccatataaaggtgtactgtgatccttcacaaacacataactattacaagaaaagccccattggcctctgccttatcatagttggtctaggtcagggtcaatccttgcgcacatgactttcccaacaaagctagaacattgacaaccaatcatcaatttttttactcactaacatgtaaaaatagaatataacacattgataatgttgctaaaagcaatcaacaattaagtatgaggatacatgttaatccacataatctcaaccttagatggaagagcaagagaagaagatagaggaacggggaggggtgtgtggggaaggaggtacttcatctatcgtcgggtggtagcaaaaaaaaagtgagaccctacatcccactttgttgacatgccaatggcaacctacgaggattgttggatccatgctactgccaatgttgaaatatcacaaaactatggtggtttcgggaaagttggactataaaaaatcctatacatagctaatttaataacgtgttattgcactcgatatcttcgactaatttgctatacatatgacgtggatattttttgatctgactaccggtgctactagtattgctctaaacccgcttcacgcagcctttgaattaaaagagtgtacagaacttgggttatgccaataacatgtttttttaacacgcaggagatctgcgtatcattccactaagacatagaagaaaatgtatatggtgttagagaaagactcgacactcgcccactaaggatacaacagaacaccacacaaccaatggaaaaaaaataaactattgcattagcagcacagtcatagtaaagataccacggagcctagcagctcttactagacaccgaagagcgtcctcgttagcgatggtggctcaatgtacattggccaagcatgaggtacgtcgataacatattttaaaactactgtaataagtattggactctatgttatatgaacatggttaatgatggaaaaatttcctatactatttttactagtaatatgcccgtgctaaatgctacggtgcaattcgatttgtctttaataattgttaaaatttcatgttagcggaaatttttttgtatgatatgtgcatttgaactttaattcaattcatgtcgtacattaaatatatttatttaacgtaaaatataataatatgatactgcatgggcacaataaatctttacaagaattaagtatatataatcacttcagtatatagtacgctattatgttaaaaaagtgagttatttcattatttgttgcgggaacaaaataaagcattatttgcgatctggaggaggtgcaggagagaggctgcagtggttggcgatttgacggaggggaaaggaaaccgatcggtgaccgcgtgtgcgattatttgtgatccctaatacattgcaggggaaatctgttctgtgctgcctactcaaaggcagaattttctaagccaatctcattgtcatccaaagtactactgccaatgaactgacaaaagaattgacaaaagaattgatgaaccaaagcagtgacatacttctagacaaacaacttgggcaaactgagagagctcccatggttatagcatatggaaactgatcctacaataaagaaaataatttacactataatataagaaaccaacttttctgctacttgaagtttagaaactgaacttgaggtgatgtgtttagaaactgaacttgaaaccacggttcttgtttgatccacctgaacatctcacggttatccataagtacaaggcaaatatgagtagatggctaattcgctatggagcaaaataatactggaagactggaggttaccttctgttgtttgtatgtaatgaaatatgtgacacagaagacctcaagaaaagtttctatgtacggataagggctatggcttataaacatgttcatgttttttttccggtttgtaaattggtattctaacctggaccaggaacctaccatgagttttaatattaacataattgttttgcattggaataatgaatgttatgcaaacattatgcagtctcctgaaatgaatcatccgataataccaaagtaaatgaagcagcaccgcatttatagagaaaaaaaatgttttccctaagtagtcctacacttccagttgtaagaaggattcaaacttcagaaaaatcacccttccatttgtattcatgctttaaaattgtaaaattttatcttatattcttttctttttaccaatgctttcatacacttcggggatagacggcggagatgagacgaacatgggtagatgcatggcaacctacggagtggcggcagttagggttgggagatgccgccgtgatgtggtggtggcggtgcgtgtggcagcgccggttggtagtggccacggaggagatcggcgtggtgtcactggtgttgtcctcgatggtcggtggcggcacggagatgtcgagggtaggcttcagcggcgccggtgtggtcccccgaggtggatgttgccggatgttgtatcaataatccctaatcctatacagcaaaataagaaaatcaggaggaagattacggtggtgcaatgtttcatgaagcttattgcactttgcttaaaaatgaaccatcttggtacagaattagtcaaaagcttactgaagtcataagttcaccttgaccaaatctgtcaagaatccagaaacagttggattgtcctaacatatgcatggagatggtgatttcattaatcaaggaatgaatctctactatactgataattgatatagatggtgcatcatcttaaatattctgtcactgccagtgaaaatcgaattttaaggtttgatttctgaaatgtgtaaaatcttaaataaccagatactatatattgttctttggagatgtttagacatgtgcagacagttatgcgttgttcatagacatggatactttagttatcattatctaaaaacatgaattctttagataccaaagcgatgctttcggtttttttcttttgattgattctggattatattaagaaccgtatgatcaaatcagcggcgactgatggggagagaggaaatatatataatactgcattgtggattaaaaaaaaggggaggaaggatgattactgtaccttaatttcggcgaatcagatcgaggatgtggtgacactgttctgaaagcagagatcggtggttgcacggagacggtcgacgagccggagattgggggcggcacggaggagaccggcgaggcggagttcctggtggagatcgggggcggtgcggaggagaccggcgagaagggcgatgaatggcggagtggcgagtggaggagacaactggcggggtgggagggcgggtacggtgtgcggcgcgcgacggcggagtgggcgatgcggtctggacggcgggtgggggcgcgagcgccgggagatgacgggggcggcgacgtgcataggcgcgatgggcgagagaactggcggaggagatggatttcgcgatcagaaggaaagtgcgactatttccgaggcgcaggggtgtgggaaggcggatgctattctagacgtcagatctcttagggataatctgaaccgttaagtgataaataaaagaataagtgaaagtatttcttgaactataccctaataacttactaatagcacaatctcacaatgattccttttaaaaaaatgcgataagaaaaggacacccctccgcacctcgtcgttctccatccccaaccccgagtgcagacgaaaccagcctgaccgatttcccaaaaaaaaaaaacaaaaaggaaatcagcctgaacgccggcggcgctcccgccgcgctcgagctctgctcctccgatggtgaccagatggagcgagaagggccccggcctcaagatcctgtggatctggaccctgggaaccgctggaagtaagcaatcccgccatattcctcaactctcgtctctccaatcgcacatagtaccacagactgcactctgatctgatgaattttcgtccgcagttatgattaccaatgtcgtccggacgcgcgtcaatgatatgcagaagatcctccaggaggaagacgaagcagcagcagccgccgcccccatggcctccggcgagcgtgtcctgaaagacgatgagtagaacaggtatttttctcccccattggtcgattgaactgtgttgtgtatcattcctgcaccgttaagttcagtattcaagaatcatgttataggatttgcttttctcgtgcggtgattgtgaagctcaactgtgaatctgggttcattcggctcctaattcgcagctgaaaccgaaaaaatactgacataattgattttaagaagttttgcttatgctaatacgggaagagttctgtcaggtcagagctccgattctggacaattacataaaccctgattcctatatggtaaaataatggcattcattttggtaggcactatctagttctgtttcagcagtatactgctataaagtctaaacagaatgaggcattatccagttttgtttcagctgttgtactggactactggtaaaactgcaatgtggaccgatgaaatttctacatatttctctccctctatggctgaatcttcattgacttttttgtgaaacaccaaccattggtcacatattatggcttgtcgttgggaattaccaggggcgtagccagctaggtggcaccgtggtccacggaccacctaaaaaattaaaattatagtatatgtgctagttaatataataaaaattgtatagtggaccacccttttaattgacatattatatatagatggaccacttttactttaaatcctagctacgccactgggaattacaccagggcaatctatctccagagcatttatccatgctgctccatttcattaggctgtataaatggcctttcaaagtgcactctggaatcacctcaaacatgaagagcccttttttctactcttgaagcctgagcaccaatttaacgaggatattttttctgctgcggacaactgttgatagtagatagggagtggggtttaattggatggttgtaagcatgggcgtgcctccaaaatcatggctaaattatcttacatcaccatgtaaatttaagaaaaaaaataaacaactcactagttaagcactattttagccctactcttcaataatttctagctccgccactagttgtaagtaatacctttttttgttaagattgcgtgaagagtagcatgtgaaattgtgaatgggcaaacattttgagagctttcagagtgtttatgtttatgctgtctggtccactgatcctcttcgttttattctttatctactcccacgtagacatgtagttcatccaactcccatcccctgcccaccaggtgctaactcgattggtgcattttcaagttattagttatacaacatgtaactggtaagtctgctacatatagtgtaggtaattctggcaacaatcactttgttgttgcaaaacaatgtacactacctgctttaacatgacagttatcagagtgttttactttgaaactgcacatatggcaagggcagccaacatgctgctcaacagtccacgttcgattctccccgaacgtgctcaccttttttctttcattgacactaagctcctccttagtgcccatgtttttttaatgtgttttacttttatacagccgcagatgtcataggcccatcttttcgatttttttttgtttgggtctgtgtgtgtataactttgattcatacagccaaaaagtgttacttgctgtaagttgtagcttgcatcagcttaggtttgagctgtgtaaggcaaatatattttacctttatgataagtatgttgtcaggtgtaccttttgtctagtgtcactttggccagataagacttaaaagagattttggggcttcaaaacttggggttgatctagtggaattattttatcttttaaatctttttaatttttaattttaaaataaatcctttcaaaaattatttccagaatctgaaccttttagccaaaccagccgcctggcgtggcagttatttggccacgccggtctagctaggcaacgttatttggttacactggctgcaggtggtgtgtcagtgatgtttttctacaccaagcgtgctggcgtgaccaaaagatttagattctggaaataagttttgaaagggttcatttttaaaattaaaaagttcaaaaaataaaattaagaaattgatctagtgttagtttctggatggaatagtatattagtatgggcagtaaatttttgtgcatcttcagcagcttaactgaaactctttttttttctcttcttattttgcagaacgtctctacttatcaaaattccctgaaccccgctgttgtgccaagctgagttaggtattgtttatctggttcgtcttagtggattttactggtaaaacagctacttgcttgagcggaagtatggaattacttgattcaaaatactgggtcgtctaccatctcatttagaactttttagatcttcatacagtgaattttctgttggctagaaagaaggtgatcgaacatcttcaggcatagctataactgagaatcctgagggtgcagcaatgagaacatgcagtgttcctcaaacatccagctggtaaaataacctactgctgcttctgtgtcgattactccctccgtcccataaaaaatcaacctcgtaccggatgtgacacatcctaggactacgaatctggacatatctctatccagattcattatactagaatatgtcacatccggtactagatttgttttttttgggacggagggagtacttctttgcaatatcctaggagtggtacccctccgttcaaaaaaaaaaagacaaaccttgggttttcgtgtccaacggttgactgtctgtcttatatgaattttttttataactaatatttttattgttgttagatgataaaacatgattaatactttatgcgtgacttgtctttttaatttttttaatattttttttcaaataagatgtatggtcaaacgttgtatacggaaactcgggatttgtcttttttttttttttgggacggagggagtaactggcaagtataggcggcaatggcagctatatgacatatcgacaggtcgagcattcagacactcctaggaacacgatgaaatgagaaatactacagtactagttttgaagagaatttgggagaggctatcgcgttgcaagaagggcatgcgtgtcctgtgattgccgtgtacatgaactagtagcttcgaagccttcgatcagcatcttttcctagctcgctcgttcgcgctggcagcgtgccgctgcagcattgcctcttggctctttgagcggtcgaagcgatgggcatgcgggatgtaggatgggccgcttcgtggttctgacagggacgcgcaacggcgggcaaatccggcgtgcgaatggcagggatacgcgcggaccgacgttcgccacctttacccgcgaccaaacgttagttcaagcctttttttttcctctcgatttcaaaaggccagttcatttttctaagggaaattttaaaaaccaccccataaatcacttgaaatttggtattatacctcataggtcattttgttgtaaatactaatcccctatttaattttactgcaaaacccatcccagccaagacgtcgttttacggaatcaacatgtttcataaattatgagctattgatgtggtctttaccaaaattaagtatttctagagtatagtctggacacctttttttttttggaaaaatccacggatagaaatggtcgtactgagtttcgctatatccgtaaaaaagagttcaacacaaacactagtttagcatatggtagctctacatcaatgataacagactgatttcgttaagcatgtgtatactgagcttttttacaataaactagttaggagatgatcatttgcaacaaagtaacttttcggttaggttttacagtttttctaaatgaaacgtgatttggactttcgacttattttgattgcggcaccaccatccaccgaaaagcatccgtcgcacgacttgtggcaggctgccatttaaataggattcgattcgcaactcgtgaagttgagtaatactccctccttccctaaatgattgacgccgttgacttttttaaatatgtttgaccgttcgtcttattcaaaaacttttgtaaaatgtgtaaaactatatgtatacataaaagtatatttaacaataaatcaaatgagaggaaaagaattaacaattatttaaattttttaaataagacgaacgatcaaatatttttaaaaaagtcaacgacgtcaaacattttgggatggaggtagtacttaatatgtcacataaaaaacgagtataggataggaggtgacacactagtactacggttttttttatgggacggagtcaggaggaatatatcgagtgctacggtacaggagcatacttccatgctcccaaacgtatcctgtgcgttgggttttaaatcaagggctcaaagtgagtaggtagtcgatactctctcgtcaatggagatgggcagcctcagccgccggacgccgccgcccgagataaaccgaccaaaataggagtagaagaagaacagcaaaaaaggaaaaaaaatgttgcaggtggaggaggcgctggcggccgtgctgtccgcggcggcggcgagcgcggcggcgcgcgccgccgaggccgtgccgctgcacgacgcgctcgggctcgtcctcgcggaggacgtccgcgcgcccgaccccctccctcccttccgcgcctccatcaaggtcaacaccttcctccccctctcttctgctccccctccttgccgccgcgcctgagggtgcttgggttgaaaccctctgcaggatgggtacgccgtcgtggcctccgacgggcccggggagtacccggtgattacggagtcgagggccggcgacgacgccctcggcgtggtcgtcacccccggcacggtggcgtatgtcacgaccggaggtgaggtggctcgctctgttccttccgatgatgcggcggtgatcggttactgaccgtggtttctcgggcagggccgattccggatggtgctgacgccgtcgtgcaagtggaggacacggagcagctcgccggcgcgccggatgggtcgaagagggttaggatattggtgcggccaactcaggggcaggatatacgcaatgtggtattgctaataggtttcgttgctttgcttaatgcttatccttacttgctttattccctcctacttgcgtttgtgcgacgatttgattgaaacaaaaaagctactatccatgctctgctcttctgctatgtcaattgcatcttaattcagtttaaattgttgatgtatttgagtggatttacttgtttatgtccttcagtggaagcaacattcttgtttgttattattgcgctattagctgtgtactgtagttctcaattactatgtacttctatagttcatgcagagcatttggtacagtattacttcatctggtaactgatgagttagttatttgaataaataatccatagggatgtgacatacaaaaggattcggtagtgctgaagtctagtgagcacataggtcctgcagaaattgggttacttgcaaccgtgggagtgactactgtcaaggtgaataagtctttcagttaccctgtcactgagtgcagaagagaatctcgcacaactgatcattttgagtatgaatctgcaggtatatcgtcgaccaaccattgctgtattttctacaggggatgaattagtggagccagccacagcatctctcagtcgtggtcaggttattcccactatttcacaatgtttgcatccctcacctttatctgcatttcatattcaccgaaatgtgtacttgctttgcagattcgtgattccaaccgggctatgttaattgctgctgctattcagcacaagtgcaaggtagttgacttgggtattgcaaaagacactgaggaaagtcttaaggagcatatggatgcagctctaagttctgatgctgatatcattcttacttctggtggtgtttccatgggcgatagggatcttgtcaaaccttgtttggcaagcatggggaaaattcactttgaaaaggtatcttggaaattcctccaaaattaggcgtgcaccatgcagttgtatggaagtacaaaccaggagttatgatatgcttttcttgtttccagctggataaccaattaaaacagttattgatggaaaattcttttagtctttggcactaatatatttgtacaattccagtaattctaacagtttgctgtgtttgcatgtacagattcggatgaaaccagggaaaccattaacatttgctgagatcgtaacagaagattcatcaaaaccatctaaaaaggttcttgcatttgggttgcctggaaacccagtgagttgtgttgtttgcttcaatctctttgttgttcctgcaatacgttcactctctggctggtcaaatcctcatctaccaaggtagttattgtcatgcataagtggttagcattgttattaagttctttattcccattatatatcattgagcatattgtcttcactgacatgactttctacagagtgcacgcacgtctactgcatcctttaagaggagacccacatcgtcaagagttccatcgtgcagtgatcagatgggtgcctgatgatggatctggtagacctgggtaagagctatattttaatatgatgccttatatttggcaatactgtaggtgataccggctgatgaaattggtcttggcagatatgttgctgaaagcacgggccaacaagctagtagccgcctcctaagtatgaaatctgcgaatgctttactggaagtaccattagtggggcagatgttggaggctggaacatctatgcaagctatacttatttctgatatgaccagttcaccttttgacaagctacccactgcttcaaatccgttgccatctcatttatttccttctgcaaaaagtgtttccacagatttgtctcaggttccagcctcacagaatactgaagttaaagtagcaattctgacagtgagcgacactgtttcattgggtgcaggccctgacaggaggtatttcattaagcgcctttttcctcgtgattgttgctgaaaagctgctgtacttttgcttgtgattgggttccagattgaatcagaaaagataatgaaccaatataaagtcttaccttttgaagtgcacgcatcctgatacacctctttgtgttgagttgcaaaggggtcacaccatgatgcaaaactaaagagtcgaattactgttttttcttcacataagatggtgatgcatctcagtaagggctccacatttcacaaggctgttattttttccatcggaacagtggatcaaccaaaagctttaattccttatgctgtcagcttagcatttttataaaacacatgtgactactttttcatgaatacttaaatcactgttgtttcttctctgtaatacaatatcatctgtagtgggccaagggcaatatctgtagtgaattcttcatcagagaaattgggtggagcgactgttgttgctactgctgttgttccagacgatgtggaaaaaatcaagaacattttggtgaagtggagtgacattgatcgtgtcagcctcatcttgacactaggtgaaaatgttttcattctttaagttagcaaattgcacaatccttatttttacagtgagatgagcatcaacttactttttataatggatatgcaggtggtactggtttcacacctagagatgtcacaccagaggcaacaaaatctgtcatagagaaagaagcacctggcctcacatatgtcatgcttcaggaaagtttgaaggtgatgactgacatttttctatatccccttgttctttggtttaacatggaaatccattatcatcaactttttctagagataagagataacaactaaccatgcatatgacactagggctaaactttagtggcatttcatttcaatagattttagtaccctaactttcctttaatctgagctattgaacttatctgtggtacaggtgacaccattcgcaatgctatctagagccactgcggggatcagaggatcaacacttgtacacaccatagctcaaacttggcaatttctcacctcactctgaaacgttcacatgtttatcaaacctgttgatatatcttttcagatcatcaacatgcccgggaacccgaacgccgttgcggagtgcatggaggcgcttcttccagcactgaaacacgccctgaagcagataaagggtgataagagggagaagcacccgcgccatgtccctcacgctgaagctgcgcctgtggaccagtgggatcggagtttccgagccgcgtcgtccggcaggggatgctcgtgcgagccatgatcggggccgatgagaatttggtcctcgcgggctatcggcgttcacttcgtcagcttgtcagttccttcgttagcccagccgcgttcagctcggagctaagcagtgacgattttggttctgctcactgttttgttttcacttcacccgaaccttacgaacaccagtgtgacaaataaagtggttacagtatatttgatcttgtaacttcggcccgtttagttaccaaaaactttttgcaaaagcattacattgaatttttgaacacaagcattaaatatagataaaaagaaaaattaattgcagataaaaagaaaaattaattgcacagttagcatataaatcgcgagacgaatcttttgagtctaattagtccatgactagctataagtgctatagtaacccaaatgtgttaatgatagcttaattaggcttaaaagattcgtctcgcggtttcaaggtgagttatgaaattagttttttcattcgtgtctgaaaacctttacgatatcaggtcaaacgtccgatataacatattttcatttcaccaactaaacaggcccttcaaacttttgtatacacggcacctgattttacagcgtcatagggtgggttctattgtggcgagttacttaaatttttttagtacagttcagctgcctaccacgctcgaatcataatgaagaacaacaatggagtagcggtaagcaagatggataggcgagccaaatagaataatacgaacaatctgcgtttcaagaaaaaaacataacagtaatcttcaaaactacaaaaataatcgcaagccagtacacacctactgggcgttggcgttgccaattttccacaatcaagatggaatacatgaaatcgaaaggtggtacatgtcatatttgcgtgggtcgctaggcctacaaaataattaagtacattgctctctgctaggctgctagcacagaagatttaatatcctctgtatgggcaaacctccagcttatctacactggtgatccgcgggcatcttgctaccgtgggaatgcgttgttcaatgaatcagtagaagatgcagcgatatgccacacatcgcctcacaaggatgtcgaggcatcttgaaatcaaaagtatcttctatcttcttttgactggagttctggatctggaacgcttcttcctgaaatgattagacacagatttaaagacaccaccaatataacacaaagtaacacagttactacacaagtggcatagggcagacagggttccagatttataggagttcacgcatttgcttcagtgtctaggattggaggcaggccagcatatcagctctgtcccaataaaacctgaattggtggcctctctgttttcagtggttttttaacattagtaatattactagggttgtttgctttggacgaatggatgctgaattgggcatctgccgatcctaactgcgaactttgatgtctagtttggtttgactttgggcaatgtagtgggttgatacaccaatatttttatcactcaaagcacaagcgtagtacaaaataaagtgacagttgttccaccaaaatcatcgaatgatccatgaagaaccaacctgtcctattcctaaaaccaagcagcccataagtgttatgcatgacaaatatattctagttctaggaaaaattttgtaccaagggtcttcaatttctcaagctgagatggaagtccatgcaataacaacttatgtaaatttgaatttaaaacacaaaggtttcatgtaaacccagaacacattttttaatcgggtacatgttcttaagacacctaaaggttgacttctattttctcaaactcgttaatatatttttctgcatctaatcaaattcctataatcagctacagtaagatcgaccatattactgaagctgagaactcctgaaaaattcatgtggaaataccacctggagtaacataatgataaaggaagaactgattaatctcttacctttccgcagatgaataaggcgaatgcctgcggtgagaatgcttgctatgtggagaccgcgaaactcgtctagagatgaaacataactaaatgggtaagtgaaaggataagagatatatgaacctgatgtttcttcactcagaagatacctgcacactcatatcaaattcacaaggcatagaataaaagcattcctatacaagacttaccatagcagatatgcgaaagcagtgtccttgaggcactgcctcaaagaacatgaatccagacagatagtacaaaatagttcaaccaatacatcccctcccccccaccccaacacacacacaaaaacaaaaatctcttatcctcgcatggggagaaaggatggaaatcatagaaaaaccatggcatgactagccgtattcatgatttaaaaaacatcaaatgctaagcaatttgtggcttccagataaccagaacagagtaagtatgtcagccacattattgatgccaaacataaaaacaacttttaggattaactaatgatgccagccataaaacaataccatctacaaacatgttgaagctaactgctaattcgcacatttttaacagcattaatctacattataaatatgctgtaaacatatagttacctgttcctagattttgggggtgagggggacatgctgcttttacatgaatgaagttttctgtaacagaaaaaaaaagtaatggacaaattaccacgcagggataacaattaatacaatacacattatgagaatttaagaatggcatatacctccttttcgaattatcagaaggctcatcacttgagacactctctcgatgtgaagaactctccttcttggtccgacttctcgcacttggtgatcttgaccttctactgctatgactacttgagccctttgtagtttgcctcgacctatcctccttttcatgtttccctttctctcttctatctgcagaatccctgcttttctctcttacgtccttttgataatcttttctctctccttttgcatcatcctgcttagagtttcctctggaacggggttcccttgtatcagctccatgtctcacactcctgtcagatcctttttcctccttgaagctaccctttttatcaatatttccatacatgctagatttatcatcatcattatatcttttggaagaagattcggattcttttcttcgaacagcctttggctcctttacaaaatcttcctcattgctgctcttccctaaatgcccttgactgctctccatattgctaaaattttcaacattattgcctgaaggtggaacttttccattttgggaatatccatgtgccttctcatccagggtaggagccacatccttcggctgacttgatattttggcatctgaaggaaattccctactatgtgtgtcatgaacacgtagctcttgtttaagttctgcacttgagttcctatgagacatttcatcattaaatttacgatcttcgcctaatgaagcattttggaccacagaatttctttcattatgatttccatgctgttcaccatcagtggctttttcacctattgattatttactcgagttaatatatttaaatggacaagtaatgctctgcaggtatttattttaagaacttaccttctcctggacgagctgcgccagctttagtttcagacgataagtttgaaactggaaccttatcctcattatcaccctcatcgtcctcatcatctgaatcataactagcaaggccaagaagagcgcctttaggggaacttaacccagtaccatcagaatgatcagctgagctaacattagttggcttagcagggacaacaactttagctgagacctttggttttgattctcccagacaggccccttcacactagaaactctagtgggctcatttgctacaatgtagaagaaattatcagaaatgcagaatgtctatttaaatttacaatttagcacatcactcacgttcagctgatggatcatcttcattcaatacttttgtcgcgatctcatcaaaaagatcatcagtaacctggaaagtgacaagaggatcaaaaactaaagaaatgacaggaccttgtcagacctagcaaagtaacttccagttccatgttaaaaacaagacctttaagagaacttcagttaatacacgcttaatttcctggttcattgctgccatccgggctgcttcaatttcgtcctgcaaataattttagtccagtaaaattattacaaataaaggcggctatactagactataaaatagataaaagaaaatagaaggggataaaaccagcacattgttcaaatacgttgtctaattatccacctaaaaaagaactaaaggtagctttcctttaaaatggagttgctgtaagtgcaaatagcttctcagtagctagcatatggccccaacatttctatatgctccaaaaggccatgaatcttttttttttaacaaattagtgaattatcttgtgaccaaaatgaagtcatataagtagtttttagtaatagaatagcaaactgcacctcatcttcttcatcatcatcagtagatttagctgaatctacgcttctgctgtcagcctgatcagaacttttaagtgttttttcagcatcttcagatcccttggagtggaactctgttgagtgttgcaccgaagcactcactgatgtagatttcttcttcaaaagttcttcgcgaagccagttaggcactggaggctggccataatagagcgcgggaatcagtcaaagtacttaggcacatgagcagacacacgcaggaatctcaaaaataagggtggaagaaaaaaggaagagaagaacaaaacttactttctttgatctttctgtgacattaaaaggagtgtttgcatccacagggaatgcttctgtcacattaccaactccaaatgctgcaggtggaatatagcttgaaccagaaactgctccaaagagtggtgcagcatgaactgaagggtccatctgtaaggtaaaagttaattatcatatctatggtgcagaggaatcatatggagtaataaaataatagaattgaacctgtgctgcttgtggtggtactgaagcttgaggaaaaagtactgtagtagatggaatccatgattgcgctggtgctgaatgtgcatcatgatcagatgctgctattggagctgctggaatattagaattgaaatttgctgttctgtgcactgccatatcaggagctttcctactattaaattctaaaggttgatcactgggatcaactgcaatcttggaagactgcccatcatgcccaaaatgaggttgttccagtgagggagcaatatgcatactggaaggcgcttgtggaaatccgtcttgcattgctgaggcagttggaggtagctgagtctgcgagcttggatattgaatcatagcattcccaacacctgttattacattgcatagtcagcattaagcctggataaaaaatgcaggttaccccatccaaacactgagttatatacattgagcacagccagccagtaattagcttttctaaaatgtgatttccatctaatttccaggactggcagcaagagaaatgaagattttcagtgcttcaaagtaaaaagggctcaaccaaacattcaattacattcatgatatatcagaggtaattattgaatccatgataaaatggcatagtcactgagaaagtgattctgagtagatatctgcgtattcctccttttgaaggtggtgaaacccaccaagcaatcgcctcaaatataggaagagtggagcatacacaaacaataacgctagctcaaatgtttttagaaggtaacgtgtgtcatatgctcttttttcttaaataaatagctctgtagacttgcaagtctttccatatttgaatctgaaggtattaccaggagggaccagccttaatatgattcaggctacacagtaagttatattgccaagcaagcatacctggagtagaaggataattataagatacctcctgctcataggcggatggaaatgaaccaaagttctttgctggtggcgccaatggacctccatctgcaatattatcttcagctccactctggaactgacatatccatatataacatatattgagcaatagtaataagatatggtacctggcagatagtttgtttccctgtgctgtcctgtcatttgaaatggcaactggtcattacttgactgagggattggcgggcgtaaaggttctgcgggcagaccagctggttgctgatactgatcctggtaaccgtaattatgaacttctggcctatttgcggatatggcatgctgttgaatatgatggttttctgtaacagatttagcagcagcccatgccttcgcctttgtagcccaatcttcctcatttccatgcccttccagatggggagaaaaaacaaattgaaaaggtcaatcctgaaccatcatcagtaactacattcttactgtaagggatttgtctgctccaagaaagcttagtactatcttattatcaattagtaccatcttattatcaaacatatgtaagaattcttttgaagcacagaccataaatacatctaataagcctatgcatttggtgaatcagaaaaggaattatttataagcaaaagttcagaaaaaagggataatgggaaacatgtgcatcatacacgctagttctcatgtaaatttactaatacatactgggaatgggcagaaaatagctccagatggcatagtggatacttgtttgatcaccgctagcgatgagccgatgactactttagtaaaaacttaaaggcaacttacactccccaaaattcttgaaacgcatgtacattcaataaacatttgtccctatgcatagtgttatgagcttaaacattgaaagatgcatgctgcatcataatgatcaaccagtgctgtgcatcagtaacaacacaagtttcattaacatccggttgtcaagcatactggaccaataaaattagatccaaatgaacataaagcttagatctaatgacaaacctgcgtatccatgactttgagcccacgaatgattggcccagccctaggaaataagcaatgtcaactaacaaaacattatttgaattcaacaaaagaacagataagaaaacagggtcatgggaaacattatgtcatttagattggatgttgaagccaactgaatgtaacctcaccaagagcacctaaccaaagctcatgaaggagtggcatcatatctaaagggaaccaaattgttccaaggcactaaggatttgccacaaagaatatgtaccaaaatgaagtaaagaaaatacaacaagtgcaggaggtttattgaatgcattctaaaagatgatttagaccttcaccctagatgatctatccatatgaaagtctccattgtgaataagtgagaactgtacaaggacaacactattcacacaatcatccctcagtgactcatcagaccagtttcacacagtcacaaaaccaccctagagttatagtcacctcaccctaatcaaacaccgtatcacacccttcccagaaaccctacagccaacagcgatcctgaactacaaaccctaacagaaaatttactatagtctccaacggcgactccaaaacgaaacaggatagcccccgacatacctggcccggaggcggcggcgggtagctgggcggcggtggctgggcagcggcgtggtgaggaggccagggattccccgccgcaggaggcggcggctgcatcggcatcggagggagggagggatggtacccatacggcggcggctgctgcggcagcggcggcggagggtggggtggtccccactggtggtgctggggagggaaagggtggttggcgtggggagggtacggcggtggggacggcccggggtaccagtgcgggctcgcgtgggagggaggtggaggctgcggctgcggcggcggcggcggcgggggggcgtcgccggagacggcgaagcggcggtggtgggggtaggcgtccatggaggcggagggacgggaggggaggcggaggagagtcaagagagacacggacacgcgcagcggagctcggcgaggggcttttacccggctcggtttggtcggccttctgtctgagctctgggctcccgtgtctatgggccgcctgcacgtccacgttatcatgttatggacccagtttcacacggaaggcccaagccagaacacataaagtaacttatcttcttgggagtagcaatatttatgacatcatatttttcactagaaaatagtcaaaatattttcactccataattgcattcatgtacattgtaattaccctgtatttatcttgtaacttttatatagctacagtgtaactacaatatataactacaacgtaactataatgtactccctcagtcccataaaaaacgaatcaggaccggatgtgacatattctagtacgataaacctgaacatatgtatgtctagattcgtagtactaggatgtgtcacattcggtcctaggttggttttttgggatggggggagtaactattgtgtgattaaatacttttttaaggacacagggggggaggggggagtaactattgtgtgattagatactagtaattctcatattcaccttccaatgttttctttctcctctccgacttctctgtccctggatgacgtgacatgagtttgttgagcaatgaaaaattaaggagatagattacctgtccatattactacgatatgtcacattcagtactagattgattctttatgagacggaagaagtagacagcagcctggcagtgacatgtatgaataagttggacccgtgtaaaagaagcacgaatctcaacccacatcacagaataaaaaatggttgtttttgacgggaaaaatatgttgacacaatgattgcgaatcctttttttttctagctctataaattggtctctccaaataactccaacacgtcactgtcttttataatctctcacatacaacttaatttggtagagaacactctccatgaagtttattttctcttctaacctccacctctatctagttttcaataatttctcgttgtactgatcaacttctcacagcatgtggggctccggcgtggtgagcaaagttgcccctatgtcttttcttattaggcttgagattttatacaccacttctatagtagcatgtgtttgccgccatggttttaccaccgtaccactatggaattaaagagtacaaaagcataaggtgaaaggagaccgaaatacacacaccttttgtggcaagggataacttcaatcaccaaatggaggcctatggagcgcaagaagttgctgaaagctaatagaggtgggaagttggaagaaactaataaacttgtaaggagtgttctctatcaattaagttgtaggtgggagattggaaagatcagttacttataggggtgtatttggggtgaatagctaattaagcccctcaagtttcaccgaaggctcaatttggtcattcacgtttcattttgttcatatagctcatctaaatatttgttttggcttgacatcatccttgggcccacttaatatgccatatggctatttttaagtcaatatttctattagaaaatgtcccttttgcccttaatttatatacaactatatactagaagggagaaaccaagatgaataaacaacattgcagatatacttcccattatttcaacatgtgcacataaaacataagcaattactatcgtatacacttgctagtacttaatttattttcgttttacataatttactatatattatcaataaaaaaatcaagcatacaatttttctcttatatatgtgaatgatgggggtataagtgtcatttatcaagagagttgttggttcgaggatatttgaactaaaatgaaaacttgaaggactaatatggatagattgaaatatcaaggactaaactgagccttagatgaaacttggaggaccactttggctattcacccatgtatttggatttcccccactaaaaaaaaatcttccagtcttctactagtagagtagataaaaaataataatggaactgtcaagcaattaaacagaactataggttctaaacatcatgaaactgtatgcattacaggagaacattgaagcttttctaccgtcaagtccaggataggttcaatgtttaaagtttcacaaatcacaacacacaaacaggcaataaataaggagtttgcacaaaagccagaagtatctcccacggtcacactactcactagactatttctacaggtgaactgccaagtgcactctctagctagccaacttggcacgttaggaagcagggaagcagatacatcacatgtcttcacattgcaggcaaactcggctggtttccatctaagattagcagtgattccccaagtagcttttgtgcctcctctctcctcctgcgaaacaatagcaagaaaggtataaatctcaggaaagtgattcacgtgctttgtgccaatagggatccaaatcagtgatacataggatgaaaactggagtggttttcaatgaggaatgtaagttgcacaattcgcaaataatataagggttggaggtcaaaattgatctgagcctaaaagtcggcatttgttctaaaacagcatgcatgatcattgaagttcaacagccattcttagttagcagccctattcaaggtttcaagctaaagatacttactgctttatatcttcaattgcttgtttccgacgctgaatttggttctcaagcatgtgaatcagagtggctctggcctacaaagtattttgaaaagggaaatcattttggcgaatatagagacaatcattcatactgtgggataaaaactgagtctcttacttggtgaggtcgtaaggaattaagaaggtggtgcaagttcttgaaaatgagtgaaatatcctctaccctacgagcatactgtgatggtctttccactaaaatatctgctagctccaaaatatggagctgaagctctctgttcagggtccttagctcctttttgaaatctgcagataatcagttattcaaaaagccagctcgttaaatcaaagaatacaaaagttgtttagtgctgaaagtaacaacacaaaccatttgttcagtatggccagaagtgtaggaagcttaccatagaagcccgaataattttaacaagtcacaatgtaactattgaactaaatatgcagtcaggagttgcacataccgatatctgggctcttcggataaagctgacgaacaccttgatcctctaagcttgggagcaccacatctgtctagagagcatataggcaaaggcatagtcagtttaacacatgtaacaacataatataaagaagagtacaataagcaacatactgtgtaggtagcaccgaagagttgatatggtccatcaactggcggtggaggttcaggtgcagatgaaggatccttttcgtaatccttgtatagtcggtaatatggaggaggtggaggatatgctgatgatgtggccatgccaggtacggaaccaactcaacttccaagctgtcacatcacagaatctgagaatcacaacttttgatgtggcctatgtttccttaagctcaataaactgaatctaatttgaaactattgtttacatgtaaaatggaaaccaaatcatcttcacgctagaaaaccagtcccctttcattcagatttatactttgttttaagaatctgtggtcaaatcttctgggtaggtattgcagttgcagttcttgcaacataatacaaacattacatttaagagattataatttgactcactgaatcatcaaaaagcaaaactaatcagttactcccattactaccaatttacagatgcaaattgcaaaccaaaacaaatgcaaggacaactcgcaccgatttgactgattaccacgtgatcacttaccacgatataaaacccagacaagtcgactagtacagtcgcaccaattcaatgttgaacacgcccacgagaccattacccacacttcacaacccccacgcctacccacaggacatcaatcccatagatgaaaggaccatagagatgatgccaaggaagaaggaagcagagggagtggaacagggggaagaagcggagcggatttcgcgcccgaccaccctgggcagctgcccagggtaaatggctcattcgcttgcagcagtgaatgcattgcactgctctgcgtgcgtccgacggttgagcagcaaacgttggcgcaatggcgcgggcagcaggtgtctagcagagtagcagggcgtgcagcaacacaagtacacaacaggcacatggtacatgactctatgcttagactatcttatttgggcgcttggctacttaattagcaggcagatgcaaaggcataccagcaggagcaaaatacttggacaaactgaactggatttttcacctgtgctaacactttgctcaaatttcatactgagaagttgatatgaaagggaccatggcgaatcttgtgtgagtggtctttgcaagcacttgttaagttgtgttcatcggtagacttgcccaggctcagaaaaatttctggccccgccaagcaagcgcctaccggcctgattgagatggctatcgtgttaaagatatcgcggcaataatacgaactaaatttcaacaaaccggcgagagatctgggcattgattcaaccaatcgagatgcaaattggggaaatttagggtgcagaatgaaccagagttagaggtgagaatctatacccggaatgggaaaaacatgaacagttgtttggacgaagcacagatggggatgccaacctcgaggaagggcgcgagagcctccggcgagcggcggcggcggtggcggtggcggagacggagacggagacgagcgaccgaaccgacccgaagccgaaggcgaaccagggttgggttggtggtcatgggccaaaaagcccaactcgatccagtgagcttcatctggaccgtccacttgagatcgaacggtttacgaggcttcaatccgagttcttttccgtttccgtccctctattaaatccttttttcgaagaggcgcacccctaccttccgcctccgcaagaaagaaagaaaaagaggggaagcaaagcgcagaggcggccgtcgcagcagcaacacaagtcaggggaggagagagaggccgcgccgccgcagatctgtggccgcgttagggtttcttcgccggaatcgagcgaggaagtaggagggagaggaggaggaggaggagggcgacgagtaggaggcggcggcggcggagatggacgtggtgaaggcggcgcagctctcggggcggacgctggagaaggtggtggtgcacccgctggtgctgctcagcatcgtcgaccactacaaccgcgtcgcccgcgacacccgcaagcgcgtcgtcggcgtgctcctcggcacctcctcccgcggttccgtcgatgtcaccaactcctacgccggtaaaccttcccccagtactagggtttgcgtgtctcggatcagcccccttctgtttccaagggatctgcgctgctagttcgccttagggttcgcgcaactggtggcggttgtgggtatagttagatctattggcgtgaattgcgttgaacctgcacaattagatctgtggagttctattccagtgacgatttactgtatttatagcatgctatggcacttggttttgcagtgccgtttgaagaggatgacaaggatccgaggatctggttcctcgatcataattaccacgaatcgatgttttccatgttcaagaggatcaacggtatgcagtttgcaagtcttccatttgtttgacctgccctgtgtaactgattgtgttgtactgacgagctgttcttcgtgtagccaaggagcatgttgttggctggtacagcaccggtccaaaactcagggagaacgacttggatatacacgcactattcaataagtatgtgatgtaccgaagctttatatcctgtattgttcatgaagttatattcttgactagatatgttgttttggtgcaagtaatctttattaaattgtctggcacccaagttataaagcactgtagacttttcagcttgctagtataacagaaggaactgttttatatataacctagattcaattgctgtttgacttcctactgttaacatgagagcaagtcgaatgttgtctgtgcataaaactgtggccctactgcactggactgtaagctcctcagaagtgcatagctagtcccgcatcatagataacaccttttatctttcccccctttttttctttcttgctggaaccttatctgctaccctggccgatggaaatttcctgatcagttttggttacgaacataatgaactgatatgaacagcttggtgctaactaaagcatcatcctaactaaaagcagttttgtagttaatttgttccctcaaattaatttatgtgtttggaaagtcattcgcacatattggtggcatgggagtttaataggtgatgttagtatacctgaaacattaccttctgtatctttttattaagtgtgcttgtaatttttgttaatgaaagtggaagtagtttccccccttcaaagtattttttttcctttttgtttttgtccctggatgcttgtgccatatttattttggtgcttacccttcatagtagctaacttagttcttgtgcttctcaattgtagctatgttcctaaccctgtcctggtgattattgatgttcaacccaaggagttaggaatacccaccaaagcatactatgctgtggaggaggttaaagaggttagcatgtgatctaagaagctggaggtttattgtgcttgtccattgtcttgttctgtttcattaatgtacatgttgtcttttacagaatgctactcaaaaaagtcaaaaggtgtttgttcatgttccttcagaaatagctgcccacgaggttgaggaaatcggtatgtctgtctcatctgtttttactaggaaaaagggatgctttatgtattttgcaagttacagataatagttagcttgtttgagcggtaaatatattaagttgttgatgctagtgaggtttcttcaccaagaggaaagaatatttttgtggtgaagtctttttccttcagaaaggattgttgactgatgtatgttcatcctacttataggagttgagcatcttctgagggatgtcaaggacacaacaataagcacgcttgcgacagaggtaatatttcacaagaatatgcattttcagcctacaagttgctttattatgccctaatatatcctttatcattgttgtcattaaaggtaaccagcaagcttgcagccttgaaaggactggacgcaaggctcagggagatccgtgggtacttagatcttgtaattgaagggaagctcccactgaatcatgagattttgtaccacttgcaggttcgccttctactcattgctttctgtatggtattcttaggagttacatatacctccaattctcttgcatttgctatattattgaggtcagcacttgaaagctatctcatgctaccgccgtttggttttatggaatatttgtgcctttgagatatacacctccattattgtggttgttcggaattcagtatcactaaatatcactcccaaatcaaataaaaaaagtgcttaaaagttgcttacaaagtggaatatgctgccactggtaattccctgtgatgctactggtagttttcacaatacattggacgcgagatataagggatcttttggatggccaaatttgttttatgtatgttttttatgatttgttggttttttgtctaatatttttactcagcttgtcactaccttaataagaaaactgtgacacaacatgtctaaaaaaactaatgaaggtcatgacagtttactacatgtaacttgccaaacaaaatttaaatataattcaaagttctgttgctgaaacaattttactgatgcagttaataacctgtttattttttaaaaaaatcacaggatgtgtttaatctgctccccaatctcaatgtaaacgagcttattaaagcctttgcaggtaataacacatgttctcaccaatttactataattgagctgaacctgtcgtctgggtttcttatcttaaaatggttcgatgctaatgttctttcctgcagttaaaacaaacgatatgatgttggtcatatacttgtcttctcttatccggagtgtcatcgcactccataacttgatcaataacaaggtaaattgtttctgtcttatctattgaatatagaagatgcgggagttaggagatacttgtcatttattgtaagacttccttttatttgattccagatgctaaacaaggagcatgagaaagccgaggattcgaagccaaccgccatacctagtgctgctgggagctgaatgtgctttatttgccttagattttggacccagtggaagccaaaagaattgtgacatgttagcatgatggcgtttgaaccaattgtctttgaccttggttttacactttcgatgtttatttcatgtacgataaggtcaacggcaaactttacattctgtgagcttaggtcatactacctcttgagctttcatcttgatcttatatacaatgtttcatggggtgcatcatgttttgtgatgcggattgtcgtacgattaacttctagtaaatgtttacttgacgcaaaaccattagtttgttcggcttgtggcaacattgtaattgatacctaacaagttgctaggacaggttttcttggcgaggcttatcgtatgtgttctctagttggcggctgtcaatggagcgctgatgggtgcacacaggtggttttcgcttcggctcgagttcaaaaactaccctggtgaactaattcaattcatgacgtcaaactaaactgccctggattatctttcatctatttttgcaattttcaaatcgttttcataaaaatggacaaccgttgagtacttgatcagcgaacggttttggaaccttgatgtagcggctgaattggagttgcaggtttttcctaattcctactttgaaacttactgaacctcgttgtaaatctacctcgaaatgaattgcagtcgaacgtttttcccaattcctactttgaaactgttactgttctctgaaaaataaaagcacacggccaaattcgtaaaataaataataataataataataataataataataataataataataataataataataataataataataataataataataataataataataataataataataataataataataataataataataataataataataataataataataataataataataataataataataataataataataataataataataataataataataataataataataataataataataataataataataataataataataataataataataataataataataataataataataataataataataataataataataataataataataataataataaacccgttccaaactccatcggcacaaggcacaagacaaaattcgtcgaaatcatcctccagattccagaacggtttgcgtggtgtgtgcgtctgctgattacgactcggcgaattcgtaagccgtagcgaatcgaatcgtcgcggtcgcggccatcctctccaacccatcgccgaattcaccatcgcgaggcgcaaacgcagctcgtcccccctatggccttctcctctttctcgtggccgttccgccgccgaggcggcggaggcggaggcggcccgagcaaaccttccgcttcctccgccgccgccgccgccgccgccgcggccgggaacgaggaggaggagctgg

SEQ ID NO: 10118 - DNA, 45737 bp, Oryza sativa
  unsure (1)..(45737): unsure at all n locations
gagtcggagagatcgatcgatcgatggatggaggtgtacacatgtgcgtgcggttgcagtacacacttgcatactagtgtgtgtgtttgcatggtgcggtcgttgtcgcgggaggacgtacgacacggctaacggcacgacaaggcagggggatggatcgaatcgagtcgagtcgatggatggatggatggatcgaggcgggcggncncncgcgggtcccggaaaggtgcgtgcgcgcgcgtccccgtcccgcatgtggctgacacaactcccgcgcgacacggcaccaaccaccaatccatccatacaacacccccaaccccaaccccgcccgagcacaatcccggcgtgcatgcggggccgcactgccgcctgcctcgcccgcccgcccgcccatcattactgcgctcactctcctcgcccaaccgcacgctagccgactactactcgagtactactagcgtactgtgctactgttccattatccggccccctcacgaatggatatatcgtgcacacgggccacggcagtgcgtgcatgcaaaaccggccgggcggccgccatatgtggcacaataataattccgtatgtgcagagattaatcaatacggtggtggagccacgcgtacgtgcagggagatacgcatgaccggggccggtactcaattcatgaagccgatcgagctgctgctaatcagatttcttgttctttttattcggtgctaatcaaatatcatgctctaatcaaacggacgcaccatcgtgcgtacgccctgcaggcgatcgacctcacgtacggtggttgcactgtacgtaccggtcgaggcgcgattggaacgggggctaatgctagctttcccagcagatctggtgacgtcgtctatcgtacaagttagctaatgataataaccaaatcgatcctccttttgagccgcgaggcgaggctttttaactagtacaaggtcgatcgggacgacgtacgtatgatcgatgatgcgtcgtcgatcgatcgttccacgggagtaaaccccaactcgtgatgattgcttgccgcgcgcgcgggcgtttctgctggggaacaggggaaaaaaaggggcgggcgattcgcgcggcgcggacggacgtggcggcggccgagctggagacgcgcatctgcacatgggtgggggcctcgcgcgcgcggccggccgcgcctaccgatggacgtacgtacgcgtgcgcgggataacgagaggcaagggggcgtgggccgaagagcgaccgatggatggatggatgaccgatcgatcgctagccgcagcagctgctcgtgcgatcgtgcgtgcgtgcgtgtgcgtgcgtttgctgccttgttgcctcctaccgcgacccgccaccaacgggccatgggtgtgtttagttgggaaaaagaaaatttttggatgtcacatcgaacgtttgaacagatgttagaaggagttttcggacacgaataaaaaaactaatttcaaaactcgtctggaaaccgcgtgacgaatcttttgagactaattaagccgtcattagcacatgtgggtacggtagcacttatggctaatcacggactaattaggcttagaagattcgtctcgcgattttccccataactgtacaattagtttttctttttatctatatttaatgctttatgcatgtacctaaagattcgatgtgatgtttttgggaaaaaaatttggaaactaaccgggccctatatacaatacacgggcccaatccatgtctccgattttgtcctcctctttgaccctccttcaagctccaggtcctactactagtactacgcctaccctgccgccgtatacgtcagacagcacagcaattaagacaccgtattcttccgtttcctgtgtgtgctcgtctggaatacatacagatacgggcattgatcgggtatgcgtacgtacctggtcaagctagctggtccgaaaagttctccgatttgatacgacagaaacggggaaagcaacccggaacttctcgcatgttcaaccgatcaaactcgccgggatcacacatttgcgcgccgcttaattctctgctcgatcctttgggttgggcgcaatgattcgggatagggtttgacatgatccttggccatcctgcttgtgacgcagaattggtcaacggatgagaggggcacatcgtggttaaggatcgatgggtgatcgcccctgctcccgcgctcggcttgtgccatcggtgttaatgtgcacgggtagacagctactccggccacagccacacaggtcaggttttatcagaaactcagtaccctgttcgtatcttgaaaaaaaatagtgatgttcttcaaccagtcgtctcaagactcaaaaagagtcaagtctcacctagtcaccttgtaggtaaaaaatgaaaactctttcgttgaatgttgccttagtccctatctcgtacctctgtgaagatatgaatgtatctttgttatttttcttcctttcttcttttcacagttgggaaaaatatataaatatactctttggttgtgtttagttcacactgaagtttgaaactttgtttgaaattggtacgatgtgatagaaaagttgtgtgtgtatgaaatgtttgatgtgatgaaaagttggaggtttagaaaaaaaaactttgaaactaaacagggccttttcctacttaatataataccagcaagtctgccttcggtttcaagagacaaaaaaaaaaaaactcttttgttaacatgtccgaagtatatggccactacttttcgtcatctgcagtaatatggcagaaagcaccaactaagagtaggttaccaacagatgtctcgaagataagaaaattccatcatggtttaccttttagataaaattcggttggttttcacgaaaaccagacatcctgaacctagctcgaaagaatattccattggaaaattcgatgcatttcggtccaattcaaatttgatctgaagaaaaatgaaagcgattttaaaattcctaaaagtactatgatattcatataactcattaatggcatgctttaaaaaaatatgaattttcgtgtgttcttttaacggcacacaataatagaaaagtagtatatattaaaaggaaaatgaccttcatgggccaaaaggcaatgacaaatagggtcaaccagcccattttaggaaaaagatgaaaggattcgggcggcaacgacgttcctccgccggatacagtgatcgttccctaccactgcggtagtttgctgctcgccgggtgtcgatttccatccgggaccacacagaaaccgagcgaccacagccggatttggcctatgtttggtgatgcatattgaattatcaattgcctgtgctttaaaattgttttcatgagagtgtattgcaatcgtgtgtttctcaatggagagaactacaatgtaggaaagctcatgtcagcatttttatataagttctctcatttcctacacatttccttaattttccctattcccccattttcataaaacaaaattaattctgcagtaatcttcagcttttcaacaaaaccgggtgtttttcttggacatagatcgatttgattctagttcgtgtagcgaaattttgttattcccaatcaacatttcagtgaaaccgaccagtttttgtcatgtgatcaactgaacctgagaatttggattcaaatttatgttttttaaaagaaatgtttaaaaattgttggttttcatgaaaaccgagctaccgctaagttaccaggatcagagcacccaacagaaaggtagaccctgaattccatatatggcacagttttttttttttactacaagagaagtcccaacagaaaaccttttttcaaaaaaaaagagaaagaaatagaactccaggttcactaatcactatacctgcaaaggaccagcaaagaaaaaagaacaagaatgggcattgcattcaagtattcaacttgtaaattgccgcggacgtataaaaggaggaatttggctagtattttgtatcaacataagacaggaatttgaaacgcagaagcaacctggaaataaactctatgcctgcttaccagcaaacatttgtacagttaagtcttctgcattccaaacaaatgcgaaagcactcagttatatgggcaatccatgaattttgtcaggcatgacgtaggttttttttggaacagttagctgtatctgtgtatacaataaaaaacctcttgttcactgacacctctcgagttacaaaaagatcatcagcgaaggccttttgctacatcttctaagagctattaacagaaatttcatggaggagaacgcatcctttggcctgcagagtgcataagcagataatcccagggtattgtgggtccagagcacacttctctggtagcttgaaaaaatgctgcaattattaattagacatggccgtttaagcagcactggccaagatgggtacaaaactgtggaatttaaaagtaaacaggaaaaagaaactagatgtactggtgcgaaggagcatcctccaatatctcatcaactgcgcaaaaaaggggtcaaaattttttagtggattccaatgcatccctaaggtgccataagcccttcgattgtgtactgaagagacttggcccagtcttccttaaaaagtaaagtttgtaatgttttcataacattgtaatctggatccaacttgcgctgccagccctgtaaaataaaaaacaaactcaaggatctgtaatggagcaataagcaataggctatagatagtatgagagaatgagaaagaaacaaaagttcatgacaattatttcccttttaacaaaaggaaactaacgcagaagcagaaataggtaggaacacaaagcagtacagaggcacatgtactttgaattacagagccagatttccagaacactgactaaaagtaagctataagagtcatatatatgatatttcatgaggttccgctatggtagtttggttatttacaccatttctccagttttaaatatgttgctaaagatgttctgctataaagcaccttttcccactactttttttgaaaacaattctgcaaccaacaaagaatcactttaactgtgacctactatgtcaagacacttttatccttaggcaactagtaggcattatcaacgaatccgaagctcttgagaccattcaatgaagatgaaaattctcatattcatgcatttccatcaaggtctaaggtcagggtacaaatatgcataaacctaatacccctgaagtcttttgtcatattgtgacatctagggagtgcatgttcagtcatctgactatgccattagaaaacgttgtgactgaattctaggggtcgagttctcctaactcctaggtcctaaatacatctccatatacctttctcgttggcaatacagcacatactataatcttgagaaacagctcatcgtgatctattggacatatgacagagacatctaaggccctgtttgattcagcttaggattattataatctggattattaggagtaagctgaaacaaacatataacttattatgatagataatactgtattacaatctataaaccagattactataatctggtaatccactctaaaggtgcttttttagattattgggcggctaacaactaataatccagagaaacaaacagctaacagcttattctatgccggcttattataatccagcttatagtaatctggttcaataatctagattacaataatcttaagttgaaacaaacagggcctaagttacaccataataagtgactgactggagcatgagacaagcagttgaagcatacctcaagaactaatgtagtgaccataacagtacaaacgttcccatcaatgtttactttatggcgccgtacttgctcaagcaactggtgcatacactcagctgggtggacagcatcaccttcagaggttccccaaaaggaaaacgaccgttcaacttcctgttgacaaaaacaagacatgtaggacttgtcgtaatttgtaactatcaaatatataaaaaggcattgtaccaacacaacattgttttaattaatttgtagctaaatgcatttacataaaatgtgacattgtgaacttgtgatagattagttcatgttgatgagttgaggcaaatattcaagtgcaccgaaagtttggacctagaaatgcatgcatctaaaatgtatactttactaacaccaaatataaggtaactatatttcatgttagtatcaaaccaccaaatagttgaccaaaaactcacaggactcacattaaatataagcacaaacccataatgcatcagcaaattaattaatatcaggtattataacaattcaatttaatgtagtggcgcaatttgtcaacaagagagtaaagagaacacctaagatttaagagtaaatttcataaaatcccacataatattgtccaagttgcacaaaaccacagtgattttggcacgtggcatgtaaccccaggtattatggtcctaaagtttcacaaaaccacacttgatggggttatacaatcacatctcaaatttatgagttttttaatccatcgtataactgttatatccggtttttaaaattttgatataggagtatgccaaaatggttaacggtgtggttttgtgaaactttagtacctacacgaggttatgtgccacttgtcaaaagcactatagttttctgcatcttggaccatatagatggggttttatgaaatttactcaaaatttaaacatcccaggtgctttccagcaaggtacagtgcccaaatacatcttgccatcaattcatatcttaaagatgcatataccacctattatagcagcaatataattatcttgactaaagggtgcaccgaggacctcaacaaggaaaagcagaggtgttactgccaagaaacagaccagtgacaagaaataataattacctcaatgaaggcttttggatttgggcagttttgctgttttgataacctcagtgtacgttctgcagctgtacgaccatctcggcgtgcaacagccttgaaaaattccagtaaattcacacgatcattacttgaaagttcagcagtcattcctacatcaaggaatactacatgtggcctagacttcaaaagggtgttatttgaattccttggttgtataacacggaccaaaatatttccagggtgcatatccgcatgaacaaagttatcaacctgcaaaaggtggatgttaacaatgctgcaacgtggtgaaaactaaccataattaaaagccctaaaatgttaagtgcctatgtgtaactagcaaatagaatgtactaaagagagatggtcaaggtccagtgaggttcatcaatttggaccaaaataataataaaaataatgatcttttaatattgtgttgaattgcatacacaatagttctgtaagaaactaagaacgaaggagctaaagtgatattatatgcataaaacaaaatattgaaaccctttatctttccaaaatatgtcacattttgcatattttcaaatccttggtttcaaacttgtgtaaagatatatttggattagttttgtctagagaagtgaagtgacagttgtgctgaatgtctttgctaacctatatcaatatgaaccagagatgtttctaaacaagcactgaacttttataaacaggcagttcaatttagaggttaaatgcaacaatgctcaattgaactcacgggctcacagcataaacagtaacccagaaatagaccataagacacaagagtcatcattcatcaaaagggtatgctataacatttcattgtttcactcaaatgaaatacatgctctcatctccaaacgcaaaacaataatgacaattctaagagatggctgaaagcattaccagaagcattttcaggagagcatgagtgccaatatgtgcaagggcgcttttaattcgatcatgtccatcgaggtcatcgacatagtgtgcaacactctcaccttgctcataagtttcaaccaatacagcaggatgaacaagtgggtaaagaggttttggaaaagacacatccttccaccttcggaagttgtagataaaccggctcaaatgagcagcttcccttgcaaggtcaacttgagacatcataaagacagcaaactgttgcacactctcatccagccgcaaccaattcaatgtaggaatatatctagaaattttagctactgcattaatgatagtgaaatccctccgtattgattctcctacgccaggatgtcttacttttacagcaactgttacacgctttatatgctggccaggataccggaatctcaaaccagctcggtgcacttgagcaacacttccagaagcaacaggctcttcttcaaaattctcaaaaagatcagatagctttcgaccaaaagctttctcaacagtcttcttggtataagcaaagctgtgagcaggtgcttttgtgtgtagttttgacaattcagcacagaggtcactttcaaataaatcagggcgagtagcagcccattggccccatttaataaatgcaggacctgctttctccagggtacgatgcacaagacggagccatgttttcctgtacttactgccaagagtatctgcaaatggggccatgagtatacttggagtgaacaacaatgccaaatatattgatctgaagattatgatgaccagctctactgctgaaaatatcaaggaggtgacatagatacgaccatcttgagcacgcgtgtaaagactatcacgaattggtaagtactctccgtctgcactggtcttctgagctagcattatctccccagcaacgaaagcaaagaggtaaggaactaaattagatctagtggcagccaagctaatggcacaagcaaccctacttaaaatcggagatgcctttggtacatgagaaccgattgtcatgagttgcttccaagcaagttgaccatgaaatgcattctggctacatgttgagagaactgaaaagtttcttgcagctggattccggtataaactctcctttgctcttccaagcatggatgacgtgcccggtccatgcggaaccttcccgtgcaaacaggccctgcctgtatgtgccaaaccgaacgcaaagttggatccaatgttatgtgcagtgaaactattgggtttcgagttaaccaatacatcatgaactagttttctgctcttccctatttgcataaacctggaagcaacaggaaaaccatttacacttctacattgcaccaaattaagcaccaataagctcagtagattttgagctgcggagctgacctcgacatcatggtgttcccggacagcgggcgcgtcaatgaaggcgggatccaggctcgggcgaatcgtacaaagctggagagacactcacattagaggttcggatttagcaacgcgattgggctccgcgcatccgcgagcgaggggcgaggagatcgaatcccctcgaggtcatagaagcgagcgagaggtgggcgggggtggggggccaacggggacttaccgatgcagaagagtggttcgttggcggggatgagatcaccatggctgggcccgggaaaccctagaggcagccatgatcggcggcggcggcggcggcgacgagacgggggcgcatggatggaggagaagcgcgggggtcggtgggcggcgaggcgctagggtttggaggcggaggcggaggcggaggaggtggaggtggaggtggaggtggaggcgagctgcaaatttggtggtccgatgagaggaggacgagacgccgcgtggtgcgcgggggcggacggacgggcggcagcctggctggaaggagggggggggggggtgtgtgtaactgacagcggaggcgagaagacgacggctgtgctttccttctgttccggcctccgtggaccgggcctgtactcttgggcacgcacgcgggcctgcttgcgctgcgccgtctttccaaacttttctgggtttaccaatacttttaagtaaattttactttaggttatttcgctttaaaccatcttttcttaatagtactttgaatcagatttttttattttttttaagtactctagaccatatttaacttttttattcatctacattcaacttattataaaccaaagaaatagtcttacgtatacatgtgtgaaagttcattgataaataagagccaacataatcaagattgttcatatacctgagaaaagagtctgatgtttcaaagtgaaacatagataagtctactccgtctaattaaaataatattagttaaaggacgatctaaaataaaatattgataataaaaggtggctcctttctttttggcaaaaattgaatccatttccagcaatccctgctgttttagaaaagctgtccatgcttaactcgttcgttaatagctttgttaatctactccaccggttcgacagaaatgtcggtagatggtatgaatgctcgaggaaattcagcgtccttttgtcgataagtcacgatcatcaactgagagcattcacacgtgtatattcgtgtactagtaggctctgcatcagcttcgattatttgtgcttaaaaggaaaatatctacgaagttctaccgtaacgtggcacccagcagataatgggtaattcaaatgaccaatccgaatagcaactgtcaaggtaacatttcttccgttctaaaacaaacaaacataaaataaaatgctgaatagttatatatctatattcttatcataagtttatttatttttgaacgaaaaaatagttattataactagtcctaaaataaataaattataatatagcacatactaatactataacttttatctagatttttttagtattatagtattcccattttctatagtaggcgaagaatgcagacatgacacggacccatcgacgcgggacggcctggtgagatcatcctaggccccatccatcaatccatcacgctgggccgtctgtgggctgtctgtcggtgaccacgcccacgcagcccgcgacccagcgctcgtacggttacaggaagtggaggacggtggaaaaattccacaagagttgggggggccaaaaaggacaagggaaggaaaaaaaaaaagtcgccgatccgtttcctcctcgattgccggcaagcggaagagggagagcggaagcgaggaggaggaggatcgaggcagcgggcgcaacgtggcgcgcgctttgcttgcaacggaagcgtggggattataaaagagggggcgcgagatccagatctggcgccgatgcgccccccctccctgctctccctcaccctcgactccgcgctcctccgcatcgcccacctccacgacctctcccgcctccccgaccacctcctcatcgacctcttccgtgtaggtacccccacaccatcgctcgctcgattgatcccccctttgcccctctcgtcccgatgctcggatgcagtgttgtgttgtggtatttcctattattgtttatgttggttggtttggctgatctgtggcaattggctgcttagattgatgagattaatgagactaggttatatatgtggtacatcgtgcgcgcaattagtggaacttatcggattgggaaatgggaagaggtgatttgcaccacctgttttgtgtttagatttagatcatatcacacgaggtgcccaatgcggcccatgtttgattaccaagtggtctgatgatgctacgttgaacctgtcaattttgctgagaggatggatgggggtttatgaacatttggccatgagctggggtttagactcgtagttgtgatcctactcacttttttttttattattatgatagatcaaactgaaagtaatagttttgctattatattttgttaatctctgaaggcatctttgttggcagagaactatagctgccggtaagctgacagaaaaagtcctgaagttgtttctggcaacggattgcgaggaaatcgccttgcttgttcagttgctcaacattaagcagccgcttgtaccggtccttcccacgagtatgttattcatcagcttatctctgtctatttgattgtcatgtgatttatgtcaaaagatcttggtttttgacacgctatcctcttggctgtagggtgctctgagaagttctagaagtgacactgattaggtcagtcttggttacctgagaaaagatgtctttggaaattcaggacagtgaggtcgacattgtgattgcagcactccagcccaacctgactactttctttgaggcatggaggccatttttctctcggttccacatcattgttgtcaaagatccagatatggctgaggagcttcaaatccctacaggttttgatctcaaggtttatacgaagtcagatatgggagtgcttggagccacatccatcgacttctctggtcactcatgccgttactttgggtaccttgtctcacgcaagaagtatgtcatctcaattgatgacaattgcctcccagcgaaggacaatggtgggttgactgttgatgcagttgcacagcatatgtccaatctgaagacacctgctacacctttctttttcaacacattgtatgatccattccgcaaaggggctgactttgtccgtggatacccatttagtctgcgcgagggggttgagtgcatgctctcttgtgggctgtggcttcacaatgcagactatgacccaatgactcatgttgtgaagagaaatcaacgcaacacaacgtatgtggatgctgtgatgacagttccacttggtgcgatgatgcctgtgagcgggataaatgttgcattcaaccgtgaggtgctgggacctgtaatgttccctgctctgcggctgcgcaaggaaggaaagcacagatgggatacacttgaagacgtttggaatggcttgtgtgctaaagtggtgtgtgatcgcttacggtatggcgtgaagacaggtcttccttatgtgatgagaagtgatgcagaagcaggtaaggctctcgagagcttgaaagaatgggaaggggtgaaagtcatggacgtcgttcttcccttcttcgaatctctgaagctatcgagtacttcagttactgttgaagactgtgttaaggaactaaccagcattgtcaaggagaaactgggaccgcagaatgcaatcttcgctaaagctgctgatgcaatggaggaatggaccaaactctggaaatctcacggagctcaaagcgcttaggctgaaatttggttatctgttatgagcatatctgatttcgatacccactgttatgaaactgaataaaccgcattcctgtatgctgggaattttctcgttagtgtacgctccaatactcgtgccgttttcaaagacaagcagtgatatgcaaagcaatgctgtgtatcttgtgtgttacatcaggagttttttttaatggtgatttcgttcatagttttcagacatctgtttccgtcacacgttcgtgggaatgacttttttcatatgaaatgcgcccatggctgcgcctgaaataattttacttgtcccgtttgggatgaatgaattcttttcctgttcgttgttcagtaattcacacagagtcataaacataccggtggaaacatgctcacaaagaaagaaacatcatgaagtcaggctaaggataagaatagccagcacacctagagcaaaattttactaacatcagatgcaagaaagtctacatgagttctaaaaaggaaactggggaaaactaatttacaccaattatcactaatagtacactaaatataaacgaccaagaagggctctaggaacccattttgtatctagcacccgaacgttgaacctttctcccgataaaagagggatcaggcgtgcaacagactggctctcacgccagggaaaccacaggtacaaaagaggcagcgaaagaagaaacaaaacttttcctccggggcgaacatatacaacttgagaggaaaaatacacaatggccgagagacaaatcacagtactgtattgatgtgcagtgctttcaacaacgaggtggccatttgtttcaccaatacctgttgaccgccacgttgcccatcccttcgttcttcgatcaggttttgtagcttttgaggaagatcattctcaactatgagctgctttggtcgaggatgatgctcatagacaacctgaaagcaattccaaacaatcgaacgttaaatcatggagttcaaactttacaaaggtacattaaacatatcgttgatattgagtaaaatgaaattctagacttatttgatcactgctagtagaaggttgatatattaaaaccatgtaaccagaaatttaaagcgaggaatgcaaacctttattaattttagcagtgtcaaacgggcaatagcttctcggtggtcaagccttgcaataagcagtgtcagtaaaccattggtagccattgctgtatttatccgagaagatttcctgtagtcaagtcaatgcaattgcatgtctcaatattctgtatcctgtcatgttcatattatataatgtcatcaaaaaggaaggtaactctttggtcttacgtgattatcttcaaaaaagcatccaatatatgaacaaaatattgttcagggcagtcttgaaaaaacttcactaatttctgaatggcatctttcttcaacaaggcttgttccacttttctgtgatcattgtcatgggacaagcaaacagcaattgaatctaacgcagtacacgcccatgcatcatcctccaataagttcaagtacacatccaatcctccatgagccctcaactgctctctagagttgcgagaagcgtgagccatatcacacagcagaggtaaagcatattgcctgagaggtgagtctgacatgacaaaattcattaagtgagggatgatcccattttcagctgcttgttcctgtcttcttttattgatcttgcaaagattgaacagagcattgaggacctaaaacagcaaaaaattgcatagagttataatgtgctgagaaatcgtgcagacctatttcaaattctgaatagccaactgtcttgacatttgtccctaacacaaagtttgcgaattccagaaaaagtgcagttgcacaagccattgtaattttgcgatgtcaccattcgtttttctactcctacgatcccaatgtaagttgtttgagccttctcaactctttcctacacataagctgttttagaacttctatgcaatttttcatctgttcttacatgtttgtcattgttaaataaatgctactacccgttttacaaacaaatgattcatcttttccaatgtataaatgaagggcatcaaagtcattttgagttcttttcttaattcttgtgcagaagtctaaaatcactgacatttggaatcagagggagtaccatatttactttataatatcatggttttgtctatttgattccagtacactgtacctaatgaataatgatatggttgaataaaatgcaagcataagttcactagtttgctcatctagactctgtttgtctgccagagataacataaactcttctttaaaaagcaacagaaattttactattcaaaagagggagaaaaccaggataaaaaacatttttttttaaaaaaaagaaaacgagtaagcatctaaaaattcatccaaagcaacaggatataatcacatgtgcagccaactccgtatgtttaaagcacatagcataagaaaagcctttaaaaagaaactacccacctcactatgtatttgataaactagagggccatcatgaagttcaagaatcggtatcagatgcttgattgcatctgtgcgctggagtgtctcgagacaattaggatcacccgacaaatgattaatgcacctaagaatctgcagaaaaggaaagatggttcaagaacagaaacagaaacacaaacaaatcagtcacaaagtagcaacactaagtcactaaaatgcttgaagttttaccttaagaagaataggcggttctatcttgttaaacatctggaaaagccgtgcaagaaggctttggctagacatgagagattttacgacagtgtctgcttgtgcaaactccaaaagaagatcagcaactttctcaaggtactcacgtgccacgtcagcactcatagataccatctgagctaataggccagatgatgttgtacttcccggtcttgcatttaacacccctgatccagataacacaccagatgctgtctgtgatgcagctccagatgttgatgctccctcattagaagttgttggacctgatgatggtgcatatttcatgcttggaaccctatttgaagtttttatgttggaatcaaggttaccattttctcttccctgtctagagacctctgcatgaaatagaaagaacaataagtgcataaagaaaggttgttccctcgtacctaaccacctcgcactaactacacacagtattctatagtcctaaatactgctatacgaattctacaaacagagtttagaacagtcaaaacaaaaactgtgtatattgggttcataaaaggcagatgaataaatagcccacatgacccaagacatggtaatcataactgctgagtgatgaagagagaggaattaagcataccagcaaattctgccattaacaagtcaagttcgccgttagttttcctctctgttgaagcatgcagtaatggcaaaatactttcatgcctttctagaccagataagtggcgaacataatcaagttgtccagatacatgccgagagggtggttctttctccaacaggctcagtaggggacgaatttgatcattttgaccactactatgcccatttgatactagctctatatgctttggtgatctatctgttgatgtccttcctgcagaaacactaagccgttgtggcctaatgggatcattatcatttctctccatgtgaccagcagccgccatatcggtgaatctaggcgatgctgaaggatccattatgatatgatgcctatctgcatctgcttgtaaagattgcagtgaaccagatgaatggtgatgatccagcctcgttttggaaatttctagcattggcggatctaattgaccagaccttcgcctgggggtggagccattctgtgttactgaagcaccagacccggagatggaagcaaaccttgttgcttcattcaagctatgaagagtattgaccagcctaagaagtatcccgttttttgccgctatgcgacagaagtcatttcttggagtcgaatgctggagtttgaagacctgccatatgccatcgattgcaagatgaaccatttccctgctaatttaaaatatatggaatacactaattagatataatcattaaattacaccacaaaattccaaagggagtgttaagagaagagtggactcacctgtattttgcataatcaggctccagaaaactcaccaatacagggatcccttggcatgcaatgaacatttgcaatgtcaaggtgctgaggatgcaaatttgaaaattagcccacaacgtttaattccttttatttgtatctaaatatagttagacactaacaattaagtcaaagaacaaacctggcttgacaaagctgctgaaggaacctagagtgcttgcacccgaacttcctttgcacgatctggcacggcaaaattcataaccaccggaatctgcaaataaattttaaacagcacatatcaattccacgtcaacagaatttataagtcgtaaatagttatctgaataaatggtcttacaaggccaacaaggcaagcattttctaggaaggtcgtattatcttttactatttggttgatgagttgcagaacagaagtaataatctgcagggaaaacaatcaacttttcagcgtgaagatccagtaaaaaggttctctcaaacaaaagttaaacttcatacacggtttttgggaagttcaagaagctccatcagcggaaggaaaccattttgtgacacataaatctgtttttgctcaggccgttgattgaagattgacacaagcttttggcaagctgataatatcacgtcctcactttccccaggtttcagctgtgctactattttgctgtattccacagactacaaaaaaaaaaacagacaaggaaaaatacttcatgatcaagacatgataactataaatgtatcaaaacctaagcagcaaatattactgcaatttcaaacatacacaataattatgattgttttggggaaggaaaatacaaaaaacctttccatacattttaggcacagaaaacctgctttcaaaaaagatgaataaagtgttaactagcacaatctatcctcctacgtagacagtttgccagcagatgcagttggattctaaaacttctgcagtactctggatgcttctgctggaccttggtgctagcatgcacatgaaatgacacctaatgcaatatttgaatacatgagaaggcaaatgagtgctgccaaagtccatggcaaatgtcacttcttggttgcgtagctggacacttgatccatatataagacaaatacatactcaaacttaaaaagaaaaggttaagcaagagcattgctacattatgataaaggtacacatcagtcacagaaacatcagagctttagggcatcgcatacctgcaaaggaaaaagactctctccaggaatagtctcatcaaatgcctgaaatcatcagagttgtgtcacttattttatattctcaaaggtacaggcaaaataaaatacatagtactataactatattagtgaaagcaataccgttccatcaatatcttcttccctcaaacgcatgacatattcaagaagttttccaccattcatgtgctcagtatcattttccttctgcttctgagccatcctagtcttgagttccttcgcgagatcattttgtgcaccattgtattgaagctcttcaccagtagtggatgttgaagcttcagccccatgatctcctcgcttcttaggtgggaataaatcatcaaaggaggcatctccaggtgtgtcactgaatctacttagctcgttagccatctcaactgaagttttagcttcctgtcaagacatgaaacattcaacggcaattaattagctaaaaacagctacaaatgagaatatgcagaggtcacagatatgctcaaggctttgacagtgaagcctttgggggggaaaggcgataactgacaagctgcagatcaaaaatatgatctatcatacattggataaaaaatgttctcatagaaacattgcgccactctagtcatgcatgtcttaatactccctctgtttcacaatgtaagtcattctagcatttcccacattcacagtgatgttaatgaatctagatatacatttcccacattcacagtgatgttaatgaatctagatagaacatcactgtgaatgtgggaaatgctagaatgacttacattgtgaaacagaggaagtataaaatattcaatgtgctgcatttagaaatgttaaaatgtacatctttgaccccccccccaaaaaaaaaaaacttatgtgcaaggtcaaaatgatgtgcataaaattatcaccttttggaagttgatattttgtcctccagcctggaagctgaaagcatcaccatcctcaagacttgaaccatctttactttcatcttctacatatttaccatcactctttcttgattcttggccgctgctagttaacttgtttggtggaccatcttgtgatacctcatgagttagtttaccatttaaatcagttgcgcctagtgaagattccaatgatagcttctcatggaaaactaatgtaggatctttattaagaaccacgttatctttcataagttccacatcattcgaactactactcccagtagtttttaacattccatcatgaaactcatcaggtatatcttgcctggcagattcagaaaccaaatcttttcttccatcctcctaaagcaatgttaataaaaaagttcacattatgatagcgtaataatcttgtgagtccacaattttggactaatttcaaaatatgagtagaatatggcatgccaagaaccctgaaaggcatatatacctgttcaaggccagaagcagtaggtgtttgtgtatctcgtggtgggccagaaaatccagagtgattgtcaccacttgatccttcatcgtcctcatcaatatccctgacagtactaacaaaccaggaacttagcaatggcttatcaaggtcactttcgaaagacggttcaaaataattttggtgccagctatttgagagatcaattttgctgagattttaaactatgattttgttgggcaattactatgcagttgtaattcctggtagactacaatacaaggctatgcaaaatccatgtgaacaaccaacaaccaaaatcagcaacagaccgagatatgccgcctatgtcaaataaaataacactacttaaaaagttaaaagatgcaagtggcaaaatgctacttagctaaccacaaaatttaaacaggcacataaagaaaaaaatgggattatacgtatatgtactatgtaaaagcagagagagtaaaactataagaaattccagtggcaaacctccagaaggaacatctctcacaggaagttgcatctataactaacttaaacccactagtactgcaattaacccctggacatgtgtagttgtgtacacatcctacttgctaaacgaataactctagcaatgcttgaataaaattgaccagtacaggtttaatatgcagaatatacaaccattattatagacttatagtgatcaggtgactgaaaaatgacaagctatggagctatatttttctgttttccgtcctgtttgtatctttatggctattattgttggtttatcatttacaatgaatagcaattgaaaagaaggaggcagtaaatgtgagctaccttggtgattgaacaggttgtcgaagagatggcaaagctcgccttgagttttgcaaccatgggtgcatcaataatgtctttgcatcaggtctttgtattgaatcctacaggtgcttcttgaagtcagaacagcaaacaatttgataaaataatcattaaattctcaaagatatagccagaaacgacacagaaccttttgaaaacattgtcgaagaaaatcagtaatctcaggagataagccttctggtattggtggatgcacatcctattgtccatagataaaaactttctatgtaatcatagtctcatgtgtgaatggatattgtgacttttgaaaatgtaggggaagtaaacagctgcaagtaatcaacctgaacaatgcgaaacagcgcaggcatgggctgaaggtcataatatggtggggcacaggtgagtagctcaataacagtacaaccaacactccagatatctgatgcagcacaaacacctgacatttcgatgacctaatgcacaatataaataatgaacaaatacattagcatctcgcaagaaaaagtatgtttcagaatcacaagatgcaaataattttggttgataacgcttggtgtaatgctggcatggaaaatagcaataagttctatcctgttggcagtagtaattagcttttatgttgatagtactagtagaattaggagttaaacctaatcgattgattcattgaaacagcataagtgaagataattagcaaacctcaggggccatccagtatggagttccaaccactgaatgtgtgttgatatcagcttcagttaatttagtagcaactccaaaatcagcaagtttgacaaggccctaaacaagagattgtacattaatgagaacatgtagacaaatttggtacataactgcctatgaggtattcattccagcagttctctgtttccataatttctgctagattgctatatatgtgaatgagctcatctcagtgtaccctttcctaactcctgcatagtatttaatttgtgttctcatgttaacagaagtgcatgaagacgacagcttacaaggatgttattcaaaacatttttccaaaatttgtatacttaagatattccctttgcaattatctcaagtcatcacaaaaggggtaaatatggatgtgatgcagcaataaacctctttggtagtcaatatatttgcgcccttgatatctctatgtatgacaccttgctcgtgaagataaacaagtccttccagcacctggttcgatatgtaaaaaaattaataccggacatagcaaaaacaggaaagttgcaggtaatcatcatattcacctgagcaatgtagacggccaccaatgattcagggaatggcccaaatttgtttggcttgataatattggcaagtgatccattctccacatacctgcaatcatcccatgaggattaaaacttccaagctaaaaaaaaaaaaaaactaatagcctaataggtataatcatatcaagaaactgtcatgaggattgtgaactgcttactctagaatgatatggaggtgactccttgtcttcaatgatccaagatacttcacaatatttttgtgattcagattctgcgtaaagtggcagaacttagaattcgcagcaatacaattttcttgcgaacgtatatacatttcagatatcaagaaccatttaatttcaagtacaatagattatagacatgaccactaaccacagaagaaggaacggtatcatttttcattaaattttgggcatcagggcatccataggaacatgtagctaaacatttaaatagaagcttgttgggtgtataaaaataagtatacattgatggaactccaaaattttcttcataaatttgttcatgtaaggctatagctatagaagcataatgataacagcaacacttacatccaaagataaaggggaacagatgcaacaaaaacaaggataggcggggataagagattatttaaccagtaagatgtgttatttagttttttgtcaagtacaaatatgataagtaaataatgtgaaagaaaatgaagacttactttcaagagatcaatttcttgctgaatcagccacagcagcataccatgaacggaaaagtcacaataaaaaacaatttattagaacagcagactacagcaatacaatagaaattataaaatggtgatattcaaataaaatcttgacaatgaaagcactgaataagatagcacaatatggtggtaggataaaaaaagtataggatttatcaggttgtgctaaatgtcaactccaagcactaaaccatgcatgcaccaaatgacaaaaataaacaatagctcgtgcaattagttcactttagcaaaaagtaacaccaacagattaaacttctaaaattttttggtttggactcctttatgaacctcaacaccaacagctcctttgtaaattttagcttagcacatgttggcacaaataaacattaatcatgtagatttttcactgactttttcaagtttctttcctaagtcaaatagtgtttcaatattttcaccaaaatgtgtatctgtagttgaacctaccgtggccagattttggttcatggttcaagttgacaattcgatgattcacatttagggttccagcagagtgaataccactctagctaagaaatcagaaatggggtccgtgaacccaacatcgacacccaactctagtacaaaatgttgtataaaaaggtcaagctgtattacagctttccgtgggttaatgataaaaaggagaaaagggaaatgaatagttattgcctcctacccttcaaacccaaggcagtcatctccctctgtccttacctgcccactgaaaattcttctctctgtccaccacatgaaggtagactgataaacaagagaagtcacaaaaaaaaactgaagtagacattggtgagtgtagcaatggcgatggcttcagcaagcagcaagccagctgcgacaatgtgtgcgggaataaaaaattaaaaaggaacaagggtgacaacttcactgggcagcaaaatggatgagtgacagcagtggtcatagcaatgaaggggagaaacagaggtggctatggagaccaaaagcccccatgaacacaggaccggaggacaacagcaaggataaggtgtcagtgtgagcgttgatgggttcacaaccagatagtgaatcatactaagttttggcctgaatcacttcactgcagggttatcgtggctcacagtcattgccgcaaatctggtaattatgatctggacacaaacggaagtaactagaacatgagctccatactattgcattcgataaacatataacctaccacacaattaaaccagctattttatacttcctccgtttcatattataagactttctagcattgcctacattcatatatatgttaatgaatctaaacatatatatgtgcctagattcattaacatctatatgaatgtgggcaatgctagaaagtcttataacctgaatcagaggtagtatcaccctagcgtatctggccatgtgttcaggacttctattacatgcctggataggcttaggaagctgactagtgaataactgagctaacagaactccactctatgatttagttccacgtcacgctaccgaacaaatcgatatagcaaacaacaagcagtatttccccaatttccagacgcacttatccctgttgaggtcgctgctgcccgtttatcaactcccgacagccacatttcacgtaatcgcatacatcatcttttttcctttggcacacgttatgcatcataagaaaggcccaaaaagaaaacctcaccatgatgatgttgagatcctcctgcgggatgttctccaacgatacttgcttgatggccacgaagtctccattttccaggtcaagccccttgtacactcgcccatatgctcccttccctatttcatctccgagcatctgcaccggcccccacacccccccccccccccaccatgcacacagtcagtgagcgaaaccaaacccaaaattaacaccaccagaacacgaattccacccggatccgaggcggtaggctccggaacactcacatatttgttgtcgagcgtcttgttcttgtggaactgcgcattgtgctgccgcgacgccatctcgccccgccccccacacacacccaccccgagatcgggccccggacgccgccgtccgcggcgggggcgggcggatcgggggtcactggcggcacgggaacggctccggcgagcccgccgcgagggccatttaggttttagggtttgggtgggaagggaattggaggtcgaggcggaagcaggaggaagaagaagaagacggaggcgatggaagagagagagaaggggaggagagatggggggcttttccgtaattattttgttttcggggggcgtgggaatctaacggaatgagagggcggcttttatactcgggggtgtacttttgaagtgggcggaagccaacgaggatattgagagataagcggaggaaaccactgtcaattagctgtcctcaactagcatccgcgattttgtagcacatcatccggggccccctcgatttttctttccaaaggaaaaaatagaccatttttgtccgctgcttgcgtcatttcttccatggctttcttttccggtcattctctagtggcgtgtaaggagatttttatatttatttggttctactaggctggtttctgtcgtcggcgttgcaacagtgtccttgtgcacaagaacaaccttaaggaccacaaagactatagaataattattaaaataatagataatgattaatatatatatatggtcgactgataaaaagatggtgagtagttgtgtactatatagaatcattgttaataaagcattattagataagtagctggtaactctctttatttgttttccgcatcctagctcattctctccatatctaagcttccaacaataaaatgatgttggttgctttcacaatcatctctgcctcgaaattcaaaataaatggcatttttattaattatgtgactcaataaagaaaatttacatgtctatagtttggaagaaatcaactaaaaattaacggagtgttcaacttccatgataacctataggcaacaatatatatttatcatcacaccaaatcaccaatgtaacaataatggcagcatagagcttaagaaataatctggacgattttacaattggatgatgttggtaggaaatgaaggcagggaggggaagcaccaatgatacagcgatagagacacggcgcactcatgggtatgctttcgattggattttagtaagattatagagttgccgctaatttcgtctttttgataggattttagcaagatcatagttcagttgttgatctttgtctctttaagcgtattttggaagatttcttgcgggtacatgtgagcagttaatatgtgagcttctaataactataatttatcctagaatagattatcatcagattataagaaactatagttgtataattcataagctaggtttaatcataagctctatttagcagcttctctagactctcataaactgacgaccaaacaacatattcgcttgtgtagcaaaacctttcactcagcaagcagcttcttctctttttctcagcaacgcggtggaacacccatcatggcactgccgactacgtgtcggcgcgcgccaacagctaccataccataccatcacagcacgctaattgtacgatagaagtaaccctaatcatggatacgaatatacgacgcagtcaggtcagttggttgccacccacaatgtggctgccacttgaacatgttattcttgtccttgtgagtgaacttgaacattttatagagaattggctatttttcttcaatattgatggcaatgcagtttgcaacttaaagacatgcacaaagattcaagaacatacgtacactgacaagaaacattcaagaaagtacttttgctctctagagctggaagcagaaatttatcttgggtaaactttggaagtttgaatggacaaggtcattgatccgattattgtgtatataatataattgcatacactaatcacagtgggcatcctctagtgtctagaggaagtgttccaaaatctcacaacaattctttatttcagtcgtgccaaaatgaatagaaatcctcaactaaatagtgatacagcatgagcagacttcaaattgtaacacagctcactcgccgcttaggatagggttgatcagtggcttcagctgcgcaagatagacgattgcccacctgcagataagcattaacaaattactaccagaaaaattggcatccggattgtcacacccagtatggagcttatcaagcaaaagagggaagatcaatgatggaaccatcatgtaagcaaggcggcaatacaacgacaatcagatatcaaatcttaaaaaagaagccataagaaatatgagtgacattactccttcaataaactatccaggatatctggctctcatggacccacaaccaaagaataaacagacttatattgagcacatgcaggttacaagaaccaatggagtgaaactataagtcagaatcagattgagtttcagcgtacaactaataccacctgttctactttaacaagagttaatcatcagttcatattgctcctagaaatttagaccttgcaagattacctactagtcaataaaataatgtcaccattgtgcgattcaaagtagactacatgtagaccataagatgccaagttttgctggtagtgtgcttttcatgtttgccagcaatacttttgggtttcaattaatcaatcagcctactgttaaaatcatattttctgagcaatccagtttggatagacaaaccagaaagtgtaagtgaacaaatggatcagaacttacatcatccaacagcaaaccgttgctgtaataaccaaggtcaaatggaatctgcacaaattaaacataagttaatttaataggttagcaaaataaccacatgcatgtagacaaagctcaacagctaactgccatatttcaaacatcccagtattttctcaagacaaggtaatgataagaagacggtagtaatatgatagaaacacagccacacaatttagatagagtcaccatgctttgagaagaatattaataaaagaaagtgtgtgatacagtaccaataatggatatgaacgatgacgatattcgtcacatgaacatagtaggctagagatacaaatactcttagtcacgatcaaataattaagaacacaggctagagatacaaatactcttagtcacgatacaataattaaaaaaacacagtagtatattcggactcttttcttgaaccaatccttgaagacttgaaagacaggataacaaatcagcacaaactttatactaacccacagaaattgaggcaggactataccatgacattatgccatagttctcccaagatcagttataaatcgttcagtctacatatattaccctaaattgtagttctatgcatcgtattgaccctctacaatattcaatgtcatttatgccccttttttcttttctatgcattatacatagctattgaaaagtccatactcagaagtcaaaagggcaaagtaacgtcttcctgttctctcattcacaatgaaaataagtccatactaaaaagaggccattcttaatgcatctgactttaaactggcattgtagtttccagtcgaaaataatgcgtgagtgtgactgtgtgatctaatgacccatgttttcccggctccggtaattttgtccattagaacctcgtaatatgcactgaaacaatatcatcctacggcagcatgtgtcagaatctttttgaagaaaaatctaattggcatattattagagtaattgaaccactcgaattagctctgaaaagccaaacctggttacagcctaccaatttcatcttaagagaggaacatagggtaaagattgaacaaatttgggggttttcgcacgaagtcacttcttttactgaacatgggctaagatcagccgctacccccatcgatccaaccgtttcaaccgttatccgatcgaaaagacgacgcaatctcaacgagaaatctaccaatagaggaaatccttagccctacacaatacgcccaaatctagatcaaaaccaccatccggcgggtcaaatccgcccgaatcgcgcccgccccgatccgaaagctccaggcggcatacaggcgatcccaatcacaccacaccagatcagcagctatctgaagagaatcagcgggggggaagagcgtacaggttggtcgacggcccgcggttgcagcagagcagcgagaagagggaggcgacgaagccggcgaggaggaagatgagcgtggtcacccagaaccccatggccggcggaaagctctccgatcctctcccttcccttccctctcgatctctttcttccctcgggatcgctcgctgggtctcgtcgtctcggggcggaggtggggtggggagagacggagcgaagaggaacaggggtcagacgtgtagtcggtttaggggtagagaagacgacacgatgaattgggcccgggctccttatctgggccttggcctgttaataagtttgggcccacaaaactgtaaagaacaagtgggcccatgtgatggggtgcgcaccggtgttgtacggaataagtttagtttaggtctctcatgttgagatcgagtagctctgcttcgctccgggcgccgacttgccgatgaaggacgatgaaaaggaggtgcctttggctttggacatcaccatgcgtccatgcccgtcgagaagaagttggtcgtgatcgctccggccgccaccattccggctgtgagcgagaagaaaatggctgctgtggacaccgacatgccgagcagagtggctcctcaagccaccgacacacaagccgtggctcctccggctgccgccatggacaagcagaaagttgctcatttggatgtcattacgccaaagatgatcacttaggacaacgccatgtgaacaagcacatttgggggagtcaggataagctagatttaggttaacgagggtttattgtgtacaatagttagctattttggctgtgtttagttcgtgtgctaaattttttttaaatatacggacatacatttaaagtattaaacgtagactaataacaaaacaaattacagattccacctataaactgcgagataaatctattaagcctaattatttcatcattattaaatgtttactgtagcaccacattgttaaatcatgacgtaattaggctcaaaagatttgtcttgcaatttacatgcaaactgtgcaattggatttttttcgtccacatttaatgctccatgcatatgtctaaatatttgatgtgacgaaaaagttgaaagtttgaagaaaaaaagtttaaatctaaacacggcctacatcatctacccacagatttaaatgcttttttttatcttcttcttctaattttctgcctctttcttcatgtccactcgttttcataagaaagcaactagtctgacctcacgtggaccccacaatcatgttgacgaggctgcgttcgagcgcaggagaaagagagaaagatagttttgttttccacacgcacgctttccgaactactaaacggtgtgttttttgtaaaaaatttctataaaaaagttgctttaaaaaatcatattaatccatttttaaagtttaaaataattaatacttaattaatcatgtactaatagctcacctcattttacgcatcttctcagtctcctcaatcccgtccttctcgaacactcaattaatcatgtgctgcctcttacgcctgggagggagtgtgtcgtcgactatttagccacctgctccctccctctctccactcattttcctgccacctcactacttttgccactataggcacactacggtcggctaaactttcttactacgtattatacttgctctcatacagcggcgtggtgatttgctgcccatctacacgaaattccttttccagccgcaccgcatccgtgtcggagtcgatgcggttcccagccgtgtcggattcgatatatccggctcccggcccgtcaatgtatactaggcgaacttggaggacgtactgtactgactggtgttattatgactgatctgcagggaggagaaaagacaatggagtttgatgcaagctgcggagcaatgcgtgggaaactgacgtgttccgtcgtcttgacagtcatctccctctctctgggcatcttgtgtgcgctcctcagtttcctctggcccagcatatcagtggatcaccggaccttgggattgttgttctcggtcattttcctgatcggagccgtggttccagcttgggatcattacagaaaatttggatggtctgtctgcgtctcccagatcgaggagccttaccaaccgaagacgatgcaggcggcggcggcagcgccggattctgatcgtgatcgtgcggaggtcatcgcaaagtatatggcgttcgaggattccgtcgtcttcgtaggcaccacgctctcccaggggatcgtgtgtgcgctcctcagcatcctctcgcccggcgtatcatgggagtacagggccttcggtgtgcagctttcggggattttcttggtaggcgccgcgtttggaatttgggagcatcacaagaaattcggatggtctgttccacgggtcgaggagcctaaccaacaagaagtgaccggtgatgaattatgctgatgaagtattctctcggtgtggggttgaattgttgctcatttttggcatcaaattcactactccatttgtttcatattatataaaataataataatatttttaaaccaagacaaatatattcaactacagatttaatgaagctaattggatattgtaaataatacaatatttgtctacaaacttaatcgaacttgaaatagtttaatttcaaaaaaaatcaaaaagatttataatctgaaagggagtaccaaatacgagaaagtgcatcagttcgtgcgtgtgtgcatgcacaccaattttgtaaaagaccggttgtgatcacggttgcgaccatagctattctgtttggtgtagcttcatattttaaatccacagttgatttgaaatttatgtgttaaattatagtgttttaaaattttatatttcatcatgaaaataagatgattcatttaaatgatattaatgaaattaaacatccagatttataggtttgtggagctagaacattcaactccacaaaatctcatagaggtaattacaattgatcgacctgtactaccatctagaaaccagaatctgattttttccgttaagttagatcattctttctccttattaccatccagtcgcggtggctctgcgcacggactacactggacttcctgcttcgatcgggcgacacgcaagaaaaaacgccgatctctgcatgcgcttgctgttcctaaacgtttttgcgcgatggatgacttcgtgacatgctaagacgactaagcattgacgttaattcgttgcgctgttctaatatacacgttttccttgatgatctcagttgaatattattctgaccgttaagcataagatcgagcttaatttgttacgtacgtcaaagaaagataagaactttggggttaatttggtctttcaaaaacacttttgaaacccttaagatatcaagcagttatatatatatatatatatatatatatatatatatatatatatatatatatatatatttctctatctcaaaataactcaaattatgatatgacgtgagttgttttattgttagaatccctatgttgttaaaaatgatgacaatatgaattaatatataatatatcacttcacctctacaagttgtatatacggtttgtgttaatttgttatgtttgttataatttatagaagttgaatttgagcctacatatttgtaaagtgatatattatatattaatcatcttgtaaaatatttttaatatttttttataatcctttaattaacatagaataatcaaataaacatttactcgattgattataacagtttccccattagggaggcaaagaggcggcgaagaagggggtctgtgtgtaggcggcgagctgcaggttagagccgaagaggagaagaaggaggttcggaagggagggatggcaaggaggaaagatgattacaatgggtgcagcaacaaagattgggggcaaagaggtagcttcagggaggaggaggaggaaggttttggaacaggctttcagggaagtcgcatggggtttgatccgggctatggttttgggcagcagggtagcttcggtcagaggtggtagaggcatggttaccgcctgagaggggctcgtggttttggcccaaggcgcagcagttttgcaggaagaccagggagagggtcagcaagaggattcaggtcacaacgtccagcttttgataggaaaatggatgatatgggaagaaagggagaggagaaggggggagctgctagctcggagaggaatggtggtgcaggccgggtgaaagtgggggaggtggaggtcccccactttaaagaagagagtgattctcactaaggacaatctagcaaaaagaaattggaagggcaacactaagtgttgtttttgtaaccacaatgaaacgatacaacatctcttctttgattgtcatgttgctagatttgtttggagtaccctttttataacatttgggataaatccgcctaacaatgttgctaatatgtttgggatttggctaaagggtttgcaatctaggctaaagcaccaaatttttatagggattgcggcgttgttgtgggtaatgtggatttgtagaaatgatgtggtcttcaatggctccaattttaactcttacttgcaggttattttcagggggacgtattgggctcgacaatggtccttgctgcttaaagaagattagcgcgatgtgatgaaagaaggatgcaaactgttagagacatctatcatgcacttctttggtaaagatggatggaacatgagaaagcggttaaaggagtaatgtggtcgttagtttgtttggaaggtcttttcactttgaaaggcgttggaagtctttgtgctcttttagttttatgtaaggtgcttgagcctttgtgatccttttgtttgtgaacatgtgtgtatgaactgagcttgtttggtcagattttctgtggctgtatacacccccgttggtgtagaagccgggttttataaattcccattatctaaaaaaaattagcgaccccagcggattcgggcaagcgctagtagatcaagcctctagtctaagggtgcatttctcgttttttattttcagtttttctttttgttttttcctggtttttccccttatttctttcgatttttaacatatacatatatataaattttgtattcatgcgtatacaaagtttgtatacatacgaataaaaaaattgtatacgtggtgtttttttcttggttttcggttttttaaatatgtatgtatttatatatataaactttgtatacgtgtatacaacaaactttatatacacgtggtgttttttttttgttttcggttttttaaatatgcatactttacatacgtaccacctattactactaggactgcctactacctctactactacttttatactactagtagtagtactactacaactatactgttactagtagtaatactacactgttgtacataaaatttaatttatgtacatgtatgtaaaatttgtgtaaaatagggtagtagtactactagtaattatagtagtagtaggtggtactagtactgtactataggaggagaccgcgggggcggctgggcgcgcccattagcagtggctgcgcggctctctgcactcactgttcttcctgcagtcctgcttcgggggatcactgatttcacatgacatggttcacatcttcttcttattttttgaaacttaagcaattttattaaataaagacagataaggaggatatggttcacatctcacattaacaaaatgcgccgcttgctgtcacattccagtagttcccaggaccaagcagcttttcggctttcgctagatgatgatcgtgaattcgtgactcctgaacgcgcggccggcgaaaccgtcgtgcgcaaggcgtgtttcttcggagttcggatcacacgttcacacgcgaagaagagagaagacaaaagcattgacgtttgttgctccgttcacagatacgtcttccctgatgtatcatcccatttgaatatagaccggctcgttagggacgtgatatttgggggtttaaaattgatcccgctggactttacagtgcatacgcactcacaagtcacaagtacgtttatacatatccattccgaacacgttccagaagacgaatggtaatatgggattcgtgttaataattaccaagactcgttctatgtatctgagtgaacgtacgttagttcctcgaaggagatggggctgcttctagttcctatacttaattacatgacatgtcctaacagaattcttcaggttgaaggctaacttaaaccttcatattatactgctaacagccttcttccgggaaaaaaggtacacatccacatgccgcaaaaggaaagatagtttattcagctgttttccgatcaataaaaggaaaaaaaaatcattcatgcacaactgcatgcaacagtaccaaccaagtgaaatttgacgacatttgactctttcacaaagtcacccggctcatttttctgtcaacgaaacagaggattacacgagacagtgccgatctagcccaggagaaacaagggaaaaccacacctgattactttttctcgcggctcgcgggtacaaatactgggatcagcgcccgctgtatctgtccatctctcaattcaaatcacccacgtcaacagaagtaatcagccacattggcaactggaaatgtgtgagggcggaagggcagcagcatccatggctcgcacggcgagcgcgtcccggcgacagccggagacgaccagcctcgccgtggatgaggccggaggcagggcgtcgcggaggccgagaggatggaaagccgtcgggttcatgatcggtctctctctccttcctgtctgctcatgaattcgtactccctccatctcgaaaaaacccacctagtattgaacgagatattttctattgcaataaatctgaatataaaaaatgtttcattcaatactaaattgtttttttacagaggtagtactacagttcatgataagttcaaaatttgagccactgttttgttttttaaaaaagcaagaacaatttaagagtgctgctttgtgagctaatgaccaaatgctttttggtgtgcgtggaagcagggctctacctggcaatcgccatggcgttgaacgcgttcgcccagcccgtcaccaactacctcatcaaacgttacaacatgaagccgaatgccgcaacaaacgtggccaacgtcttcagtggcacctacagcttctcgccggtggtcggagccttcgtcgccgatgcgttctgcggcaggttctggaccctcttgttcggagccgtcgccgcctttgttgtaagtgatcagcattgcatccatgacccatcagaaaactatttaaaaattctcgaaagatatatcttgttatttatacatgtcattcaaataattatgattttttaaataaacaagataaatttatttagaaacatataaaatttaatttaatttaaatataagatgcaatgaatataggttaatttgtcataatcaattttattgatttttttaaaaatattttcataactattcggataatatgcgaataattaacgagggaatgttctggagagtttggagtcccctctcatcatccatctctcgcttatcaggttaagagacgaaattaatggctgcttatccgtgatctcctctcgcccatgcaggcaatggtggtcatcacgctatcggcgacgatccgtcagctcaagccaccgtcgtgcagcgacgtggcacggcaagccggcacgtgcgcggggccgtcgggcctccaccgcgccgtgctctacatcggcatggcgctgctcgtcgtggccacgggcggcgcgaacccgaccagcctgccgttcggcgcggaccagttcgaccacgacgacgcgagcagcggcagcagcagcaacgaagccgacgagcgacgacggcgcgccgaggagcccgcggggctcaagcgcttctacaactggtactacgtggtcaccatgatggcctcgttcatggcgctcaccttcatcgcgtacatccaggacaaggtgagctggggcctcggcttcggcatccccacggcgctcgtggccgccaccttcgccgtgttcctcgccggcacgccgctgtacgtccgcgtgccggccgagggcagcatcttctcgagcgtcgcgcgggtggtcgtcgcgtcgtgccggaagcggaggctcacgctgcctcacccgcgcgacgcgcggcagcaggaggccgttctgtacaatcctcccgtcgtcgtcgcagctggaacgggaaccagccgcgtcttcaagctcccactcacgttgcagctgagctttctgaacaaggcggccattgtaaccgccgacgccgacgagatacggccggacggatctccggcgaggccgtggagcctgtgcagcgtgcagcaggtggaggaggtgaagtgcctcgtcaagatcgtccccgtgtggatctccggcgtgatgtggttcatctcggtggcggagctgaccaactacacgttcctgcaggccctgaccatggacctccacatgggcaggagcttcaccatcccgcccgtgtcgatcgccgccatattcaacctcgccatcgtgctcttcgtgccggtctacgatctgctcgtcgcccgcgcagcgcagcgcgtcaccggggtggagggcggcatcacggtgctgcagaggcagggcgtcggcgtggcgatcagcggcctggcgctcgtggtcgcggccgtcgtcgagcgcaggcgccgggcctccgccttggacaacggcgggacgtcgccgatgtcggtgttcgtgctcgcgccgcagctcgccgtgatgggcgtctcggcggcgttcaacatgatcgggcagatggagttctacaacacggagttcccggaccagatgcgcacgctcgccaacgcggcgttctactgcgcgcagggggcgagcagctacctggccacggcggttgtgaacgtcgtgaacgcgaggacgaggcggcgcggcggcgggcagggctgggtcgccgaggacatcaacgccgggaagctggaccacttctactacgccatggccgtgttcgcggcgatcaacttcgtctacttcctcgtctgctcctacttctaccgctacaagggcgagccagaggtggcggccgaggactcgccaccggccactccagaggccgtcctcctgaagcactagccagtagctagcaagattggttacggtagatcactctatgatcaattaattcgatttattattggtgtgattaataataaagttgccactactggacgcatcgcgtttacggcccatataaaaaaaagcccatacaacctgtcacgtgcctgacatggctacccagtagtcccagtacccacaaatggaccgcttatatgagccgcaaaggccgtgatcgaacggctatcagatgccttgtatgatgatactatgatctgatgagtacttcgtagtctgctgtacgatggaggcatggagctgaaggggatcgacttcctgtgttcgatctgggacgcataagcttgatcgaaccgtagccatatatcccaagagggttcggagatttactctccgaatcctcaaaccagcaataatatcgtgactgaccgagccggaggctgtggccctgaataattttccgtttatctgggccgcaaatggcatgatccaacggctgtcagatgtcccaaggagggtcggagtttgaaacgatgaccccaagaacaccatctgaaaaacgacagatgcaaggacttcactggtgagtaatgaggatgcatgcgagatttacttcacatcataaatggcatgcatgatctgaatatctctgatgataagatgatgatcgagtacgggtcagctcgttggatggcggatggcctcgccggcgccgaccacgaagggacatcgtggacgtgcacgatggccgccggcggcatctcttgctgctccgccggcgtggacggcgccgacgccgattggttgcagtctgcagtcgtccgcgtccgcggtgattaagtttagtaatgaagatgctcttgcaagatcgatcagaatgatgagagctggccgcatcccggccgtccatgctgaggtacggtgcacccaacggcgtctgggtcgatgtcaccggctccattcgtctccagcgccggcctgtcagagtgagatgccagctgcaggaggccgtccgtcctcctgaagcactatctagcaagatggcttcatgctcttgaatcttgatcatgatataattaattaatttctaaatttccagtagatgtgatcgacataagaagctatcactaatgaggatacacacgagatcgatctagttacatgatgaaacgatgagtatatagttatttagttagttacatgatggagcaagctggagggggatcctgctggtggtagactacgctctggtcgtactcgtaggatggccacgccggagccgaccacgtcgaggcggggatgtagtggacgtacacggtggccggcggctcaggcgccctcttctccgcggccgccgtgtacaccttctcctcggccgccggcgcctgcttcttgatctgctgctgctccgtcgacgggttggacgacgacgacgacgacgacgccggcggcggcccgatggtcacgacttccgcgcgcttcccggccttcctcgtccgctcgatcacgtccaccgggtccgcgctgccggtcaccgtcatcgttcccttctccgagtcgatatcgatcttgtcaacacctgatcaacatggacacatgtcacactatgcttcacattctttttgcactttgtaatttagaatcaacagttcatttgcttgtttcttcgatctgttaatgcttcatattagtatatttgtttaaaaatatatatatgatatcgttgacttatcacataatatttgactactcgtcatatttaaagaataatataaatacaattagatataagttaaaattatagtattttctttgatgataaaaaagtaccttggaggccggagacggtttgcaggatcttgcgcttgcatttgtcgcaggaggtgtccaccctgagcaccgtcttcttcgacatggacggactggtgcgagagagctcagctctcccctagctgctacgtatccgtgtagatcgagtcttccacgacggcagagccgtgcatgccggtgtagcgggtgctctgctgccgcggtccttgatcgagctaactaactacagcctacaaatatcttgcttggcttttatactgctgcctttcagcctttcaggtggcagtgaatggtagctcaactcctcgagtagaagtatctccttgatgcgtctcttcattggctagctctaccaatttgtcatcaacaactctctagctcgctactctacatttctagaacacggttcacatttttcacgctactctacatttatagaacacggttcacatttttcacttggtgtctggtgatgccaagcaggtgtcccgtgtccttcagtatagtcatatatggacatttcttcaagattaacggctggttggtagtaggcaagtaggcaacgaaccttaactgcaattcctaactgttcgtacttgtaggttagtgttgcgctcgcaatacgcagccacgtctcctctgtggatgttggtggttagaacaactttaacctatccatgactccatgggctatacctatacataattaacagcctttagcattctagagcctagatattgcatatatagacaagcaatatcagaagaataagaaacactttctgcattcggatgacctcattttagacatttagcgcaacaaaatcacaatacgcctacactgaaaatactccggaaaagaaagtacagaaacgactaacttgccaggccgcactaggatgtcagaactcagatcacagattcacagcaagctgagtatacgggaatttatcatagatttccaaggtaaacgtggatgcctcagtatacagtttattaactcttcttaatgtttgtctactgaaaattcggcctactgctgaggcaaaccacacggtatacaggatgtactacaacaactaccactctcttacacgttttccctagaagggaggagaacctgcacattggacatgcacacttgtagaaacacaacaatcaccaagatacaacagacacttgtcctatgccctttatatttcaaggtcgtcaatgttggagctgaacctttggagctgaacctttgtgtcacctagggccacatccctttggaggatcacgtggatctcccccaacttctccatttctagtgtagaaattgactatcttttgatccaatttaaagtaatgtaccatcttatccaagggtttcacatccagatcaataaaatatgcctgcaacaacaaatgtgcaaatcaatgggttggtgggaaagaaacattaataaaaagagtttttagaaagaaaaaaacaattgttccacaaggaactagatgacttatcgaacttctcaaacaagaaacatatcacatcaataccttgtaatcatagctttggttcactgaatcaagaaatacagaatcgtactcagaatctgttgttccactctgtcttggtcgaaagctgatcattaggctacaatcttttgcagtagcagagataagaaagtccctgacaatcttctcactcttgtccaatggaagagaatgcaaggtggagtacttgcgcagaagttctgtatcagttatacttttgcataccaaacaaggctgagaaatgatgttatagtacagatgaatcgccccttcgatgtcatgatcatccagtttttgagtggctaaaagtttacccaacactccagacttaaagattgcctctgacaggagctcaataaagtcagatagttgtaagccagtaaccttgctcagatcttcaagacatttctctgtttcattaggatgaacactatctgcgccacctcccatgccaccaaaaactaaagaaccatccacaaaaattctaaagttgttctgaggagttgaaaaaaatgacttgatagccatatgtattctttcttttgatccagaaaataaatctaggggatcgtattcacttgtcttcgatatctgaaatgtgtttaaaaatatgtttagaaccaagctgatttgaaaagcaaaagggatgatatagcattgcaacttccaagagtgacagaatgaatatgaagcatctattaatatctgtttcagctagaagagtagtttgttgtctttcagtgagcaaaagagtagtgtgctattatatatttagtactcaaaattatggctgcggtgaaatcaaaatctggtacccaaaaccaacatacctctcccagatgaaattttaggtgctgatgcatcttataccgtgttacttgtttcttgatagaattctccttcgatatgtattcagatgacggaagaaatccacattttgcctggaaggcaaagcatgttaaaagaaatgtgtacaaaagatgaacagtgaagaaataaataaagctcaaaatgtacctttatctccactgctatgcaactgcttcctctaggattacctgaggtttagaaaaattaccaaaaacaaacatagtgttaaaaaacaaaatctagcagcgagttacgaataataatttagcaatggcgcaatgtaaaaaactaccgaatcatctttaatcattcaaactaatcaattttggaccaactaccaattttaggacggaaacaagctcttgcggatggaacagatcagagttaagctagaaattcgaaaaaacaagcaggttctttcattctttccatgtttcagaataatggagaatcttgagaaatataaattgtatgaatccttccaaacatatcccaagtttcacaagtgtcatggagaaagttgggcttaccaatcttgatcctatctatttggttgtagactagaaaaccataaattacaaacttgccactcttaacaaacaaataaggttaaagcatgtgatgcaaatagaaataataaactgagtaacagtgttgctgcaaatgttatatcataaagagttaatagatcaccagacctaactgatatttgctctttcttagtacaaacaagagtcacattatactcaaaagggaaagagatgaagcgttcaaataacattgaaacgccaagactttaccggaaaataatgtgtggtcagaaattagaagagcagaatcagctccagcatcaattgcactagcattcactctccatgcaggacggttgtcaagcacattctttccagcaagctcgaaaaagttcttagacacacgtacacggacctgaacatgaaaaagagaccacgtttattcattttagtcaagtggatccaattatctaatcaaggatgtattttcaaataacccgaattttccattaattatagagcaaaagaattttaaattggaaaacgttggttgatttatttctaataaatatcaccgtaacaacattaaataattggatttaaaacataccccgccatcaacatgattggcacccaaatgttggctcataacaattgtagcataggcttgtggcaagcaatcatttttaacagattccaacaatcctgggatcttgccccacagatgttcctcatgacttgagaagactatacagtttggtgccggttgtcccttgtcttttagaatctttttgactcgcagaaccttgccaagctgttcaagaaaacatcatcaaaacatttttcctgtaaacatatcatacgagggaaacataatactttggtcacaaactaaaaattttagtcaaccaagtcaagataagattattttctctttttcctctcttcttttaaaaaacagaagaaccttgctctccctctttccattacaggaaacaacaatgttgtagcaatacagcaaaaggaattgaacaaaaaaacaaaactagaccgggcaggcagatcacacaactaagatggcgccgccaccaccccttctttttgtgtgatcacacaactaagattattttcttttgaattatataatattaaagtgaaactatttgactacatgaaagctgtatgggattttctaatttacatatacaaacatttgccatttcaagagtgcagctctggccataggacatgcatccctgggcgttgcatcaaagttggtaaaacatctttttggggggaaatcaggcattcattaaaccggctttgtgaggaaagccaaacaaacagagtcttataggaaaataaaaacagctagctaaactaggacagaaacgactagacaccaactgctgggtcctagctagatcaagcacaaggctacatctccagatcacctcataaaacaccatccaaaacatctcatgaaaagagcttgaactactgtcgcctcccagacacccaaacattcatagctataatcatcagaacatcaaaagtaaaacatccttcttgaagcacatgcatcaaattcgccgatttacgggagactataggtcagtaaccaataatgacacaagcagaacctattcgatgcataccatagaaggtgacgagccagtgtagctgaggattagattcgctgcaccttctcctttgtaaacccaatctttggcatccccctcatgcagaaccacctccatccccacacagaatctgcaggcttccaagtatgagttcaaggtctattattcaaaataagtaaggaggaatagtaggcgaaaaacgaagtaggaggaacagaaaattgctgcttaacgccgagtaacacagcaaactcgagtccaagtgcaggtgcattcatttactcatctaccaaagagaagatcaagcgagaaagaagcaacacttggttcctggtcggtgcggcattccgtcgagcagatagcgagctttagttgcttaccagataacaacagctgctgcggccgtggggatcccctgcagccctgctccggcgatcgccgcagcagcagggcgggcgggatgatgcagcgcgctccaagcctccagctgccaatttcctcctcgtcctcgaggaggaggaagaggaagtggaagtggagccgacgatgaggaaagcggcagattcccctcccctgcaaggaaggattagcaaggggcaggaggagacgt

SEQ ID NO: 10119 - DNA, 127709 bp, Oryza sativa
  unsure (1)..(127709): unsure at all n locations
gtggcactggatcatctccacaccgggtcatttcttgttactcttggaggttgccgcctcctagacggcttgtggaggagttgcccggtgacctctccgagaagattatggaggaggcccggcgccggtttgtgagtggtttggagttcaccaccttcggagtgaaggaagaactaccccgagtgatcgaggcttgggtagtcctctccgtgggccggctcccgccttgcccaccccttgacgaagggggcgtgcggtggcttcgtggttgagcggtggagttgggctcgcctcaacggggagtaggaaaccgacgagtttccgaacctcggtgaaaaatctcttgtctcattgtctcatttgattgtcacatttacatttgtgcaatttacatttctagaaacacacttgagatcatatcaccctaggattgcaaaacattgacatatgagcgtgatttactttcctagagatataattgagccactatcaccctaggtttgcaaaacattacttagttgcttagttagagttcatcctcaccaagcctagcaacttaggttagatttgattaggtgttatttagttttaaatcgcttattctcccccctctagtcgatatctcgatcctacaagtggtatcagagcttggtctctcttgattgggcttcaccgcctagagagaagatgtcgaacgagttgaaccatgtagggaaggctcccatgtttaatggcacaaactactccacttggaaaattaaaatgtctactcacctcaaagctatgagcttccaggagtattgtggatgtaggctttgccatcaccgacacacccttgacgtagattgatcaccacaacctccaactcaatgcccaagccatgaatgccttgttcaactctttgagccaagaggagttcgatagagtgagcaacctggagaccgcatatgagatttggaacaagttggcggagattcatgagggtacaagtgagtacaaggatgccaagcttcatttcctcaagatccaatatgagacattctccatgttgcctcatgagagtgtgaatgatatgtatgggaggctcaatgtcattgtgaatgatctcaaggggcttggggcaaactacactgatcttgaggttgcccaaaagatgcttagagccctaccgaagaagtatgagacccttgttaccatgctcatcaactccgacatgtcaagaatgacacccgcaagcctcttgggaagatcaacaccaatgacatgtacaagttgaagaagaaggagatggaggaagcctcaccctccaagaagtgcattgctctctaagccgaagttgaagacaagagcaagagcaaggtgaatgaagtcaatgaggacttggaggaagagatggtctttcttactagaaggttcaatgatcttttgggaaggagaaaggagagaggaaggggctccaactccaataggagaagaaatagaagacctaacaagactctctccaacttgaggtgttttgagtgtggtgagaatggacactttgcttgcaagtgcccttccaaggatgatgatggagacaagtcatccaagaagaagagtggaggctacaagctcatgaagaagcttaagaaggaagggaagaagattgaggctttcaacggggactgggactcaaatgaggagatctccgcctcatccgggtccgaggaagaaggtggtgatgatgcaagctccaagaagaagaagatggccgttgttgccatcaagaaggctccatcactgttcgctccactttgtctcatggcaaagggctcctctaaggtaacatctcttagtgataatgagagtgatgatgattgtgatgatgtttcctatgatgagcttgtgagtatgtttgaggagctccatgcttatagtgagaaggagattgtcaagttcaaggctctaaagaaggatcatgcttctttggaggtcttgtatgaggagctaaagacctctaatgagagactcactatttttcatgagaagcttaaggaagctcatgacaacctcctttccactactcaacatggagctcacatagatgttggcatatcttgtgatttgcttgatgatagtgctacttgccatattgctcatgttgcatcatctagcatttatacctcttgtgatgatcttatggatatgcctagcccttgctctagttctagctcttgtgtttctatttgtgatgcctcacttgttgttgagaacaatgagcttaagtagcaagtggctaagctcaacaagagtttggagagatgcttcaagggtaagaacactcttgacaagattttgagtgagcaacggtgcatccttaacaaggagggacttggattcattccaaagaagggtaagaaaccttctcaccatgccactcgttttgtcaagagaaatggtaagtattgctccaagtgtcgtgaggttgggcatttggtgagtgattgccccggaggtaagcctcctaagacatgcatgtttgattctcattatatgcttaggaaggctcatgatggtagcattgttgctagatatgtgggttcccctatactcggtggtaaaaagaatgccatttgggtgcccaaagctttggtctctaacctccaaggacccaaacaagtttgggtacctaaaagagcttgatcttcttttgtaggtgaactaccgcaccggtgggagccattgagtgcttgatagtggatgcactcaacacatgaccggtgatagggctatgttcaccacattttaagtaggagggaatgaacaagagaaagtgacatttggagacaatagcaaaggaaaggtaattgggttaggtaaaattgctatctccaatgatttgtcaattgaaaatgtctctcttattaaatctctaaatttcaatttgctttcggttgctcaaatttgtgatcttggcttgttatgtgccttcttcccacaagaagttattgtttctaaccttcttgacaagtcttgtgtgttcaaaggttttagatatggaaatctttatttggttgattttaattctagtgaagcaaatttgaaaacttgtttagttgcaaaaacttcattgggttggctttggcataggaggctagctcatgttggcatgaatcaattgagcaaactttcaaaacgtgatctagttgtgggcttgaaagatgtgacgtttgagaaagataagctttgtagtgcttgtcaagctggcaaacaagttgcatgttctcatcctactaagagtatcatgtccacatctagaccattagagctcttgcatatggatttgtttggcccaacaacctataagagcattggtggtaatagtcattgtcttgtgattgttgatgattattctcgctatacttgggtgttctttttgcatgataagtctattgttgccgagcttttcaaaaagtttgcaaaaagggcccaaaatgaattagttgcactcttgtgaaaattagaagtgacaatggttccgaatttaagaataccaatatcgaggactattgtgatgatcttggcatcaaacacgaactttccgctacctactcacctcaacaaaatgctgtagtggaaaggaaaaatcgtacattgattgagatggcaaggactatgctagatgaatatagtgtttccgattccttttgggcggaagccataaacaccgcttggcatgcaaccaataggctttatttgcatcgtctcttgaaaaagacttcctatgagctaattgttgggaggaagccaaatgtcgcccattttcgagtttttggttgcaaatgttatatttaccgaaagagtgttagactaaccaaatttgaaagtcggtgtgatgaagggttttttctaggttatgcctcaaatagcaaggcataccaggtctataacaagaacaaaggtattgtggaagaaaccgccgatgttcaatttgatgagactaatggctcctaagaggggcacgagaatttggatgatgtaggtgatgaaggcttgatgagagctatgaagaacatgtctattggagatgtcaagcctattgaagtggaagacaagccatccacctccactcaagatgagccatctacttccgcctcgccaagtcaagctcaagttgaagtggaggaggagaaggcacaagatccacctatgcctctaagaatacacaccgctctttccaaggatcacccaattgaccaagtgttgggtgacattagtaagggtgttcaaactcgatctcgtgtcgcttcgatttgtgaacattactcgtttgtttcttgtcttgagccaaaacatgtagatgaagctctttgtgatccggattggatgaatgctatgcatgaagagctcaacaactttgcaagaaacaaggtgtggactttggttgaaagacctagagaccacaatgtcatagggacaaagtggatctttaggaacaaacaagatgagaacggattggtggtgagaaacaaggcaaggttggtggcgcaaggtttcacacaagttgaaggtttggactttggtgaaacttttgcccccatagtaagacttgaggctattcgcatccttcttgcatttgcatcatgctttgatataaaactatttcaaatggatgtgaaaagtgcttttctaaatggtgaaattgccgaacttgtctttgttgaacaacctcccggttttgaagatcctaaaaattctaaccatgtttacaaactctcaaaagctctttatggtttaaaacaagctcctagggcttggtatgaaagattgagagattttcttttgtcaaaggatttcaaaattggaaaagttgacaccacccttttcacaaaaatcattggtgatgatttctttgtttgtcaaatttatgttgatgacatcatattcggttctactaatgaggtattttgcaaggaatttgatgatatgatgtttagggaatttgagatgtccatgattgaagagttgagcttcttccttggacttcaaatcaagcaactcaaggatgggatgttcgtgagccaaaccaagtacatcaaggatctactcaagaggtttggcttggaggatgcgaagcccatcaagacacctatggcaaccaacggacatctcgaccttgatgagggaggtaaactggtagatttaaagctttatcgttccatgattggtagcttgctttactttaccgtatctaggccggatatcatgtttagtgtttgcatgtgtgcacggtttcaagccgctcctaaggagtgtcacttagtggctgtgaaaaggattctaagatatttaaagcattcctctactattggcttgtggtacccaaaaggtgctaaatttaagcttgttggctattccgattcggattatgccggttgcaaagtggatagaaagagcacatccggtagttgccaaatgcttggtagatcccttgtgtcatggtcatccaagaaacaaaactccgtagccctctctaccgccgaggcggaatatgtttcggcgggtagttgttgtgcccaattgctttggatgaaacaaaccttgttggactatggcatatccttcaccaaaaccctactcctatgtgacaatgatagtgccataaaaatagccaataacccggtccaacattctagaaccaagcatatcgacattcgccatcacttcctaagagaccatgttgccaagtgtgacatagtcattagccacataagaaccgaggaccaactagctgacatctttaccaagcctcttgatgaaacccgcttttgcaagttgaggaatgagttaaatgtcatagatttctctaatgtggtttgagattgtgcactatggttgcttcttttgcattttatatatttgctcctatttgctcttatgctttggacttattgccatttggttcttcattgcgaaaatggagcatgtcacattaagggggagttttggactcttgcatgtgctttacttccttttatatgtgagcaaatcaaccaaaagtgctagtagtgtttttcaaaatgcccaagtcaacataagtcaaaacttttgcaaaatcaatgatatttgaaaactaactctttggaaaatgtttcaaaagggtccctatatgttttccaagcctcacattgctagaaaaatgatttttgaatgaaaaataccattttggctctcttttgaagaatctagattcttgtttttggtcaaaataagattaaaccccaaaatgagtttgagaaggaatctgagaaaagattcaaaacaaagttggtagtgaggaggatttgaaatgtttttggtattcaaatcatattcaaaaaccaaatatttcaaaagttgtttgaaaatcaaattcgtccaaaaacccctatagaccataaaaggccacatcctagcactcaagtgagttttgttgcaaatcttcataaatttcaaatattatgaatggttggcaatatttcaactcacacatttcaaaattgctccaaaaatcaaaattttattgatttttattgagtgggggcagccaactgtgcaagggctgtgcacagtcggctggggggccaggcggtctgactggcgctatatgcgcggtctgactggcctggtagtagcggtctgaccggccactagggcacggtctgaccggcggcaacccggcggtctgaccgaccacgtaaagccggtctgaccagctggggatggtgggcccaggactttgtcctttcttcctcctcctccttctacccgacccctcctcatcccatctcatctcttctcttctccaactcgaaaaaactcctcctctctcctctcccaaaccctagccacctccctccaccaaatccatccggttcaaccgtcaaaatcactccggttacaccgtaagtgaatctcctcctcttcctctctctattccatggattgatttgagttcttattgagtttgtgatccatggcatggaaccctaggtgaaggaagaggtgttcttcgatttgcaccaatagagggtggtttcttggtgtgattcaactccttcaaccggtaaatcactctcactcttgtgcttttctctcaaatcggtctatttcaattctagggttaagggtagtttccccctttgcttcaatctctatgaaatagacctacactttgatgttcatgttccaatcttgtgcaactttgtcctaacaatatttttttagaatcatttgtgtggattgtggaaggattcggttgtgctactgtcagtggcggtctgaccggccgagagcctgcggtctgaccggccgaggaccgtcggtctgaccagccgtaagccgccggtctgaccggcctatggccgtcggtctgaccgacttggggcttgcggtctgaccggccttggctctcggtctgaccgcccctgacagacagcactcccccttctcccacttcactatgtggcttctaaaactgttgtttatccatcctttgctccatgtttttcagctatgcctccccgcactcgccatggtcgtcgtgagcccacgcccgatcccgtcagtgagaatgaggattcaagcggagatgagtatgttcaaagtgatgatgacaatatggaaaatgttgagggtgatgagatggaagtaagtgatgatggtgatgacaatgagagtggaaatggtgaagatgatgaggcaagtgatgataggagtcctctcgattccaccatccaatttgtgcttaatttgaggaatgctcaacaatacactatcctccgtcatcataatcaattccgaaggcctaacgattgtaatgatccaagatttcatacacggttccaaaagtccgtgtatgcacaagtgtatgccaacaaagccttcgccgaacacaagtggatttcttggaagcacattggtgagacaccggagtttgagaatttgcaagagatgttccggaccgttgggattgatagaattgtcaccatgaagcaaccttttgatgaagatctcatccggcaattctatgccaccgtatgggtgtccggcgattgtgatgcaatgaagtggatgtcgaggaccctccgatgctctatcaaccgccgtgaatccaaggagctcttgcacattcgcttcaacaacggggatgaccttcatgatgagcacacccacaaccccttccccattgatcacttttctcagttttatgaagaagggggaaggcacacatatggcaaggtggcgggtttgagggctctcccaagtgtgatcaaccgcatagtaagggccaccatcctcccaagatgcggcaacaatgatgacatacgcggagttgcttggcatgttattgatgccattatggatggtcgtcggtttgatgttatcaaccttatgatgaaggagattgccatctcaaaggggactcttggacaaggaatctattatgctccctacataatgaggttgattcaaagcaagttgggacaaattggtcacaatttaaaagaacataaggagtacaagcctcgtctccaactctcctcccctagagctcctcgtgtgcgccaaccaacattcgatcaaggtgcaagctcaagtgcagcccccccttctcctcaagggtatgatccaagtgcttttttccatctacaatatgcctactttggaatgcaacccaatgacttcttcaacccggtccttggggctattcataccctaagtgaaagcattcaacgcttatccaccgggcatgaagcattgcatgaggatgttcgtggcttgtgcaccgatgttggcaacttgaatacttcggtgggaagattgcatactagggtgggtgtattggattctcgagtccaaaccttggagagtacccaagcttttgtctatcatcgccaccgtgatgcttctcatccttccacttcggcgcgtcctccttctcctccacaagagtgaagacctttttggtgcttgatgccaaaagggggagaatagtgtgttttatgttttgtgggttgggtctagtagtagtgaggttagtcacctcatatttaataggttaaggaggattgggctatatttggtatgggtatgggctattactctatattgtgtgttcctttttcgttttgttgttctctatgtcatttggacccttcgtggtcttgtaatagcctatatttatttgtgagccctttatgtggtcttaatgtgaacttgttctatgatggatggttggtgtgacattgatatatttgtgaccatcttatgctcatggatgaatatttcttgaagttcacattgagatattgctcttgtgtttgtgatatgttgaaatgtgaaattgaattgtgcattggctccatatttgctatttgtgattgttatgcatatgtttagggggagcttttgcttgtcaaaacaatatatgtccatgtgctctatgtttgattatatatatttgtggtgtttgtcatcaattaccaaaaagggggagattgaagcatctaggcccctagtgttaattttggtaattaatgacaagcactaattgtggactaaccgttgtctttgagctatacattttaagttaggtccacgtcatatgtgcgcatggatgattatcgatggattaaaattgacggcgcaaagcaaagggaaagaagacggtaaaactagcgctttaatttagaattgatcgaggtgtagggcgatcaaatttgctagtttaattttagtttcgccgtactattaagaggggtaatgacctagcaaacagatgattttaattgccacattaggtcattgcattttcatttgtgctctctttttcattacacacacattcacttgcaaattcactgggttctgcctgaccaggggcggtcagaccggccacatagtggcggtctgaccggcgtgccctggccggtcagaccggctacatagtggcggtctgaccgatggcactttcccggttagaccggccccctaaaggccgagatggtgctgctcgggatggccgatacagagccaacggagccgtattcggtcagaccgagccgatggcggtctgaccgagccgaggccggtctgaccggccaccccatgccggtctgaccggccagaccgatggggccctctgacagggctacaacggctagttttctagccgttgcagagtagcacggtctgaccggccacatacctccggttagaccggcagagcacagagttgggggatttcgcccccaacggctagttttggtgggtgggagtataaatactcccccaccagcagcaagggggctctcttggcacccaattcaattgcatacaccccttgcacctctctcacactcacttgagctttgtgttcatccatctagtgtgttagagggttgtttagccaagagtcaagtgcatttgcttccattgtagagctagtgtggcacttgatcatctccacaccgggtcattgcttgttactcttggaggttgccgcctcctagacggcttgtggaggagttgcccggtgacctctccgagaagattgtggaggaggcccggcgccggtttgtgagtggtttagagttcaccaccttcggagtgaaggaagaactaccccgagtgatcgaggcttgggtagtcctctccgtgggccggctcccgccttgcccaccccttgacgaagggggcgtgcggtggcttcgtggttgagcggtggagttgggctcgcctcaacggggagtaggaaaccggcgagtttccgaacctcggtgaaaaatctcttgtctcattgtctcttttgattgtcgcatttaaatttgtgcaatttacatttctagagacactttgagatcatatcaccctaggattgcaaaacattgacataggagcgtgatttactttcctagagatataattgagccactatcaccctaggtttgcaaaacataacttagttgcttagttagagttcaccctcaccaagcctagcaacttaagttagatttgattaggtgttatttagttttaaatcgcctattcatcccccctctagtcgacatctcgatcctacagctgcacgcgcccggtgccgcgcagctcgtgcggaaggagctcgggccgccgcttgattgccccgccgcccgatgccgtcctagatcaactgggggagtcgggccgccgccaagctcctcctccacttccgcgcgccggcgctcatcttttttcgccgcggggggggggggggggaggggggaggaggaggctggtgcgccggcgagagccaagccccgtcgcccctccggtcggtgccgtcgccgcttggctgctcagtgcggtgaatgcggtggggaaagaagacaggagagaggggagagaaaaaagtggtaaaagctgatactggtgggacccacaagtagtaacttgcactgtggcacatgtagctaaacattgttcctgatctaggtggtgtgcgaggcttcgcaaatactagtggcgcattatgaatgtcctaaggtatacacgctgcacaattgcacagtacactatactgatggagtatgcaactgtgcacgatgtgagttctgtcccaaaaaaactgcttttggatacaatgcaaaggttagtggattttcagctcacaatatgaaagtcgtcgcatgacttctttttgtaatcgtactaatcgcgcgctttttgtgacggcatggcatagacgcatgtaaacgcatgccttttcgcaaatttgtaaaacgaaacgaaccttttgtcccaactggtgcaaaagcgtgaggaaaacgaaatgattcgtggtgagctacaacacacttcactcgatcgatcgtagtagcaggctactagccgcagcagcagtaggtcatcggacgccacagcgatgatttgcatgattcctcatgttgatccctggcggtggtaagaagagggggaaaaagtgactttttatcgtcaacagcgaaaagcaaaccgctcgcgggaatctcattattggcgtaccatttgttttttaacctttcgaggccaaatacgccatgccttccatccgtcgatctaccggttggagtagtagctgttatattgtgctcacgtttttgctagtgttgtagacgtggccgcgtgcgtgagaaaacgagaccgagaaaatgtggcgtgcgtcgcatggtggagggagggacagagatgtggcacggctcggcgcgtcgcgtttggctggacacgaggacagtacgtacgcctgcgctgacaagtgggggatcaccatgggaaagagaagcgagcaaatggggatagtgtcgtgcattgagagagagagagagagaggcgatcgactgacgacgacgacgcaaggaaaagctacagcgggtagcgagggacgacacgcagcgagcgagcctgcgcaaatgaggaatcatggcttcccccctcgaaaggtcggcatctttcgcgcaaagcagccgcggtcagcagcatcacacactgcagcagcagcagcagcagcagcaggagagaggctgggaagccaagaccaagagagagaaggcaaaaggcgcaaaggggaagaggggagcacgaccaccctcctccgtatcattgccatctactgcccccatcctactactactcctacacccgtctactccactccacaacctcttcttcttcctcctcgcgtgcgtccgggcctagctgtagcacgagctcgcctgcccatctctctctcttcaccgctttgcctttgctggcgttgcgcgttttgccacactcgctgcttcttttttatacttcgggtttgggcgggtgccactggagacattcgtggggtgccattgcggcgtcttctcctctctcaggaggtgagtgggctctgtgctcttggcttgtctctcagctacttgcttcttcttagcattacccattttaagtttttggttgttctaatccggtgatcttgggtgttccctccggcattgccgatgttcttgagactacgatcacacattcatatgcatgggtgagtgatggtcttcgcttcttgtgaaaatgcctcacctgggggaaggagggctggtactagtgctactagaggggtggcgttcctgttcccttgttcgtaggcattcgcctggagttgtgtttgcatttacaagctgcacggcagaggatgattgccaagtggcatttcgtcgagcacgtagctgatatattcgtggtgacatttactagtactagtgctactactctccgcgtagctttctactgctactaatcctagagacatgagctgtgtggcgtaaaaacacaaaagccgcctgctttcttgggaaagggaggtggttttggccgccatggggacccaacacccaagctatagctagccaatgcattttgaacctcccttctccacgaattcctattttattttggctctccactttgactgctgctcacactgcacaccgtatgaaatgatatcctctgcctctgttgcaatggtatgcaggcatttgtgacatttggtcgatggtgaagtgtggctaagctgctcgcttggcttagtactctggaattgaggttttatcagaatcttggcattcagattgcagctgttcttgggtttcttggagacatatggcgtcctcgcaggagaaggccaagacgggtgttctgagaaatgccgcagcgctgctcgacgaaatgcagctcatgggagaaacacagggtgagtgtttcagactttcagtcagattctgctgcttgttgatgcataattgcgcacaaatttgttgcaatttttggcatgatgcgagtagcgtccgttccttcttcaggtgccaagaaggtgatcaactcggagctctggcacgcttgtgccgggccgcttgtgtgcttgccgcagcgggggagcctcgtgtactacttccctcaggggcacagtgaacaggtcaatcttactgtcttttttcacaaattgcagctaatctcgttttgaaatgctgcaaccatagacaacaatttggtcagattgatgctcaataatactttgggattgctattggaatgatcaatgttgaagggatgatgcccttgcaggttgcagcgacaactagaaagattccaaattcccgcattccgaactacccaaacctgccatctcagttgctgtgtcaagttcacaacatcaccttgcatgtgagttcaagcaaattcaattccaaacatatttgtggccaaatgtgttttgcctgtgcttgattgtttgttttgcacaggccgacaaggacactgatgaagtttatgcacagatgacccttcagccagtaaactctgtaagtatgatgtttctctgttacattgtgtactgagttctgtactactttatttggttctattaaaatgtaaacaccaattgttattgaaatgcataaaatgtgattacagaaacaaaaattcagtgtgcaaggaataaaagatggattctaaattaatatttatttgtgccgtctattgtaggaaacggatgtattccctattccaactcttggtgcttataccaaaagcaagcaccccactgaatatttctgcaagaatttaaccgcaagtgatacgagtacacatggtggtttctcggtgccacgaagggctgcagagaagttgttcccacaactggtatagcctttatctacattttgtttgccgcatagtttttctgtaaaaaaatgcttcagctcatgggtttaagttttgtaccgacaggattactcaatgcaacctcctaaccaggagcttattgttcgagatttgcatgataacatgtggacattccgtcacatttatcgtggtagggtcaaacaatattcggattttatttgtcttgttcattgatacataaatatatgcttcttgggccactgtctcctaaaagtttcttcttttcttgtcccttgcaggacagccaaaacgacatcttctaacaactggatggagtctctttgttggggcaaagcgtctaaaagcaggggactctgtcttatttataaggtgaaataagttctataaatacatgcaaagtctgtttgttacttaacctgtgtgtgctatcagaaaattgaatctgagattgttaagccttttgatactaaaccctatgcaacaattcatgcattgaaataccacaagaactgcttatgttatttgctctttcgaaagaatgtccattaccagtattagattttcctacagcggctatctacttaaccttaaccaatatatacatattcaactttctagaatattaaaatctcaacaacaataacttttctatttcttgtcagttctaatgtgaatatgactgttataggacaccgcactttttactcgctcggactgacaacagcttgtatgtaatagtataatattttcttcacaaatatgtgaggatgaaatgccatttttgacagaagttcctgattgcagggatgagaagtcacaacttcttttgggtgttaggcgagccacgcgacaacaaacaatgttgtcatcttctgttctatctactgatagcatgcacattggcgttcttgctgctgcagctcatgccgcatcaagtggtagttcatttactatctactacaatcctaggtacagaaatttacttacccttttacatatgcttttttttttcctggtgagcatttggtcattcatggaatctccataggacaagtccttcgccatttgtaattcctgtagcaaggtacaacaaggcaacatatatgcaaccatcagttggaatgagatttgcgatgatgtttgagacagaggagtcaagcaagcgcaggtttgtccactttttgttctcattttacatagcttttgttttctgtttcagattttatctttatgctatttatttatgtccacaaactagaccttggtgtacaaccgtgtaatggattatgctgctttaaaagtataaataattcaactgtgaattttcatgattcacattggaaaaataatgactacatcaaatgtcgttgcatgggcatacttgcgttctatgttgagtttagcgttttgttgattaagtacagctagaaaacatattccatattgtaaacaaaattgtcttgttttacagatacacaggtacagttgtgggaataagtgactacgaccccatgagatggcccaattctaaatggcgcaacttacaggtgcctttttcatgcaaaagcttaaggaaaactcagaattctgcctatcatggtgtatttgatatttatatacttcttgctactaggtcgaatgggatgaacatgggtatggagaaagacctgagcgtgtgagcatatgggatattgaaactccagaaaacactcttgtgttcccttcgtcgaccttgaattcaaagcggcaatgtcttcctggttatggaggtatgtctctgacatatgctatacaaatatttatggtcgtgcaatatgctgaaacatgccttacccttttgcagtttcagtgcctgggatggaaattggatcagcaaatatgtcatcatttccaagggctcagggtaatccctatggcagtttgcagcacattccagctgttggatcagaattggctatcatgcttctcaaccaatctggtcaaacccttgggagtccccttagttttcaccagtcctcatattctagtattatccaaaatgtgaagcaaaattatatccctcctctaacagttagcacttcagcttgtttgacaaagcaagaaagcctgccttcagatgatgcccagcaccagttccatatggcaaatatgcagaatggtgatcttgaaggctctgaagtccagcctgtcattgattcgatttctgagtcaaagttgaatgctacatcaagagatccaagaaacacagattcatacacaagtcgaagtacttcggagcaaaacagtaagggtgagcctagaggcaagactcgtaggagtaagaagggcttgcctcacaaaaccgtttcagagaaatctgacctttcttcagccccttcttggatctgtgacaatcagcaggttggtttagaatcgaaactggttggttgtgatgaacaagtaaactgtggaaatattgaagattcatcaggtgcacttactcaaggtaattttgttggacagccgcatggccatcaggttgaacaaaagggagtgctgtcgccaccaaaggtagaatcatcaaaatcacctgatggaggaaagtctgtcaattcgtttccaaaccaagggtgtttttcgcagttcattgatggtcttgattggatgactcagccttcctactaccaagactccaatgtaattcaaccagccggtgtgtcagagaacattttcagttcttctgcagatatacctccctcaatgattgctgatactatggagacttttcaggcttcatgtctttctgattgccttcctaattccatacaagaattcatctccagcccagatctgaattcactaacctttctttcacctgacatgcaaaatttggaggtccaactccagcatgatggaagcaatttgccaagcacgtccaactcgtttgtacagatgagtttttctgaagagagtgcaagtcagagtgcaaacttaagtggacttcacatggaatctacacacagaagcataaacaccacttcatgctctcaaccaatgtctactgggggctttgatgcagggatgtactcaaagttgccacgtttaaaagaatcccaaatcttgtctttgccagagattcataccaattccatgggaacatcagcttgcagtatggatgcaaccgagtacagccttgaccgaagtgcgaagccgatgaaaccaccagtgcggacatatacaaaggtttatactacttgactgtttatatgttaccatttgtcaaatgctcttgatagtaaatataacttaacaactatctattatgtttttttttgtaatacataggttcaaaagcaaggatcagttggaagatctatcgatgttacagggtttagaaattaccatgagttgagatctgccatcgcttgcatgtttggtctccaggggaaattggagcatcctggcagttcagagtggaagcttgtatatgtcgactacgaaaatgatgttcttcttgtcggagatgatccatgggagtaagtagacatgtcttcgaattggtgtctcctgttctttctactcctggtcagcatattaattgacactcatacctatgtgcttttgcttctacagggaattcatcaactgtgtccggtgcatccggattttgtcaccttcagaagtacaacagatgagcgagaatggcatgcatgttttgaacgactgtattcaagcagcttagtagtaccattttctggatgaagctctatatcgacatgaaggccacaagagaaatgcacatccgagaagctgtagttctctgaatgcgttgcattactgaatgttaagctgatttgttgacacttgacagtagtgtttgtggtagagacttacaggaaaaaaaaaggctcatcttttgcaagaagaccaggtaggaaagcccaagctgtggaaaatagtgtgcagtgattactcatgctttgatgcatttccaacttccactgtatgttgcgagctatgtcgaatcagaaacttatttggttccttacttcactcagtatacattcagtttgatctctctccatgatgcaatacgaggggaggtagtacagtatacaaacatgagttagattgtagaaccaaaaacaatgattttcaaatttttcaatgtagtattatagaacgacatatatgatctggagaagggtgaggctacaagcaaggtcgcaaggtccgtaggagtaagagcttgtctcacaaaaccatttcagaaaaatctgacatttctactttgagcgaacaatcattgtttgcaacaccccgagtacctaagaccctcatgctacatgtgagcatcaaaggatgatagaacaatagccaaaaaaccagtgcaatcacaaaggagtagtatctactagcgacgatccaaaagaaaccgcttcctggtagaaatcctctcctgcaaacgttccaatcaatccagttgatttcgccacccgcatcttgataagtactcgtagaagacttcaccagacataagttcgtctgcattcaaaatatgtgacccaacgtaaaatttactcattattttgattgctaataagctatatgaataagcatataagtataattgaaacaatgagtccctcactttatgctatatttttccatgcctccagaaaccatacctttagaggccggccacatcaatatcaacactggccttgcaataaaactggatagctgcagcacccatgatttcaagaaaataagcaacagcatgcgcaaccacctttgagtgattttttcagatttttgtgtgacccagcaagagaaacaccacaagtgtggaagcatggaggcacagatggatgaactcggtctttctagtgggctcaaaatcataggcagtgtcaacaagatacttcccagcttggagagctataaagagaccaaaccaaaagagagcaatatacacatcaagctctgactcatctgtaatgtgtttcagcagcttccaggtaattagcacaagtgagccatggaacgcaagaagcaatagtgccagtatacctagccgcatccaacgcttgcgttctttttccctactttcatcactctcagtatggccattgttgatcccattgctgcctctctccctactcctatcgctgttcatgttgttgctcctcctgctgctgctactgctgctgcagctgctgctgccaccgctgttgctgcccctcctcctcctcctcctcctcctgctgctgctgctgctgtctctctcccttgtcctctgtctgaattgcccagcaggtccaagcagcctttccgtgccattttcagtgtcttgagctgtatcccactcccgagccaaattgttcaagccattttccatcctccattcatggcctgatccagtgttgttgctctggccagccagattttgtaattccactatatcaagagttacatcagctctctgcctgtctgtcaccacatttgtgcttgggcctgccagaaaattggagctgagctcaatggtgctccttgacatttcctggtgaggcacttggcctggtggattgaaaggcgggagaggtggagcacggaaagatggcagggatccatcccttgagactgctgctgaaggaggcggcgctgctgcacttgccgtagtggacgaggtctgtgtagaaagccgaaccgtgggcggtgatggaaccattggcggcggcagagcgcgcgagctggcggacgctggtggggagaaggtcggtgaaggcggtgatggaaccattggcggtggcagagcgcgcgagctggcggacgctggtggggagaaggtcggtgaaggagaaaatcctggcaacgacgaactggaacagctcttccataccgtcgacgagctggtcggtgagagctccagaagcggtggtggtgttggtggcgacgaggtggatggagccgagaccttcgtcgagggcggtgacaaggagggcgagcgggccgcccctcgccgccgccgtgtaggagcggacgtggcgtcgcgggtatgcggcggggccgacgaggagcgcgtaccccttccccgccgtgccgaggtagctgctgctggtgaaatcatcgtcggcgacgtgcttgtgatcggcgtggagtggaggaagacgaaggttggcgacgaggagccgtcgcgtggcctcgcaatgttgcggcggcgccgacaaggagagtgtacgccctccccgccgcgccgcggcgggtggggttggtttgctcgcgttcttcgtcggaagggacgaacagtaccccgcagatttgggaggaattggatttgattttggtaagacggtagaaataatggtgagaggtttatgaatttttgggggacacgccggtggcacgggaagtgtgtgcacgcagcaattcctttgcctcgttcccgcttcccgctggctgacagacagctctgtttattgctgtgtgtacgctgtagaagttacaccgttcttgcaacaaatcgaaaaacaaaagatgcatttatgagcagggagtagggaataaacccactaccaccggtatttgttacggaaactactagtacgactagtcctgttcttctgttctgggaggagctaaggcaaaccatggttttctctgtgttctaggagtagttcgcaatagattctctaactagttttgttttgtccattttagattgatgccaaaatatgttctacaattttttttatgatttgaatggtaattgtgatgttttgatttgaaactaaatggttggcattgcccatccctaataatagatagaaatccgtcctctacatccatatacacaaccagacatgagataatcataaacgtttgatataattagtgagcatattttaattttttggacgacccttatctctctcttcttcctcctcctcttcctcctttcaccccttcactggccaactcctctcattcctcttctccacatcgccccccttggcagcttgttgtgtgggaggtactttcacctcctcaccttggtgacgttgctggcgagggatggtagtggtggaggccacccccatcttctccacctttggcttgacgatgctcgactgccatcttcattcccaattcgggcacaaagaagaagagggaggaagtggcggtcaagaaagcgcgttgagctttggtcgaagtgggaggaggaaggaagaggcagcttcctccatgaccgccatcgccggacgacaccaacgtggcaaggctggttagtgtcgtggcagccaccatcgtgatcattccgtcgaacggtgggggaatgacgctccttgtcgatgggtgtcgttgcaccaacaccgaccgccatccctactcgagcccgtgtggcactatgaggaagggagaggggaggggaaacatctaaggaagaaaggtacatagattttaatagttagggattaaaatatctggtattatagttgaaggacgaatcagattggatgtagtagatttgaggagttaagtggactaaggccctacttggttcatgggactaatccattagtccctccattttagtcccttttaatccctaagaattcagacataggtaactaaaagtgtacactctgggactaaaatttattagtccctcttgaaggtacttataggcatagtagaaaaaaccggaacggtagatgactcgatcaccatgctggttcaccagttcgatagtccaaccgtaaaccggctggtagaaccgcggtttactaagtacatataatatatatgtaatatatatattttcagactgtcacatacattcggctggtagtatggctacaggggttggcttaacttatcttacaggggtcgactccccatcggcgcacatttcctttgatttttgctaaaaaaaaacaagcctgcggacatatatggcccaaaacacactaacatcgcattccagagcatgacaaagagctgcaccatgctcagaagcgaagcccgacaacccattgcgcttgcagacagtcttgaagaaccggcggcacaaccaccatggcgaccgtttgtgacagcactggtgcgttggcgtcggccgtaccatggggcctatcagcctatgcccacaacctacccaggccgtgtttagttgagccgatgtcgctgtcgtcgtgaaactctacgtaatcgcggacaatgagaacgaatcactcctccatggctggcgccctctcctccagggctacattcattcttggcattggcggcgcttctacgtagatcaaaccaatcatggttaactgaataactggtggtgaagatttcaatgcacgctcctcattgacggctcatgcatgaatcaaggccacagctcagagatacggtgtgtcccaagagtgtcccgcgtccgacgttgtgagcgatgtggtggtttaatcacattaggaatcgatgtatatatgtctgaaaacacaaaaattaaagctacgtgactggtgggccggggcgtatatcggagatgaagaaagaaaacacaaaatgcggacatcgcacgtggcgaacacgactacggacgaaagcgtgtacgtaacgattgagaaaatccaaatctactttaagtaggttagattagaatagataaatccgaacaaatggcgtttttcatagtttttcatattttatacttacactattacgcatgtgcatcatataatccatcactccgccctcttccactacactattttcgatgcaattgaattttattgtcttcatattgatgaatgaaaatggcgtgcatgtttgtttacaactagatgaaatctcgtgcgttgtatgaaagttttgtataatattagtgaaaataacatgtaaaatagctacatattatagtaatttttttatcgttgatcgactattgaaaaaaaaagctatatatataaaccatttgatgatgtggtctataactatttaaatcatatatgtattgatcgtttaaaaggaaaactaagatgatatgacccaataacagaaggaaaagagaaaataatataaattaatcatcaaagataaaactaaggtgatatgattttataagaaaagaaagaaaaaatgagataatttgggcataaaaccattccataactagaaacaattaagttgatgtgacgtaatgaaagaaagaagtacgtagtagtactgaagatgaactttctaaatttctataggattagagaggcaaacaggaattaaatcagcatatctccatgagtgtaagtcgttatctcggtatatagatcacttttatctcctcgtcgtcaagtcgtgtgcgcatgcatgcatgatcctaatgatcctttctcatggataatgtttcacgaggatttgttcgtttaatccctcccaaaaaaataagagagatttagaaggattaatttcacatctacgtggaattattttttcttaatcccctctataccttttttttttgagattatacgaacaaagacccagatttgagggatgatcgatttttgagatcgatatatagccgtcactcagcaacggtcgtgccccacgggcggcagttgatgctcttcgttgctgaagtcggagatcttggggatggacaagccatactctctgagatggccgacgacgaggtatagccagaataggcactcaaacacaccacaggtgacgaagaaccggcgccacgacacggacatgtggtggtcgagggtcccgatgagcaacaaaaccacccaaaatacgaggaagacagcggtgccgatgactgtcagcttgaattccctgagcttgtgtttgtacctggcgacttggcgacgcacctccgcgtccacgatctcacgcgccgtctcatcctccgccgtatgctcgctccccgggtcctccgaaaccgctctgtttgggccgctgccgccgtttccaaggcagagtaccggaataatctgcgtcttctcggccgccatctccaaactctctgtacttccggacccgccgctcattacgccgacgacgacgagaaacgcgccggagactcgattcgatacagctcgacgacgaacgcgcggcgtagggcgcgaatcgacgaggaggaagaaaaggaccagcgtggtctgggcaaattaagaccgagtcggtgtcggttttggagttctggacgacgtatggttgggctcggctcacattgcaaaggcccattgatctgtgagactgtgacgatcagcagcccttttttttgggaaaagctagataccggtatcccgtccctagcatccacgacggtatcttctttttccttgttcccagagcacgagcacacacatgcagctgcggagcagcgctagcatcgggcatgcgacaacggaggaagaagggagctcactggagaagctccccgctgcctcgcgagcacatcaacagagaagatatgcagtgccgcgggcgacgcgttccggcgtgacggcggagcacgtggccgctggtgacgagttccggcatggggcgttgacgatggaggtgttaacagtgaaatttggtaagccctgagtagtcatcggcttagagtcagcatcggctttgaagtcctgagattagccgatgagagttgtcaagtcgtcagttgtcggattcttactatattcggttaagaaaattgatctactaaaggaagcttatccagaagagaccgagttcaaagagaatgcggcatggcaagttatctattaattaggaatagtttgttagttttcttttatcttgaggaaaatgtgtttagtgtcctataaagactttatcttttccttttatctttagaaaagtttctttcttgtccgacaatgacttgtatcaacccatgggtataaatatgtacaccaggggtctatgtaatctatcgctacaatcaatacaattcggcgcatcgccaccttttaccttttctactttattttatcgtccggcgggacttggcacctgacgcggggctgcatcggtgttcgatctccggctaaggggtaagtccaatgttccgtcggcccaggcaattatatcatttacgtcggcgtcgttcaaggctacatcagtacattcaacctcttgaattgctctggtttggatgatatatttgcctacctatttatcatatgtctctgttaatctagtctttgcatatcaatttagctctatcggctgcttctcgttttagggtttctgccggtatcagctaaatcgcgttgctagattagattagcttagacatctaccaccctgaaaactcagtcaacggcttgattgtctagatattgtgttttttttcatacttagtgttgcatcagttaagtttgatctactaagtcgtgtttagaactataatctctagtctgcttcttgattgccaataagggtttcatcggggtttcagctgatgagttatctagacgttacattggcttgtaaggattgcatatacatacatattggatttagccgatcgtaacaaaggtttcactgtttaatctaatcttgtggatttaatgacatcggacctccagccgatgtatgctttaaccttcggatcagtgcttattctatcatatcattgttagccgattggtttctaccggattatattactatattatattatcatcaaccgattgcctttatatcattatctacattggacatatagccgattgcttaaaccttatcgctattggctggtatcggcatcggctggaatcactccatcggtttgtcagccgatcggctgttttatctgctgtttacatatcttgtcagttgcaagatcaaactgactggcacgcccgcatctcatcaatctttggacctgcacagaagttaagcagatttcccaggccggtgtgttcgattttttcgtcaacaggaggacgcagccaccagtgtggggcgtggcagcggaggcatggccgctggcgacgagctccggtgtggggcgttgacgacggaagacgcgaccgccggcaacttgctccgacgtgggacgtgacggcggaggacgcggccgtcggcgatggcgatgagcccggtgtggggcgtggatgacggaggagcggtcgcaggtgacaagctccattgtggcatggacagtggaggatgtggtcgccgacgacgagctccaacgtgggatgtggacgatgggaccaccagcgatgacactttggtgcccggctcccgatatctcgtaagtatcacctaatacatggtaggaatcgtctgatatctgacaggtatatcacctgatacgtggtaggaatcgctgttaacgaccatatttggaaatgccacgtcatggattcaaagctagagtcaaagccgatttggagaaattccgttcgagaaagcagaatacgcatcggttacaagcagcatcggctaccgcatgaatcggctataggcggtatcagctgccacatatcggctaagtgtcggatccgatggagttaagccgatgcaaccagtctcaggaaagatggtcccacgtccgtcattggaattggtcgaagcacttcatagccattgccacgcaaggattggagtcctaaaaatacaattgtagctattaattaggacatttttcagtttccttagagatatgtttggtaagagtccacctaaaagacttattcgtattttaggttgtgttagagataagaggtgtctagtaaggacacattatgtacttgggtataaatatgacccgacaccatgtaatcaagggatgacagttcaataatacttcagcgcatcgccaccctttttattttcgttgtttcgataagtttttactttcgagttgggctgcatcgggttcgatctccgacgaagaggtaaagctttttatggcggcttgcgttctcgagattagtgcttacatcttcatgacactctaatcctgtctatatgtaaaccaccgagttatcaaatataccgcataatctagattgatctcgtcatctaaacttcatcagctagcctctattatcgaaaacagccagcaggtttaggtttcgatatcaagctagactatgcagtgtatctaccatcttgaatgagttttcatcgatttgattagatattatgtgtcttttcacgcttaatgctgcatcggttaggttcgatctgttaagtactgtcttgaaatattttatctagctctttctttgattgttaatagagatagcatcggagtttcagccgatcttacctgatttagtcatcttgtttccttatttggttctagatcatctaaatctgccccttatatcaagatctcatacgtttaaagtatattaagcttcctatcaatctgctagttcactctgcttgttagattggtttcagttttgtatatttcatctgtgctgatatcttggtataaggtggtatcggaatactagccgatacaagttaggtttgcccaaacctatcggctatgctgtgaacgtacatatccttactttggggctcgtctagatattgagtgatttatactgtctcaatgcagcgaccaatcttatcccaatcacttagtctaaacgtgttccattggacagattatgtatcgttaacatctacagccgatcgagtagacccaacaatctccaagttttatctgcctttgccaatctgacgcaagttacatcggcatggcttcggacgatatgtcatcggcaatccagccgatcggcaatcgttgatggatttaactttgtctttttttatatcttattggttgcaggatcaaaccagctggcatgctcagaacccgaagaaaatctctttgaacctgcactagagttaagtagatctctcgggccagtacgtgtttttcgtgtcaacaatcgcctgataccttataggtatcatctgatacctcgcaagtatcgtctgataccggctaggtattaggacatgatacctcatagttatcaggacctgatacctaaacagtatcatcccgtcccaacaggattccgttgtatagcagcccttctttttttcatgaaggttgttgtcacaccccgaaccggcaccgccgtacaacttatgacagagacaagagataacagaaacttgacataatagtatgatagaattggacctacatatatagaagtatagaacgatctggattttggagtgaccccctcttgtgagggataatcgatctatagccgtcagtcagcaaaggtcgtggcccacggggcggcagctgatgctcttggttgctgaagtcggacatcttggggacggacaagccataatctctgagatggcagatgaccatgaatagccagggtccggacgcaaccatgccagagctgacgtaggtctggcgccacgactcggacatgtggtggtcgagggtcccgacgagcaatagggccacccaaaatgcgaggacgagaacgatgacgatggctgacagcttgaattcccagagcgtctgcttgtacctggcgacttggcgacgctcctccgccgccgccgtatcctcattccccgtgtcctccgaaaccgctctgtttgggccgccgccgccgcttccaaggcagagtgccatatggtcgcccggcgtcttctcggccgccatctcaactcgctgtacttccggacccgccgcttctcaggccttccaaaatcgacgacaacgagaatgccgcgccggggactcgattcgatacacctcgacgacgaatgcgcggcgtagggcgcgaatcgacgaggacgaagaaaaggaccagcgtgtagatggatcggtctgggaccgagtcggttttggagttctggacgacgtatggttgggctcggcccacattgcagaggcccattgatacgtgagactgtgacgatcagcagcgcttttttttttcatgaaggttggttacttgtgaatttgtgtttgacagtataaatccgacacgggtattcttcagttttctgatggttttgaaatttttgaattgtcggcctttctattagagatgggattgtctagtagtgtttgaaaataccaccatgatataatgaggtgatacccacgtttgctttgaaatacatgttaaatctctactattataaaaattgaagatgtttttaccgtattttggtatgtcatccatatttgagtcgggttttaagttcgtttgttttgaaatacagatccatgtctgagttagattttaagcttgttcctgtcggaagtataaacggagtcatataagaaatcttttaaaaaaaactcgtatgctaacttgagatgaaatacgtactcctaataaatatcctaactaaaccataaaacaataataaaattaaaatagcatttatctgttacaatgcacgggtattttttagtattataatataaaagataataatattatattctaaatgatgtcatgtttgaatgaaatttaagatactcttgagtagttattggtacaattcaattttttttgagcgattcgatccgccatgctcgtagtttttgacgaatctaaattgtttggttagactccagctataggaaaggtggattcgagagatggagttctgctaaacagggccttacatgatctttattttctaataattgctagtagatgttaattatatgtaaggtaggagtatatatttattgccatgaacaccaatataaccattggggacgctatatagctaggaagtgactatgattataccggtcatcgataactgagtggtagtaattatggatatccataaaatgtgctgggaaacaatactcgttgatatatttttcactctgctaccaataaccatggttcattttaaaacatagattatgaaaacacgggaataaagaaaacacataaatgaagttatagccccataggtctataggaatatttaatttattatgtttttatttcagtcctattcttttgttgtaacttgtaaagtctactagaatttatttttaaataaataatgaaattccttgatgcaaagaatccgtaagcgaagccacctgatccaaagcggacgctgctatatagcaaaaaccggctcattctctcgagtccgagcagcaaaccaaaaaccaaggctctctcccactcgaccgaaccccctctctctgcttcctctgctcctcggagagccgcagccaaggacgccaagatagggaccgaaacccccgccgccgatggcgacgccgcccgcaagcggcccagcgccggcgacgcgcccgccccagcccccctcgccgacaagcgccaccgccccaaccccccgtcctccggctcccgcgaccgcgaccgccaccaccgccacggccacagccacagccacggccacgcccggccgtccaccgcgggcggcggggagaagaagctgcgggcctcgcacatcctgatcaagcacgagggctcccgccgcaaggcctcgtggcgcgaccccgagggcgtcgccatctccgccaccacccgcgacgacgccgccgacctcgcgcgggccctccgcgagaagatcgtcgccggggagcgcaagttcgaggacgtcgccaccgaggagtccgactgcaactccgccaagcgtgggggtgacctaggtcagtacgccacacgccgctacccatccacccccatgtcaatctgttggtgtgtttctatacagaactatgagatttgctttctgatgagcgtctgattagatgtgcggatggaacttgttatttcgaatcgatctgaattttagattagtactaatgttatacaggcacagaaatttgatttatcaagtacacttcgtgagatctatgtgaaggaggtggtgccgtgttagtttgtattaggacggtcaattttgatgaagctatccccgttttaattatgtgcagtaattgaattttacatgtgacaattgtgctataattcgtgaagacagtcatgttagctcttaatatgagacaattactatcagtgtaccatcgcttcagcgtgataaagtatgaacatcactgccagattctcagttttgattggtgacctagtccacttaataagagtcttaagaatcatgcgctgatgcagttttgtttgcgccacccttatctagtatccgttgtgttttccatatcgaactgtcctttttgatggaattggggctctagtaactgctattatggcggggatcattaatttcttttcttgttatgaacatgtcatgtccttatggtccgcctttgggtatgggccgagagggccaaggcccaacaggaacggtatacgtagctcatttggngttggttagagagtctagggttagaagttcccctctatctatatataaagggttaggaagttcccctctatataaaggggatggttccccaggttagggtaggaattagattgaattatctcttcgtgcccaccgaccctgtctcctcggcgctgtatatcttattctttaggaaaaaggaaaaatgttactccgcaggcggaaaccatggtcatggtgaccaacttggaatgtgtgacagcagtcaattccttcatttttcttctttctatgaataccttgtaaaataatcacctgtattttactctgccatttgttgataagatggacagttttgcggaacatggcataatttgctatatgtagttatgtacatgaggcaaacacattcggggcatgagacacagcacaatacactattacagatatagcggtgtgctattgctttttttttttctcaaaaggattttctcagcatgtgatggctggctatattgatcttttgtggatatttgcattcagaccatttccatccctgggactattaagcactattatgagcatgcacatgagggactaagatcacaaaaacaacgcacgatacactagtaatgaattttcttgcaggtctattgttccctgtgcgggaaattattacctgcccaaatcggaataaccacttgtgacatcacaattaagttggaatatcttgggctgggtggtctcccctattatgtcgctgccataatgaaatgatgcttttggagacggttattctggcagatgcgttagcatttggcacagtatctgacagggaacatatgagttgtaattgaggtctcatggtttgctagtgtgattactatgaagtagtgagaaggagacggcaataggtgtaagctgacagaaaattttgatattgtccctttttttcagatgtctcctatttatctgttctttctattccacatatatgattaatatgtttgcaaattatttggtactgtttatcttggtgttagtaattttttggtgcgaaaaaggagaagaaattgcaggggagcaaagtgccacatgctattgtggcaactaacttggttcttctcacaaggaattcatgtccatgattctatttctactgatgattcttgatttcacacttctcttactagccgagacctcataattaagagtgatcttactttcgcagtttatggctgcaggtccatttgaaagaggcaagatgcagaaggcttttgagaaggcagttcttgctctgaaagttggggagataagtgatgtggttgatacagacagtggggtgcatatcatactgaggactgcctgattacggcggcagtacgggccttctcaatctctcattctctatacactccgtcgctgtctgcaactctgcatatcatattgaggctgtttgggggcagaagtatgggccttgtcaatctgtatacactggggaaattggatgttggttattgcttcgttacaaacctgtgcatgtactctcgatctgcgaaaagtttatgttttactcttacattttgctggagacatttgctctggaatgatgctcaagacaacctatgaatattgattgttacaacatgtttggaattagctgaactgagcaggaagttatcgatgcattcctgcttacattcttgtttttgggtcgaaatgcgagctcagtcagatgatgaattttaaaaaatttctacacaaatccagctgtttggtagagtttgccactttcgaatgaaattcgaacgaaatcgtgaatctgacaggcgtacgagtgctccagcgtacaggaggcagctgccgattggatcccgcaaacctcgcgccttttccgcgattcagccacgtacacgcaccgtccccttcctgggctcctcttcgtcttgctgctgcagctttccttcttctccaccccctcggatctccaggagtcgatcgattctcttctccttctcccccaactctccaccttccacacccttcggcgacacgccgacgcagacagccaccgcacgcggcggcgacgacagcaacaccggccaccatgggcgcgtccacctccaccagcaacccgtcactggaggcgcaggagcaggagaccctcgcgtcggcctccctcgccctcccgcttctccgcgccgccttctcccgctcgaacggttcgctggcggaggcgctgtccccgccgcccgccgccttccgatccgactcgccgccggtgcccccgcgcttccacgacctcgtcgcccgcctcggccccgccatcgcctctctcttcttctccgacgtcggccccgcgggggacgcggccggctggctcgggttcctcaggggattcaaccgctgctgcgcgcgcgttccggcgtcgcagtcgctggcgctgctcctccgcgtgtacgccgcggcctgcgccgacgcgggtgctccctgcggccttcagttccacccggacgaggacggcgccggtggcgaggggaaggtcgtgggggagctggcgccgggggagatcgccgtgttgctctggatgtgctgggtcatggcgtggagcggttcggctcccggggtttcgggtggtcaggagggaggcggcaagggggaacccgtgttgctcccggacgtgacgcacctggtgctgtcggcgctcgtgtcggcgggcgccgtcgcggatgacgctggtgtttggggatgggaggtttcccgtggtgggaagggggtgaaggtccaggagttcacgtcttgggtgctgtccacggctgctgggcttggcaactgcctctcgcggtatgtgcaggaaaggttccggtcgtgcgcagctgatccagtagaggtaagcaagctgcattgcagagtcagtaatttactgtgaaaggttagctgcattgcctttgttttgcatagaacatggattttgagaaccagacatattgcatacttcagataagtgcaaaatggtgggggatcttcaattgatgtgattttgccatgttttcattagttatgctgtactccctctatttactttttcaatttaacgtcctcattaaaaaatgatggaagggatattaatcttaggtgttctttagtagattcatatttgatgacacattgtcagttgtgggagaactaaattatgtagtcagattctgtttattcccagtatgcaaattataagaaaaattctgggatgcttagattcaaaatgagtaaatgactggtaagaagacaaggatgcttagagtcaaaatgaataaatgactgctaagaaaacatgccatttcttctttatatctgatagttcagggtgactaaagaatcctactgaggatgtccaggcataatggtgtttggttagtaaattgctctggtgtttctgatgtggctgggtctttactgtaacaaaaagataaataagtcacaaaaacttttggtttgcacttggttttagtagtttggagctcctttctgtgatgatcattgttttgctacaatgatgaagctttatttattttacccattttattggaggaaccaattagatggcatattaatgatcattaagcttcaaccaaatgtttgatcttagacgttgattcttacacgcaggaacgttctgtttcaactggtaacacgtcatcttgtaaccctgacgtatatttgttaacacgtgggagggcatgggcaatctctctcagcctcagaaacacattgagtgaaaagtttttatcagcatctgtcattggaatggatacagaagaccttctttataggttactccttgttctaaacatctggtgacattttactcgttcttatgtttttttaatgtttctattgaaggccgtaaacttctaaactgtaatcaataccagatcaattcctattatggtttttcattacattttggtaacttttagcctttactgaatacatctctgcaggtcgtcagttcatggaaaagggctgagccggttttggtcttgtgttgagggatataaaggaccagtgctaattttactctcagctttctctcgtagtggtggtgacaatgttgatactgatcaaagatggggcattggtatattaaccgaggagggtttacagaacaaagacaccttctatggtagctctgcttccctgtgctccacatatccaatattccgcatgctcccaccatctggtatgacttgtgctggtcatttcctttttaccacagctgatagtagcttacggccttactgtgcctctgacctagcaggtaaggagaagaatttcatatattgccacctacatcctcagataagggtgtacgaggcaaagccaaagcctgttggtttaggatttggtggaacgattggaaatgagagaatctttttagatgaggacttctctaaacttacagttcgccatcatgctgttgataagacttaccaacatggctccctcattcccaaccaggtgaatttttgcatgtactagtcattacaaattataacctgattgtgctgtgaagttttttaggtaggaaatctgaatctgttttgttcctgaaatacagtttgtcaattagttggtagcagaagcagaatgggttttcaaaatgtcgttgtagtgccaagggaagtaataagattgaggcaatggatgatttttcagttgagtagtactgacactaagctaaaaagaattcacaaattagaaactgcatcctgtttataatttacataaattacgaacaacactggtagccatgtaaactgccttttaggtttcattttaatagggcacaagaacactttgccactttccttcccttgtaaggtctggaatgaattgtagtagcagtatgtgttgtgaaacaaagaattcatgaactgatatcatctgacctcgcttcagacaaatcctggccttcgattaaatgctagcaaaacatattactctacactctgtttcttttcatgtagggttatttacctgttgaggcttcagtacttgatgttgaagtatggggccttggtggagaagcaacgagacggcaacaggatatgtacaagaagagggaggatattttctcagagcagcgaagaaaagtactaatcaaagcacctaaatcttttaactactaactatgctagtactgttaaacgtgtgacagaaattttaatgactgtcccctatttttgttttcaggttgatctcaaaacatttggcaattgggaggactctccagagaaaatgatgatggacatgatttctgatccaaatgcagttcgacgggaggaccgttgaatacaattttggactatatgtttattatagctcattatctaaaaaatgtttattatagctgccttagtgccagtacatatctggacatgggaaatggacgatcttgaggtttcatctttcttgtaccttggagatatatagaggagtaggtgcacatatttgctccatttgatgtttgggccatttgactgggcaacacgtcatgtaagtattgaattgaaaagagtcttgtatacagaatatcggtctacaacggcatagagcttcctttctcatgctccccttgttttatgggaatcgatagcaaacaaatttgtatctgtattgtaaattgtagattattcccgtgtccagactatcacacagacatggtaatttccgattatctcacatcggtttgcaaacggcctggtttctcgttaatgtctgacggttcccttggccgattcatcccggctcctgcagtatcataggctcacgttatcagtatctgttaaaccaaactacattttctcgagttctgtacatatgctgaaaggtgctccctccgtggcttcatccaatttttttttatttctagctacaaaactggacaaacattgagttcatagttagaattgaatttttggaccaagaatgtagctggtaataatataaaaaagctgagtttgccggcttataacttctaatttattttctaaattttgtaggtgcttgttttcaaaaactaggtaaaaatttaaatcgtttatgactcaaacagtgcataggtttggcccgtgtctgttccaagagagaacaaggatacctttgcagccatgattgggtagaaagaacacacacacagttacacatagtacgatggacgtgacgagacagtacgagataaacacacacagagcgggagctagcggtagaccatatgcctgctactagtagcaaaagtacgtgcaggctgctgctgctgcccttccccgggttgtgctgttcatttcacaaactctggtgcaaccactggcctgatcgatgatcgatcgatcggatagtacaaaaaatgtactaggcatgcatgttcagtttcaccgaccaattgcccatcaactaccgcggcggcaacaaattctctgcccgaccatgatttgcccggagactcaccaccccacgccatgttggtggctgctactccctcctgtggtcctgcctgtcggctccttaatctcgagagcacacattccattttccaccttgggcagacatgtcccttcaacttcaacttgtccgtgctcgcttccactgtagtgcattcattttgcacaccaaaagttcctagtgagcaaccaattcagatcctatatggtggagtattacaatttacacatgtagcatttctcaccgacatgtgagcccgaggatctatgcacccacgtgttagtgagcagtactacagcagaggaccctcacttagaagaaccacattttttctagtgtacctagatatgtttttcaaatattatctttatcctaaaataattattgtttaaaaataattatcattttatactaatttggtataaagattaaggttttaaaaatataaccataggatatactatattgaataatgtactccatcactatttactcctactaaacaacatattaatctttatattttgcaatagtgggagtatttttatcatgatcatggatcgtacagtttggatccaaaaactttttttttaagtacgtgtctctcgcctcgccttctctcttatatcctcggtaaaaaaatattaaattctatctataaatctggataatcatttatctaaatttattgctagaatctttttttaacgaaaagagtatccaactagacattaatatgagatgtggagatcactatctcctattgacaggtttattgtatctgcccctcgtttctccaccactccgacgttgccctaccctggctagctctgatcaccatgccgccattccattcatgctactcgtactcccagctgctgccgatggcaaccaagggtggcgccttctccgacctccatgctactgtagctagcaattggcaatgtagcatgctgcaagcttctgctggctgctgctgcgtgtgtgagataagtactagcttctgctgcctgtgtgagataagtactagctagcagtagtgatctctatagagagagcagctgaatctttttcagattacactgaaaggtagacgtacgagctgtggtatagagagcagctgaatctttttcagattacactgaaaggtagacgtacgagctgtgaatagacgtacaatgtacagtactctcctactactactactacgatggctaccaccagcttatcctactacttctacactgtaaaagcagaaaagaaatgatacgacacgaagtaaataaagatggatctatgggtcgatggacaggcggcggcagcagcgcaacgcagtggactgaaaaccggctgctagtagcccccttccaacgctacagtagcttttcttcagtgatagctagcctcgggaacgtatgcttgcatgaatacgatcgccatacgccttggacaagagcatgcatgattggctcactgaatataaacacaaactccgatcgatcctgtacaaactcgcgacactgttttgtttacggttgattcgataggtgcttttctctgcctgtcttctggtcgagttattccactcccctttctgcaatcctcacaaagtttgatttgttttccccagctgatctcttccttttcttttttaatatactacctccatcctgaaataaattaatttttcacccatacatatcaatatacgaaggaaaaaactgaaatatccttcactttatcaaatatttgctactaagtttttaggaacaaataaattgaagaaagaagtaattttggtatgaagaaaatagttactactcagtaatgtacaccaaatacggttggaatttcatatagacaagccaatgcagcaagtagccatgaatgtgtgtttggatacatgcaatatgacggtattgtattttgttttcgttgcatatttcatttatttcttcgagtaaattggaaccatgccattataattttcccttcttcattaggagtatagctgatagcaagagtagcaagcagaagattcttgtagccatgtgtttatgcagccgaacggctacgctgtacagcacagcttaaaacgctgtaacaaaggtctaccgaacaggtcccatgattacatgagtatattagtttctttgattaaattaagtggagttattttgagacggagttagcataacatttctttgaacacacccgaaacttgttaccctctactccctgtgtatcagtttggatagttcctatgagtataaccacgggatccccgtgaaacttcagttaaccgtagcttcagccctggtactgatagcaggagcagctagccggagtagctagagctttcatactgcctttcttcagtcaccgtttgcctgtcttccagtttccatgtggtgccacagagatgttgtccactcctctccctatcatgcaaaacaagaagcacttgatggctgaactgaagttatacacaagctctcttgcagttgcagctcacaacacattcaattcgcacacctctctcaatctctctctctctctctctcatgtagagagagagagaaggctgcaggagggcatgcagaacagagcaggcccttaataggaagaacctaagttccttagggacagataggtacaggggaggaaagggggaagagagagacaagtttctatagggcaatcatgctcctctttctgatcactgcaagaagagaagaggagaggagatcaccgagaagatatcacaaggtgtccatccgggcacagccatggatgcatgtgttgttctgtgtccttctgttggaaagcaagaaccagcgtgccctttgtctctctagctgcttgctgcttgaattgccatggacacaaaattgcaccattgatatggagtgaaaagggctatgagatgagatgggatcagggagtaggttcttctcttgactgactcggcgtttcccattctgtagagattcgtcatactcctccatggtgaaccaaccggttgatcgatctctcatctctcctcatgtgatctgctgcactgcacaacaggggccggggttcagttcaagtcaagagttatggcgaggtagctggctggaattgctgctagctagtatactagggttcatgcatgcattcttgtgaactgtggcggtcactatgtgaactgtagcggtcactgtgccggggcggcgcgtgccgtggacatgcttgtatgaggctgtgttgagatacagacattggatccaaacttcggttcttttccatcacatcaacctttcatacatacataacttttcagtcacatcatttctaattttaaccaaaatctaaactttgcgctgaactaaacacagcctgagtataggcacgaataaattgtaggaggttccaataatcaaataaaaccgtgaatgcaaattaaaagaatggatacattttcccctttatgctcccgtcaattgatcacttgccacacgttcacagagtgagtataatatgtaaactgttaccccactcaattgaattgatattgaattagaagagagagaagagatcacaaagccggatgcagcacaaggtacaacagacgttacaagataaagagatatgccgtactaaaggttgttgtggaatgagcggaaccctagggttttctattcctcgctctcgccggtgttagtggttctcaaatccatcctgcaggaaggccggctctggtcatcggcgggtaccgctttgtttgggggcctactaggagcttagtggggttccctccaccacaatctccctctatatgggagcagcttctctcttgtagtttaatctcagtagtcttttagtttttcacttatttttcatgtcccccggcgatgacctttttggttgttgcgttgtgtacttgaaactctgcttttttctaatatattgatgtgcaatctatttgtaataggatgtgtcacatccacctaaaatcccttatattatgggacggagggagtatttagcatggttgcattcccaacacacactttcataagagagtttttttagttaaaatatttgtaatattcaatatggaagcttgagttcacaattgaaaagtttcatgtgatctaaggcattgtttagttcccttcaaacttctaaaaattacgtcacatcaaatatttggacacatgcatagagtattaaatgtggacgaaaaaaaatcaattacacagtttgcatgtaaattgcgagatgaatcttttgagcataattacgccatgatttgacaatgtgatgctacagtaaacattgctaatgacaaattaattaggcttaataaattcgtcttgcagtttataggcggagtatgtaatttgttttgttattagtctatgtttaatacttcaaaatatgtgtccgtatacttaaaaaaaaatttggcacacgaactaacacagcctaacttgaaagctttggttgaaacttgaaagtgctaaagtgtgtgctggcaattcgtctgcacgtactaaattgcaattctcttgttatagctaggagtatggttataccagcaaacataatttagccttttgatgaggagcacctatatatagtaccacattccgagtacctttaggataatctatattgaaaatatcctaatactagtattatcagtactagtaaaaaatcttaattgttgatttatgagttttacaaataaaagataaaatattttacagcaattaagtggtaatagtataaatagatactacaatccataatacgatcaattaaaattaattatactactaatcataaagatcattgtaaaacatctccagttcggctgtatttaaatccaaagtttggatcaaacttcagtctttttccatcacatcaatctgtcatacacacaacttacatcatctctaattttaactaaaatccaaactttgcgctgaactaaacacagccttcatatacatcgaccacactgaagttcatcaaaaccgtacgttcgtcaaatttaagaaacataaaacagaggatatatgcaccactgcatgtaaggcaattgcacagaaaaccttgtgctagctggatcgtatgctacagtagactgcgtaggatgcattggtactgaaaaaaagttttgttcagaatgcatgcaaccgcgcgcctaccagcagtctattgtgtccatgaaccaatcatgacagaatatcctcgcgttcccgagggagaaaaatcgaactgaatgaagctagagtttacacgaaattcgaataaaataatccaaatgaactaggagtatatgtgcattcatatgtgtatttggtttccttctaatatactccatccgttttataatagtcataataaaaaaaaattagatgtatatgacacatccatccaaaatctcttatattatgagatagagggagtaacaccacgtaaatccatcttatgtcgttacaaacacccttttattcttataagtagttaaaataaaacccgtattttaaaagttttagagggtgtctcgtaaagacctgtttttgcgtgtggttgtgatgtcgcgcgcgcctaaaaattgtttcaactgtttacagatatttggggatagacggttgctacatccatatatgaaaaatacattttagctgtttgcaaagactttctgtagtaatgtgagagttcaaaaaagaatatgggtatttggtacatggagtatagaagtcagctaaacctctatctttctttcccctgcgtaccaggctaccagtagcttacatttcttctttgtaatttctctcatcaaaatgcaaggttgaaaaggctatatacctactagctaatagtatctctcaagatcaaaacattgtcgaatcacggatcaaaataacgtcagatttcaccattcaaacgcagtactgaggctatgtttagatgctaccctaaaatttttcatcatattatatcaaacgtttgaacacctgtatgaagtattaaatacatgctaaaaaataactaattgcacatattgcgactaatttgcgagacgaatcttttaagcttaatgacggattaattaggcttaataaattcatctcacggtttactgatggattccgtaattttttttgttattagactatgtttaatactttaaatgtgtattcgtatatccgattttcgatgtgacacggtaacaaattttacccttggatctaaacacagctataaagcaccggacgaactggattattttccctgtcaatctgatcgacacacacctctcataacgtaacattattcacagagaactgaaaacacaggcaagtttgaagaagcaacatggtaccaactctcacatcacaaccacaaaccatgccaccaccatggttgcctccaaatacagctcaatgaaagcatcaacatgcatgctctctctctctctctctctgtgtatgatgagagagaaggcttgcagcttagctaaggatcggagaggagaggagaggaggaagaagcgattgccataaggaggcgcctgcatggtagtacgcccccttgcgtagtccccacatgcctctcttccttctcctacctcgtgtgtcaacttcacttgtccatctccaaaagatatccatgattctccctcagagcgccccaacctatatcaccccccctaccttccatagctccccttccctagctaccttcactccatccttctctcctccttataaaccctcatgtccctcctccacccagtccaaggccacaagccctttcttcctcttcatcttgatcttgatcctcttcttgatcttctacttcttcttcttggtttcacttggcatccgtttccatggatcacatgcagcagcagcagcggcagcaggtgggtggagggggaggagaggaggtggcggggaggggtggtgtgccggtgtgccggccgagcgggacgaggtggacgccgacgacggagcagatcaagatcctgcgggagctgtactacagctgcggcatcaggtcgcccaactcggagcagatccagcggatcgccgccatgctgcgccagtacggccgcatcgagggcaagaacgtcttctactggttccagaaccacaaggcccgcgagcgccagaagaagcgcctcaccacgctcgacgtcaccaccaccaccgccgccgccgccgacgccgacgccagccacctcgccgtcctctccctctcgcctacagcagctggtacgttgctgcgtcatggctaattccgatcgctgcttccctgctaagctgtaatgcgcgagccggcgccgagccgccgatcgatgcttctgcgtgtgcaggcgcgacggctccctctttcccgggcttctacgtcggcaatggcggcgccgtgcagacggatcaggccaacgtcgtcaactgggactgcaccgccatggcagccgagaaaaccttcctgcaggtatgatcacacgtactactacctcctccaggtgtgtgtgaattcaccatgcaagagcaagctaatgtgcaatgctgcaggactacatgggcgtgagcggcggcggcggcgccgccgcggcggccccgacgccgtgggcgatgacgacgacgactcgcgagcccgagacgcttccactcttcccagtcggcggcggcggcggcgacggcgcgcatcgtcacgccggccacggcggtttcccgtccaacttccagcgctggggttctgctgctgctaccaccaacaccattacggtccagcagcatttgcagcagcacaacttttacagcagcagcagcagccagctgcacagccaggatgggccggcagcaggcacatccctggagctcactctcagctcctactactgctcatgctcaccttaccctgcagggtccatgtgatagagctgttttgccttcatgccatgatgccaactgcttgatgagaagaacagtgtgagtgtttctgattgagagagcaatggtgtccatgtcctagctactagagagcttagctagaaggaagcatatatagaagcatgtctgaaagatactatatttatatagctagggagtatgcagcattataacatgcatgctgcctgtagaatgcagtggtcctcaactggtagtgcactgcatgctaagttgctactactaactacactagtggctggctggttgtgatgtgtttgggcacagttgtgtcaaacttgtctctccctttgatggcttccagctgaaggaaaaaagttatctatatctctctgtctgtctgctgtttactactgcctggttgctcatgctcatcacctgttgagatttttctcattccttttttcagcaggagtataattttcgctttttgtactgccagtttcttgtttcagaattccatgtatagtagcaagcctgggaccactttggttgaacttgaattgttggctagtgttaggaaatggtcagcctttccagtgtgatcatcacatttacttctgcagtgttggaaatgctctcgcctgctcacgtacacacattctcgctttatgcctttttcatatctgatgatcagacaaagcatatcgtcgcaatagctgttagcacagtgaagaaatgcaagtttttcttcgatagagatattaagagaaaacttatatatatattttttgttcgatagagatattgtactatatactatgaccctatgagctgcgattataaaaaatgaaaatgatcctgaacatttcagagctttctgaaacaaacaaacaaaaagtatagtaggagttcactcatagattaattacttacaaagcctaagaagcattcacaacctaattacttgaactgagagcatcatttttaagatcaaacatagctgaggaattggttccataatattaccccctcaaaagatagtacaagtgaaagatgtattaccacgcctaagtcctaactactgaaaacttacatgactgaaagtagctacaatataagaacatatgaaacgcttgcacgatctgctcttggttctaaaaaaaaaagatattacagctcttttccagctgagattatcgaagaatttcagaacaatggtttcatgctacatgcttccctcatgtcaatagaactgaaggttggccacctctttgtctctgatgtgaccatgctgctccccaacaccagctcaaataaacaagatgggatcacattttcctatgaagaccatggaaaaagcggtgttttcttcttcttgagtgctttcgatataccctggacataacgtgcggcgagaaataaacctagattgacagaacatagagatgaagtcaaacagatgtgtgcagtatcctcaactgtgcacactttgtaagtaatataataagtattactagtaagtaatatcctcaaacagatgtgtgccatgtaggttaaactgtgtcatatcatcaaataagacaggcgctcaaattttgtactagaatgcaaaaagaaaagagaaacagaaaataaaggatataactcccaacaagcatatgtgattaaaaacatttaacagaaaattgacgaacattatggttaattaaagcggatatactctggtattcttcaataaaagaactaccttggagttattacaaatgccattagacgaaagcacggaattgtcatctatcaacttctcattttgatgtgtcagacagtagttatcccaaatatgcttcctggaacaaagagaactaatattacagagggcatacataacaataaaaatgcataaatcagatttcagatgttcacaatatccttaacggtgggagatatcgacaaacaacatgtccgtgcatttcagttactatgtgtagggaacagatggaaacatggagtttgcggaacggattcagatgaattatgaaacaaagagatcgatgaacatctagctcacatataacgtattctgtgggctgtggctcaaacctgaagcaaacaaagagtcagcctattcaggataacgtataactcttatatcagctattctgtgggctgtggctcaaacctgaagctaagtttctggctaaggctgtgttagcatcagggagacagaatctcaaactagttctatggctacaatttcaacacaacatgttatttcgttgcttcctttaaaataaaacgcattattttgttgtcactagtcatctggtaatgcaaatgctctggttgtacagaagtaacaaaagttactccttccataatttatagtttagcttaacaaacagccatacttgattccagggattgaacttacccccagcatgtcaggcaccatatatgcaaatttagtggtagtagtgttgggatctctttccagtgatcactacttgctaggtaaaagaaatgcacaagcataatcagcagagaagtgtgatccttgacagggtaggacaacaggactgaagcttcctaaaattaaggaaatatgattatacctgtgaagggatctgatagttcttgaaaaaaagccataaagaaaaatagaaacctagaaggatcagcacgatcatgattataatttacttagtttcaactgacaagtaataagatatggaggacctgtctataacctcaactaaatgggcttcactcattatgcatacagattcaggcctacaaaagttgagctcaccaatttgctgtaagatcaactcaaaatcaaaacaaatttcagcttgggttcatatggggtttgagctaagctgcaaccctacaaggctgcaactcaaatcaatctcatatatcctgtgactctcactctttcagcatatataccccatgacatccttatgcacaatacctctggattgatcaatacgttgctctagtctcccttgtaggagatgctagacagcgaaattacattgcaaatgtttcaaagatcatttagtgatcaggacaaataaggttaccatgagtgaaagtaaatggtattcatcgcaggatatcatccaccgtagaaaggagaaacaatttgcaatcatcacattgtttaaagagatgtgggctttaccatgagatatgacgatggcccatcttttcctgttcaatctcatccgtcttcttcctgatagccatcttcaaatccttgacagtggctgtgttcaacattgcaacatctttcacacacacaaagaagacattaaaacgtcatacgatttatgcaatctactagtagatgcaaattaaccaaacaggcagtgaaatgtggcattcgaagggaccagtaccgaaggaggtgccatccagcttgacgacggttagccgcatggcgctgccgagctcgaggttgatcagcgtgtcgacgtcggcgagggagggcttcctgggcacgtcggcgagtatggggtcgtcgaggagggcggcgagcatggactgtagcttcgcctgcttggcctcgctgctctggtaagccgcaacctcctccggcttcgtagagaccgaatccgtcgcctcctcctccgccgcagagaacgatttcccggggtccattgcgtttccgccgccgccgccgccgccgtggaggacgaactctcgccggccagtgctagttgggccacgagcgtgtggcccattgtaattaattgggccgtagcgttattcctgcggctgcgcgttccagccgttggattggattcttgagcaatctggacggagatcctctcgtttgatctgtctctcttccgctccaaatcccccaaacccttcgtctccgccgccgccggaatcgggcctcgccatcggagtggcggcgaggagttgaaggccaccgaccgccggcttcgaccacgccgcctcgtcctcgtcggatccgcgaccagaacgccgccacctcgtcgtcggttccttcgcgcagatcgccgccgcgtctcatactcttcggtatagcaagcaagctctcaacgcctctttttttgggttccctaatctcaatctgctgcttggattgctgaattagtgaataatgctgggcttcgatggtggattttctgtcggttgtcggctacggggctgatccagccccgttgccatccccggggagggacgcgccgagtagagcagcttgcgaagtggttgcggccttgcggggagggacaccgagcagagcgttcttgcttgctggttgggctgccaatctctggctatccgtgatctttgatccatgagattctgttgctattccttcacatggaggtttgtgttgtactttgggcgaattcggatggatgttggattaggcagggttttagagagcttgggttaagaatcctgcttactgatgcacaatagaattaaggtggggattagaatttgctaagctgaaggtttgagatcagggggccagcactgctccttggttagcttgttaatttgatgatgaactactagtgatcctgtagcatgcatctctgttttgctctgtatactcttgttagtgtgattgcaaggtggttttcttttgctactgggcagtgtactgttgattcaaaccaactcatgttcaggccacctttagctgctaccccgttgtttaagtcatcccctcctcatgtccaggttgctcccagtccgcagccacctcttcctcctcactgcattgtgttccctaggtgaccttaggccttccttgctgctacctccacctgtctctgatcccgagtcctgaccacccccttcctccttgcattgccatgacactcttttgagatcattggctgcatgtacatttctgtctttggctttggtgcagcttatcagtaaattcgcatgccaaacttggtggttgcatattgcagcactagagtcgatggaatgacctggtgacagtatggttaactatattttaaggtctaacaaaacggagtggtcctatatctagcagtttctttcagttagtaacccatttgttcaaccatgagtatttattgttttagaaattgttctgttgatgtgcctgttaagttcttcactggaaagtctgtaatcagcattgcttctcttacacatactatgcccaaagatcatagagttgttcgaccaacagctgaatagtatacaaatggatttttttttctgcttgttttttctgttagtgatggaccagcattgcttgtttctgatatatatttgcattctgctatggttccacaggttagcattcgacagccatggcaaagcatcatcctgatctcatcatgtgcaggaagcagcctggcattgctattggtcgtttgtgcgagaaatgtgatggcaagtgtgtcatctgtgactcgtatgtgcgcccatgtacgcttgtccgagtctgtgatgagtgcaactatggttccttccaggggaggtgtgtcatctgtgggggggtcggcatctcagatgcctactactgcaaggagtgcactcagcaggaaaaggaccgagatggatgtcccaagattgtcaatcttggaagcgccaagaccgatctcttctatgaacgaaagaagtatggttttaagaagagatgatcaggaagttggatttgtctggtccatttcctcgctgtgttttcagtcgcactgatatggttgttaaggacttaaggcggacatctttgtattctatggaatatggtctagattcttaaggctgcatgtgcagtacgtacctgatgttaatgaccatgattgttgacatgagatgtgaaccgagatacttttaagtcttataattatgtaagccactgattgtagggaataagtgaatgctttagctgttcgaacgacctgatatggttatcaactgggaagcaatgatacttatctaggagctgagatgcagctgaggttaggatacaggttgttgaagtcaggataaatgttgttgaagtcaggatacaggttgctaggaataccaacctaactcaaaatatatccttcagtcattatcctcgttggatggatgacagagttcttatctgaaacgtctcctgaaacactgatctaatccattttaaaacaacacgacgagacggtcaccagagtccatgattgagttcaagaacgaaaccgtcaggcacatgacctgcctccgtcacggacaagggtaacatggtaaacacgcaaagcgttgcctagaagatccggagaagtttttttttaaaagaataaaccgctaaactaagcagcccaaaatagcgcggaaagagagcagaaattacaaaaaaaaaaaagagagagagaaaagaaaagcaaatcgacgcgaagaaataagggcaaagccgccgacgcgagagccagcccatccgcctcaccacctcccgtccctcttccgctccaaatccaaccctcccctcggccgctccgcttgcgccgccgccgccgccaccggagcgacggcgagggagggagtggggagaagcaggaggaaaccccaaaccgtcccgatctcggggtcgggaacccgccgccggcttttccgctcgttcgtccgtccgtcgatcgcccgccccaccctatctagggtttcccgcgctgtagatcggatcggttcggattggttgcttgggtttggagagtaatgatggggtcgaggcgatccaggcgcgtttcatgggcctccggaggcaatctctgcaaggtactgtgataaaaacttgccaccgccacggcgaggagacggattcgcttatcctgtatctcccagttttgttgcggagatttgcatcgtctccgtgcagtgcattcgttggagattgttttgctctgctagctcgctttctacccttgatttgctttttgatttagtcgccttttgttcaaactccgcgaaaaatacgatcaaatacgatctctcaattttttttcagtggtaaatgtgtgaatgcttacaaaaaaaacgaacatgctattctcagtttgcaaatccatgagcagaagaatcgactgagatggatttcattctgccaatgatgcagaatttctatgctgaatttgcagcgaaaaaaagatgggggaacccccagcaaatatcagtaccgaaccacaattaatacgcagataatgaaacaaaaaggacgataacaacatgatacctggtgcatgtaaactatcattcttttggggaatatgtcccattggtgtatcattcttttggggacaaaatatgtcccatcggtgaagcaagatttagccatttgatcttcatctagaaaattatgtaccaaagaatcttttttttttcatattcttgagtggaaggactgcatgctttaagattctattcaaattgtatagccagataattttaaatggcatttgttcacaattttcgtcttaggttttttataatttttattccataggtctataccaacttctgttagtgttcacatgtaatgctgaattttatgccctagcaggcagcaagcactgccctaaatatgaatgaatttggggcttagattttcaatagacaccgaatgagtttggggcttagattttcaatagacaccgaatgagattggggcttagattttcaatagacacctgatgcaaagcaggtcatgtctctgacacatcagtatgcatgataggacgtgtatttgagaaatgtctcattatttaccctctataactcgaataccatgaattgtttagcttgcaaaaaatgctggattttttttacttttttttttacctttaattgactaggcattacatatatttcagaattgtcatatattgggatgaaacacaagcaatgttaatttgaagcatgtgactgttgtctaggttcaaattgttaacttttatatattaaaacctaatctaaaggatgttctaatgtgttaataggatacaaacaaaaataattcaaaagtatggctgtttatggtataatatattggattgtgcttcattttgggctcaagaattgaactgtagcactacactcaatagtaatgtaaacatttaatcaggattgtgcttcattttgggatcaagaattgaactgtagcactacacttaaaagtaatgtaaacatttaatcaggctatctcgcttcgtctcattttgaccatttcctgccattaatgactctaataaactttgatgattcaattcaaagtgtcctatagaacttaatgaccaatatatcatttttaacatattaagctatgtggagcttatatcacttgttaacacatgactttaaaggatgaaagtaagacatgaaacaaatattctatgagttatatgattcatctcaacctttttttgctttgaagtacaaagagtgatctctaattgattcagcaattcacaataatctctaatttattcagcaattcacaataagctcatgagatactaaagcatttatttcaccgaaaccaagtaatcagcatatgcagtaagcatccttcaaaggccacgtctatatatatgtaatcacacatgcatgttgcttccatgattgttatatcaccagtattttttttagtgatatcaataccatgctatgttgtgataagtccagagtccagagttggctccttgttccactcatccttatgctatgttgtgataagtccagagttgactccttgttccactcatatcctttttgtacgtatggacggataactgacaaccgtatgaaagtgcatccatatcaccaatacaacactccttttccccttgcacgtgcacctttctttcttcgtgctataatggtattcattgttgttttttaaatggatcaacaatgtgaacaaaatattcctactgccaatccagctaatgaacagctaaattggtattcatatcttaagtatcctgtttgtgagatgacatgttagttgcagatttacataggactgaatgaagtactttcctcgaatcttgattgctggtgcctggtagctgatatgttatggactgtgaaatctaagaagttaatatggatttgcatatacaacgtgtcaaatcatgtatatattatctgaaagttgattttagcacttcacattggccttgagtgtttaaattgtacagattgcgggaataaaatttggctgatggtttagtagtactttgaataaatgatcaatagtaagatggtattaattgtaagagatttttattggtgttctagaattttgaaggatggtcatagtcttctgttaagaaacatcttaaaactagtcagcaattgtgttttgtggattcatacaagctgcaatctgccggctgttagaatgtatgttaggaaaattaaaagaataaatagttgaactgctgaagtagccctgaaatggcattgaagaggaagggtttagttcttgtttcttttcatcttgtcttggataggcatataagatatataaaagtggcatgaaggtattaaacaatccttttattttactggataataaagaatggttttaactatcctggaggcaggtaggtgctaagcaagtgattgaacattggatggagttctttcaaaaaagaaaaaagaacattggatagaaactagctccttgctttgtttgaggttaatgtctgtcacaaactgttatcatgccttaacattgtgaaccctcctaaaaaaattattcttttttgagacttcattgaactatacattttggtagtcagcagaagattaaatttaatctgagctgaagtttttatcacccagcattatagcccttttgatgatacgatgaccaagttcttcaaatttgttatttggctcacagaatgcttcatgatagtgaatcatcttattgcccatgttcttcggacttgattgtctcgtttaatgtttcttgtgtcactaaagcattgtaataaattataaatactgaacaaccttgtatcatgtgtttgtgtcaggtaaggcttttcctgtcagaggattccccctctcaagctggattaagaccgcaggataatctccaagcaaaaggctcatggttactgcatgcagctggcccaagctcagatgattccttgcctccaggctttgagtcattgccgccaagcaatgacctcaaaattgacatgtctcaaatccccctaattaggtggaaatgccccccacatgtaaggctcacagttactgttgtgttggacaatagcaagacaagttcaaagattactgaaattcccaacactctcttgattgcagatagtattggagcaggattggcatattgttgctggagaagaaagtagggagattgaaattcaaaatgagagaataaatggagcgcttgaggcaatttacccacgtccatcgaacattccgccaaagtaagcaagctccttttttttcattacaagttcttcagatgtcacataccattttttataatgatttttttgtgtgccaatccagcccatttctttctcttgatgtgaaagatgcccattatgacgattccaaaaccctgttggttcctttgatccctcttgaagatgatgatgcatctgatcaattggaaggaccaacccttgatctaccaagccattacaacataacaggagtttcaaatactcctgtttccgctgagcaacaaccaccatgtggtggtgctataagttctggattcaccattgagcctcaggctgcagtctcagcaacagtcactgcaattatgcaaaccatacagagtaatcaaaatgggagcatggctgaccaaaacgggagcacgattgaccaggaactactcttcaaaatactaagtgatccttcacagcttcagaggttaatgaaagaatgtggcccagtcagacatgaacaatcagctagtagttctgttgttgccccattggtatcaatcccaccaccccaaataactgcaagctctcctgcccccttctctgatcatgtcggaacctttcatggcatgaatcctaccctgccgcctccaccaccaatgatgaatcggccaccttcaaccattccttcagttgctatgaatcatccaccaagttcaagcccagcaatgaactttggaagtgccctgccaagttcaagcccatcagtgaactttggaagtgttccagggaggggtgtcggctattataaaaccctcatccatcagcatggaggggagagactggaacaaccatttgagcagcatggaatgcagtttggtatgtaccgccaacctggtcctccacaaaatggcggtattgatgccatgaacggtgctgctgctatggtgagcagagatggcaaggtgaggccgatgaaaccgtgtgcatactttaacagcccgaagggttgtcgaaatggtgctagttgcacattcctacatgatgcgtcagccccaacaagaaaagatcatcagaagcaaaagggatcaaaaaggataaaattagacaacacaatgggcggtcgaaattgagctgaagccgccatttaatttttgactgttctttggttcatctatcatggatcagtaaatattactccgttagctcttccattagcctccttttttatgttcgtcgaggagaggagatgttctgaaagaaagcaaaatatttcatgattgattggtgctcaaatttttactgaatcaagttcgagctcgatatcttgttctgaattcactaattctgtctctagttgtgacagtcggtttgtcagtgaaacgtcgcactctgcaaatactagtgcacggatgaagcgtagtcttcttcgcattcattgtgccagtctattcttaggtgattcggtgatttttcgtgtattgctgcatgaattactaagtaatttttaatatatttttttacaaccaagatagaagtaaaaaagaaaaaataataaaatataaggtgtatcagtacttatcatgaaacaaacaaatgataacctaatatgaaacatattgataaatatatgttaaacattataaaaatgatagatagatttgttaaaatattatgcaaatgatgtgacgggtgatgattggatatgtttgtatgttaatttgttgaattaaataaattgtagatgatgttgtatgcttgcatgaggttaaatatgtaattattgttagtgggtgatgatgtagcatggttacatgttgagttttagacttagtgggttataattttatagatagtatagatacatactctttttccatatttcgctaacttgtagtaaatttatgataaaactatatcaacatctatataaaatgtgtgttgataatgtattttagttgtcgttataggtgttcataggtttttctataaatttagctaaaattagagagatttgacgtaggataaatcatatactcattccgtcccaaaacataagaaacttggactggaggagaggagatatttcctagttatacgaatcttgacatactgtagattcatactattatgaaatgtcttatccgatacttagttatattttgggacggatagagtatgacacaacattgcctgatcgaccaccattggcgcgccacctagtcaatcgtttgagctctctcatcgttgtcttcttaatttttcattggatcctcctcctttaataagaacgtgttttcgttggagggaattgttaattcgagggtaggggttcttaattacgttgtttggatggcgaagtttaagagtaaactctcactttttcaatacctaggtaggacatataactatgagggaatttcgtcgtaagtacgttaaagataaatctgagccggacatcatcataaaatttaattctcactcgaactttccgtgattctcatctctactaccaaataaaggatgatgagaaaaattgaaactttcatgaccaatctttccaccaactcttaacatgttgagcatactaaaaactcaagaattttggatagtttttttttttttgaaacagtagacggtaggagttctaccggataatttagaagagaattgaccctatttataaggaaaactagtcccaaaaaccatacaactgtacagtttgctaaagggaaaccgacaaaaccttacattgaaaacatgaaaaacctgtgacaaaactacaaaccacagtacacaccgagggaagagcaggaccttcaagacgaagcctccaaggaggtaaacaacgacagaatccgctgtcgacacccacccaactgagctgggttttcacccaaaaggagagagagtccacaaggcaacacctccaaggagaaaacggcgcccgcaggtgtcgatgtcgccgatcttaggagaccagactaggctttcgtctaagacttcctcaaaaggtgtagagcctctagaaaatcagagctggagtgttgaatgttatcgttgttcggcccaatggctgaattcaatgcaacagctccgactccatcgaaacataaagactctagcatcgtagaggacaagaattttggatagtcaatggaggataacacggctttggagagaggggctaatacgcatgtgtccatgcacattaggcccgtgaacatgtcgtggcccaatccaagttcgaaagcccatgtgcattcagcctacaaccacacgagcattcgacttggttgaattttattttaaaatataaacttttagtatagaaattatatatataaaaactttatgtgtagaaacttcggtatagaaattttatacatagaacttagatgcaaaaactttgtacataaaagaatatttggtatagaagctttatacatgtatttatggatcaacccgagaaaggaaataggaatgaactaaaaccacacgctaaggaaggaaatgagcgcaagttgcgcaaccacctgacctaaggctatgatctataaatctttcccaacttctcaacggtgtaatttttaaaaagaatttaaaaaaatatttatagaaaagtttttaaaaaattatattaatttttaatttttaagctaagaatatttaattaattatgcgctaatccgtcacattgtttcgcatggggaggaatggatttgaacccgcgtttgcatgccgagcaccgtgtggtggtgttggcatttcgtgcattaggaattgggactgtctgtataactttgtgggccacatttggatcgttgatgtcagaaatttaaatggactttcctcgcaaaaaatgcttcagttcgtaactccatttgattttgttggccagacatgattgtgcgtctctttggactgggcctagcgggttcattggtttgtttttttttctttccctgcgcactgacacacgggagtagaagacaaaagatagagcaagtcaatttcttgtcgacagaacctcatacagcggtcaggcatttctcactccacaccaacatgaacatcaatattggcaaatataacagaccgctgttgcattacaagtcaagatatattacacacacaaatcattcattcattcattaccagtcaaataacaacaaaccaagaaccaacaaatgtacattataggaaagctgttgctgttcttctcccaagttccaaccataccgagtattccaacaaagaataaaaaaactgacgaattagatggtggtgtgcggtgggaaaacaagcacaaatctgagtcatctcatcaaatgcttctatggcacctcgctaaaaactcttgctaggcgcactcatcatatatgccatctcctatctgcaaaccagaagttcttgtttagatatatgtgcatcatggatggaaatacagtctatcgtattattctatactgttcaatagatggtaacacaaacatagcaacagcactggtagatgatcatactgagcaagcacaaaaccacactgaagagagtaaaaatataagtacatgataatattcagggattagtgcattaccatttatcagtaatatagccagtaataaactgaaaacaatgaacattacatataaaggacgaaaatgttctgaggcgacactaaaagcaccactgaagagatcacaggtcgctgggaatgttcagggaaggcggattaccggtaatgcccaaacactacatttctatgttcatcttaattttaatgttatgcagttccctgaaatagcttgtgtatgcaagtgggtgcttcacaaaagtggacctcacaaattagagtagagtttaatgacctaaactgcatatcgaggctacaagatatttgttgctacagtgatccagagaaaaacaggtaatcattacaaatcatcttcgtaaactaagctttcaagtgcaaactgatcatactaagatcataggatgatagtagcaactagcaaaggaatagacttgtgcgcacttagtcacttaccagatgaattgggaggaacaggaacagcaccattgcttttcacattctgctgagcttgggatgatgatcgttgcatgcgaggagatgaatcttgcttaccgttagtcatgggcaaagagtgccttttccttggattgttgtcttgcacatccgggcttaactttggtgatacactagcagatgcctttgcccttgcagattctgtaaactgcatataacttggcaatggagtgctgttgcttatgcgaggttcttgatcaacatgatcagatttaaccttgcctgagctctctcgcctcccaagtctgtaatcctttgacagattatccatgctgctccgtcccacagaatcgctgcttggactagttagtgatctcttgcttacatgagacttgggccttttgctcttgctttttttggtgttaacagagacctcacttgatggtgtcccatgagattcagcaaaggtagttcggctcaagggagtaccttcaggtgtcttcacataagatcctacagatttttccagttcatcatgtaaatcaggcttttcctgtcccagatgtggttgttcaacaggcacaggatcaattgcattggcagcgatagcagtgtcatcagtttgtacttccttttctggctcgatagctcctccagaagtgttcacttcagaatgcaaaacactgttatccttttcagcattatcaccaacatggttcctatcttccagggatccaatctccagtacaatctcgccaccatcagcttctgatctatccggtgagtcaagtgtagaggagattgatatctcagttccacattctgaagcagcaactacgattttaggatcatgccccactgagctctctggtatgcttgtgtcattactttgcttgggtgagacattgtcttgtgaacgaggagtatgtacctttggtttgtttgccccatccagactgttggacctactgaccgtcaaattggaagtcaactcttcaaattttaactgtgcagcagcaaatgcaggattgcatgactttctagccataaactttttaccttccatctccgaagtctgctcagttttatatgcatccatagtatcatcaaaggaagattcaggtttttcaggaagaggaatgggttcccttgatgtatcagtttgagtagattgttcaactgagacctccaaaggttgttccgcaacattctcagtctccggttcagtcaatttttcaacatcttccttgaacttttcaatcaaatctggttcaggaacatcttcaatttccattccagaagttctatctggaatgcatgcagaaacctccaggggatgagaatcagatggccttagtgtctcttccgcatcatcaggcaccaacttcaggaaagagatgtcagaatccaaaggaagggtattttcctcatgttgagcatctccttttattttctcatccaccgactcgttattctctctatcctctagcaagtgtcccccagtgtttggtggaatcatggatgtccatctctccatccatttccatgcaacatcaggttcagaaggatcacattttatgtgaatggattttgaagtcgacatgctgtccatgagctgacagaaggtaacaaacatgagaaaatccaaccaagaactaacgtatgataatcttagttaataagggttctttcatctaaccttcagagcaaatccattattgagtaatttctcacttgaagaacagatcaaagagtcctgcaaaaagaaatgtaaaatcatgaacaaacaagcaaaatgttcaagcaaggctactattcagtattgtcacacagaaacaagaattatatacgtgttaagtgcagcagataaggttttgatccaaaattaatgattgtgcgtgcatggaattcaacatcgagatgcgagatatccaatcaatgtagcaactaaagtggattgcctccgcacatactaaaccttaagatcaattgccaacaagaggttgacagctttcaggttactagaagaaggaacttggcgaaggaaggataagaagatcatagacttcacatagcatattaaacttatattgaataatattaaaccaagcttaactgactggcagcaaaagagtttatactgtctagatacaatgataccatacgtgtctaaatgagagtgccttgaatacctgaaactttcctccatattgctgtgcttgatgaacccggacaagtccttgcattttaacaatagcaagcaagcattgtaatgattctgcagcctgcctcctaacaagatgcccacgtatcacagcttgcagtttcacaaggtccttatcatttggtagttcttgctcttcctatagtcatgtaaatgacaataatgtaataacactaacagaaaaataattaataaatataaatagtgggaaatactgcaacatacagtgtgcactctgatgccagactgaatgacagcagcagcagtctccgcacaatcttcctgatggtcttcactgcttccatcaaagagagagacggtttcctcctgcttcacctcagttgatgaaacaaaaatactttcatccgtcttatcagtgtgttcctcaacatcattatcatttggctttactattggagtttcagttaccctttcagttggttcttggattggcacttcagttactctttcagctggctgctcaattgacctttcagttatctggtcagctgacttttcaattggttcatcagctggcttttcaattgattcatcacctggctgatcaattggcttctctatcagtttttcatcaggcatctcttcattcaaaggcccctcatctggtttatcttgctgcaaaattttctcgtccggtttctcttgctgcagaattttctcagctggttcgtcttgctgcagaattttctcatctgatttctcttgctgcagaattttctcatctggtttctcttgctgtagaggtttttctgaggcataggagtaagttgaagaatagatgttgcttggagcaatttcagcttttgctttgctcgaactaagagtttcaggttcagatatatcagaattcttcaaaacacgatgccttgtagacctcctacgaaagctccacctacttttatctgatatggccttgttctgtaaaagccaacatttaacagccattagcatgattcatctacttgatataaggaagagaagacagatattctgtggtagctttttcacccgagacgaactagaagagatgttacaagcaaaatgcaggtaatgagggctagtttcgtgtatctgaaatgtaggcaaccaacatacttctcatttaatgaagcaaaatgtcgttgaccaggaagggaaacaacacaaaaagaaaggaagtggcagataaactctattagttttgaaattaatgtaccagttcctaataaatctccccaaagttttcctcgcaaaaaaagacccaaagtttgttaatgccttactggcgtgatatatccatcaataatcaatttatttccaaaaataccagttcagtaaataaactataaaaggaggtaagctaacatgattcaggtaataccttggtgaaattatgcactacttaatcaggagtatttttaatttgccaacttctaataattgcaggtggaggcatagaatcctagcaaaaatacatttggtttgctgtcagctatcaccactgatccagcaagaaaaaatttgtccttttgcaattatatcaatgaaagagagctaactactctctcttttccctgaacatcaaaaagagctaactactctcagtcactcactatagttggtacagatcctctaggctgtcccgtgaaaattccagatcccatttcaccaacactatggtgcggctgtctcctacgattagaggatttttctcgattcaacatagagattttatacgatgagcgtccagccaattagtgaaaaatgagctgctccagagtccagtgaactcctccccacactgagattcttggtagggaaaaacagtaatcaacagcgcaacattacaaccaaagtgtcaaatcatgggggacaaggctagcaacactcagctccgaggaagagaatgacagatgccaatcatgcaacaagacgagagacaccatacacagtgagtagcactttgagcagcagataaacaccagatcccttcctgacatcttgcatggactcagggcggcaagagtagcagccataatattccagctgctgcagctagagccatgcagcaacagaagagaaggggtaaaaaaaaggaaggaaattgaaatcaaaattgagcctttgaatgaactcataggacgtgcgggaacagcacgggatcaccagccaaaaaaaaaaaaaagctctcattttgctggctgcgtcttgctcgccgccacgaatcaaccccagatctaactaaaacaacacgcgcccgcacctcgaccccacgcatcccactgagatctgctgaaaacaaacgcaccagctcgagagaacccccccaaaagaacaaaaaaaaacggcttcggcgagcaaggccggcgcggcggcgcattcaagcggaggtgcggcgcgcgagtacctcgtcgacgtggtcatccgcgtcgccgtcggagccggcggacgggtcggatccgccgccggcgcaggcgaggatcttgaggcagccgttcttgggcttcgtcatcggggtcgctttcgccgccgccgctgccgccgccgccgccgcgtcggcctcagtcagtgcagcgcgtgcgtgcgtgcgtctggagcggaacaggatagggagctgcgttcctctgacttgtttcttctctggctttgcgttggttttgctttgcgtttagctgcggctctgcttgtttgcttgcagtttttatattccggaggattcgggccctccgctatctctaccttgccgctgttcctttctcctccctttttttttccccttctccaatgcagctttatatgctttgtttatttcttttccttttattaattaaggttaattaattaatacgtaattgaggttttaaaaaagttttgcgagtgattttatatttgtttcttttacctttgcatttcatccgggagaagatacacacggaagacggtatacgcgcaagacggcgagacacatagttttcgtgattgtacatacgcaagagtactagacacatgatatacgtgggtataggatttataagcctctagtatattaagtcagtaaatgggttatcatatgagtgcttagatgttctatagcccaaccatattggatctttaaggccgtgttctagctttcgaaggggtcagaaacatcttccccgtgcacataaaacggagtgatatattaactcatgattaaataagtattagctataaaaaaacttaaaaatagattaatatgatttttttaagtaactttcctatagaattttttttataaaacgcgtaccgtttaatagtttgtaaagcgtgcgcgtggaaaataaagaagataagttgggaagaaaagtactcgtactaaataggccactcaggttttacattttctttttttcccatcgagaaggatgtgtatgggggttgggatcatttcctccctaagggcaagtataatgggaggttctaagtcggctaaatgctcaagtggaggagagatatgagaagcaggctgtaaacttacatctggcttggacacaagaaccaaaaaattttgtgagagaggcaagtgggccatatatattaattataaatagctaactattgtatgtgtagactaagagaaggctgtaaagaaccttatatgcaacaattcggctatattattagccttgctctaattgatctgcaccttgatttgagggttggcaagagaggagaagggaatcggtgagaaggtaattcatagatttaaaagatagcgagataaattcgacttgtttcttaaaaataacgctagcacgtgtgacacaccacatgacaatctaatttaattgtgacaaaattagtccctctaattccgtgggacagtgtctcgtcgctgcatagctcgatctattggaatataccgcaatatatgtggggagttagcatctctcattcgatcgttgtcttgtaccacatcactcgtaccgtccttggaccgaccattaacaagcctaggcctaggggtgcaaacaaatgttgttcttcttcatggcgctggtaccgtcccgtccggccacgatccggtcagttgtgattgcaagtccacggcgcctttaagttcgcaataacaaggccattaatgcaagcaacaatctaactccgacgagcctagccatggcaagagcgtactttggtggggcttccgtttctccggccgcggccagcctattgttaccaagtacagtacacaggtcagcacttgttcttcccatagtcgtttttactcctaaattctcagtactgatgctactattaattaattgtaaagccgatcctgaccctgtcactgttggtaaagagcgagaggccagccagctgcatgcatgcggcgaaggcgatacccctgcaattaagcggctggtaagtacagcgaccttcgtaaccaacaaacgatcgagatgacacggtaccggcactaaatcgcggcaaaaaacggtacgggcgtcgacgtgacggcccggcggaatgctcgcgcgcgcgcggccgcgcggggcgggggcgagcacgagaaagtgcgtggccgcatgcggccgcggttgctgcttgcattgggcggcgttgggttgttggtggtggcggtgtggcggtggtggcgcggtgatcgcgcgagctttgctcgctggccgcgcgccgcccaagcgcgggatggggcccgtggttcggttggttggttggcgtttcacgtgagacacagtgatcgcgttcgagaaaaacgggagagcggagcggagaattcatcgcctccacggcctttttcactgtgttaactctcacgagctgcaccggccagaccagtcactgacactactgagtttctggcacggtcgtttcggtccacacgcggtcaagcgctcgacagctagaccgtcaaatggggttagtaatttatggtggttaagtggtcaccacgcgagcggttttgcacgcaacaacggtgtggcaattaagctcgttacgagtgtttattaacggtggtgagtgagtgcatgtgaaaacaaagtggggccacgtgcgcaacgaggggtgtccgagccactacgagcagctgcgagtggggccaccccgagaccaccgggcacgtgccagcctttcgcacatggacacgtagcgcgctgctcgccacgttacagccacgtgcgatgccaccgtaaacgttatctcctacagctcctgcctttgttctactctctccccctctctctctctctcaggaccagaaagaaacaggcagaaagaattcaaaggaagcatcatctaatcacctagttaacaacggtgtcgtggcacagtaattaacggcctaagcaagcgtcagatgcataaaaccataataagagatactactatatccaaacaacaaggtgctttttggcagcgtgcaatgatgcttacactaaaggcatcctacgcgaaaagaacgaccggtagtgtggattagattagggcagagcatgagcatatatggagggatggaccaggatccaaaagcagccatgattcttcatgtagtggtggtgctaccttttgttttcattcttaatatcaattgttgtttccttcctactaccttgatcttaggttcttagcaggccaacatttgttctgaccatgagttgatgatcagtggtagagtcaccacctagctagatagtactatattctagcataatgccaatagcattgaggaagaattaatgctgaatttgatatgtgccatgaactatatgtagcagaataatttggtaggagtaagtagaggtgaaaaatacagttccagtgactgtgatcatagagaccaaatgtctagagctgtgatagtttctgaaattgtgatatgggatcagctaatgtgaggattaaactaagaaagaacgaaaggtcattgctctcttatttcctccccacttgttgaacttaacacaaagatgtgagaaactaaagcaagaaagcagcaagcacatcttatcccatggtccctggatagcccaaaagtcgtgcatgcccaacacaaagggggcacacacactacctttcttttttctctgctcactcactgaaacatatatatgggttgcatgtttcagaagtagacaagagtgattggaggcacacaaattggcctgcattgcaccagctcacatgtattaggtcagggtttgttgtgacagttcgtttattcttgttaatttgggaggtgattaattaggggccacatgaaaggtcactgtcagagagttgggaggcagtgacaggctactccatgttgcttgtggaggaaaaagagcaagtttgagggcacaggccatctgagaggactggagactactgccatctatctatctgaagatgaagacgagatccaacggggttctctgctttttattattgtctccaccagtttggacagtacatacacagattcagtatcaatcataaccttctttcatttctctctttattataactccggctaatgttttgtactatatatgaagctttcatatatatgtaataataagaaattaaataaaaacaatgaagatcgaattaataggtaaaataataaatgcggttatgacaaagaacaggtacaccatttccgtattgacatgatctactgtggttaaggttatgtgttaatgatgctcactcttgaaaggctgtattattattggttttggggggcctaaacggctaaaccccatcctaatcaaacgagctgtacgtggtacgtgcactaatctggatcctttttggtaatgatggattgatgggatagcgatgctatccaatatgtattcctatgcagcggcgttcgcgaaaaaaaaaatattcctatgcagtggaactgatgtggttgccatatcatttcttagaagactttacagatgcacaactgggattttttctactattctagccttctcgcaattggaacagaggaaattgggtccagttaattggctaattgcgttgttataaaataaaatgaagtgattggaataaattgtcagcaatgttgaaatcttaacggataaaggataaaatagttaaggaaaggtcaggcttcgatatcaaatgagatttgcctgtttatcaggaaattaagccaagctgtacctgtctgaagtctagacaagcttttggtggtatgttctatctaccggtagaggaaaattcaaagaaatttaattaatgtttgcccatatgctggctgtaccaggaatattcttatgtacataatagaataattaattagtccatggatttagaaaatttctagatagaagagaaaattgttcacagaatttttctgcttatacaagtcatatacatttgttggaattaaattctgtgcagtgatggatgacagcactatatatttaggtttcaggagatacacatcaatgggacagtttcatgcatgcaattctaagctacatactcaaccaacactagtctttgatgcattatatggcagattagtgaatcaatcgcaggctacgccgaggatgaagcaacaatgacaagataacccagctgatattgaaaccttgaagagagggggaaactgaaaatgacaaggagagttagctgatgagtagctctataacccaactttgtcctcataaactagctagcactcaggacaaggaagcttcacctaactggttgtggtggtattgaggcgatttccattcacgtttcttcttcgtcgtcgccttcttcttctttctgttgtagtagataggagagcgccatcgtctatctttccatgtttcctgtctgtgctacctactcctttgacaacgcctaaacacgctgcactgcagtcagatacaatctagaacgctgttagcaacggatgaatgtacatttcgttgccgtgacatgaccaatttgatgagtcctgtccaccagagactagaagatatatcaaattaaccgtgtgtatatctgcctcagttggtgtagagatcggaagttaattagctatgttttgtttttgagaaattaaatgaaatgtaagagtacgtgatcaagaaaattattcacattttgatttagttagaagaaattatcgaaaataatcagtgcttaaaagtatctttcacttgttaccatgcatagatgaaaatttccagtttccaataaccaccaaaacatcagcgcaggtgaagtttccttttgtctgtttcgaagacagagtatgaagaagaatttttacggccacctactacagtagatatatactatcgtcagtaaccaacaagtgacaagtattcagtaggcagcagcagcaccagtagataatgctccaaaattccaatcagcaccgaagaatctccctgtgaaatccggccaaattacgcaggtgacgtcgtcgtggacagcttcgttgcagccgcgcgcgactgatggaagctgtgaacctgcacactgtagctgctgctgctgctggtggatgctcgtggtcaatcatgtactcgaccggatcggacgcccacatgctgctgccaatggatcacggagaggaggaggacaacgccgcatgatgcatgttacccctactatactcgtatagattattgtctctccagccgctatactcgaattataatcaatctagcaccgttatactattcattagcgcgagctgtttgatgattttacagttaactgcagatcagcagatcggatgtcttgagagccggaagtgaagtcagcgtgctgccacctgcaaatgatctgtacaagtgtatacttagagccagtttaatagtatagcctactattaactttaattcatttatagccgatctaatagccaattcatacaatagttgcttactatactattaatatattgtcatacctattatacacacattgcgtcttagagtccgtgttgtaggtagctacaaatttatagcccgctgcttttctctctcatcttttatctcatgaaaatatatttatagctggctaatagtgcaactgctcttatctcagtagctcagatcagtatcacacagctcattgcctcactggtagctcgtggagtgagtgccgcatttttcttgcgagtattactaccacttcattcacatgcccgtagatccgtatatagccacggtacagttcaaatttatcctatccagtagtaagtaactagtaactacaaataaatatacctgtcactcactatagtagagataggattagatctagtcgaatctctcccgttctgaggttcacctcattctttatgtggcttaaaagagtggtcggttttcgactcttcttgttttagcatgacaaacatggctgtcctcgtcggcgttcttcttgatgtctcctttctgtcctttggatggtgggttcaccttcaaacccttcagttgtaagttgaaaggacttgattgctttttctatatctttttatgtctttcttcgcatatgctatgctcgaagtgtaatttgcccaaccattgcttttatgtaaaacaagctgttctctcagctttgcctccctggtacacaactcatgtgttttgtcctgaatcaataaaacacatgagtgcaaaaaaatactcacctgtcaacatacagcatctatatgcaaactctgacaaacattatcttagcaaagaatttcaaaatgtttaagaatacgacatgtaatcgttgcatgttaaacagaaccatacaattttcgttcactaaaatataatatagtttttagttatttgctatattattttagttaatgttgacaagtactacattggaagtgagggagtataataaatacgaaatgaatgacatcagagagtactgtactgtacagggagtttaaattagggcctgtatttgtagcctgattatagacaataaagttggcgacgttccacgtccataggcccatttaggcccatattactcctgctgggaccatcacggtccatgggctccggctccctctcctcgccgccgctctagctccagagcaggagccgctccccctggctggctgcctgccacgtactccagctccggacaaaatcgaatccggagccgcgagctcgcttctgccattctgcttccccttctccaaccaccctgctctctcctctcccccttcacagttcacacctgcgaccacgaggcggtggcggaggagacgaggcgcgccggggagatccgaggcactcgttgaccctgcgctccggcggccgattcgctgccggggacgccgtcttctccgtcaactccggcgaacggctgccgcgctccgatctgcacgtcgccgacgtcggtgagtccacttcctcgtcggctaatcctcctccaaaccccctctaccgaccccgtgttccgaccggtcccgcccctctccggccaccgcacgccccgtcgtcgtcgccggtgaccatgcgcggcgcctctgggtcacgtgaggcccgcgtgagggagcggagcgatcccgtgcggggcgtgatggtacagcatctggtaggaatattccgaaaaaaaaaaggaaaaaaatcctcatcctcatcctgtggcttggtagccatattatcgcttaaactagactagacacgggtccgactccgagggcaatatcccccaccacccatctcatccagagacgagctcctcgaatttgagggagtccggggagaaacctacggggtgatcttctggtccgcatcgggtcccctcccattgcatgatgccttctgttccttttcgttatctgcctggtgattgttcggtgggtcatcctgtccatgtttgtttaattcgatgctggtacgagtacgatgctagtggagatggaaccgcgcgctcgcgtgtaatgtgcaaacacggtgaaattggtctgcacattttgagagcgtagtgtgtgttgatcgggttttttatgtgcgagttttagtgggataggattctaggagaaaggaatgaagaagtgactttatatggcatctgccattgttcgctgataacattgatgccacctgttagttcctgatgccaccttgtccacccgcttgctgaagtctaaaattcttgtgtttatacactcttgctgatcttggcctcttggccccttagcccccaactaactactactgatgcaaccaagtttgtttcctgagcctccatgaccaacctgataatgccagtaatttaacagaaaatacgttgaagtgttgttcatagtttctctaaggacagctagtgttgggtataattttttgttatagttagtttttcctttatttcttgccatgttgagtttctatgtattaatgtctaatctttggcattctatgcagctgagcttttgatctcgccttctcgagacacatctgatatcgctgttctttttatgagttcacaagacactcaacatgaagtttttagaatacacccccttcgacaggtaatagttctatcctttgtttcttcttattgatgtactcttggtagcatgcaaattttacacaaacttattaactctactgtttgattcgttttgtttcagtataaatctgttccttgataatcttgaccttggtgattgtacgataagaggaaaccttgaagccttctcatgtaggaatattccctgccaagtctcttattgagtatatgactttaatgacaatgaagaccaaccttctaatattgatttgtaggcaagcacactggtaatgaccgtcgactttcaataagtctagaacatgaggtaaatatttaacatttttccctccatgcattatcaccattgagaccgctttaggataaattaccatgtcttatttagaaaattgtatgtctgttcatgcaaatcatatgaaaaccgaagcaaagtgaatactatcaaatatgtttgtgattataccgatttcttaaaaaagattgtcgtgtcctcagattcttgattgcctcagtaagtcttctgatagtgatcattcatcaccagtggagcatttgtcatgtcggtcaaggtaatcacgtttagattacttatgttgcggaatttctattatacaatactaactgccttttgtgtttgctgctcattccagtcggaaaacattgatctatctagttctcacccttagccacatgtatccagattatgatttcaggtaaatttctttcattttacaggaaggtagtttttgtcttcttaactagtgtgttctaaaaccatctgggaggaaggatattgggtaatgtcatagtcagcctattttggcgatttggcaacccgcttttgtccttcctgccagcctaagggggtgttgtcaaatggtatgacagacggattgatatccgttgctctttgagctgagagttcaattctctccattacccttgccctttgtgtatttgactgagctgtaactttcttaaaggtcttcttgctgttatgtgacacatgcatgacaggatgacctttagataacatccttttgtcaacattttttcacttaccagtgctgttcgggcacacctgttcttcaaagaagaggagtgggaaagctttaaggagatgacagacacctacttatctgaggcttcaaaggtaacaacttgaactctcttttttatgcatctactcttaatccaaagataggtgtgtttgtaaacatgcatgctatcagaatttagaaataggtacggtatgactgcaaaagcaaaaatgtatatattaacacatagctaattttttccatcatgattgtcctacttatttattttcattttcactggtgtgatttgcttaacctaaaattggactatctttcagcaatgggcagcaacaaatgagggcacttctcttctagacagtatgactaatgtcattgatgaggtttgcacttacatgatgcttaattcagagaacttggatattcatatattttatactgtcaaacattactttgtaggttatcaaaatcggagagtctgacatctacagctataatccagaccaagatggagatccatttcttgaaaagggggtcatgtaagttaagctgtgataaccatgcttttaacttagcaatcaaatgaatgttacatgaatatggtatactgttttcttttagatggtcgatcaactttttcttctacaatcggaagctaaagcgagttgtgagctttcgttgcagttgtataaggtagacacttgctatgcagttctgcattcttttgcaggaaacacgatgcgcgatgttttgaatcactcacaagtttctgttatattacagcaaaatatcaggagatgacttccttaccagtgcaccatccgatggtgaagaggaagatgcactgatagacatggacatataattgacacctttctggcaggaaaatgaccaaccagtgtggcatccagttgtgtagtaccagtatatatcatgtatggcagtttggcagttgccagtaggaactacaaccagaattttcttagcagacttcacctgtaccgaggcctgcataatattatgatttgacagcaggaaattctgcgtttctagcctgagacttgaattggcattttacttggtgacctaagctagtgtttgttgagatcgaaattctcgttctatgcagttgaataatgtatatttaacaatgttatgttatgcttgtaacttgatttgcaaatttgctatgctgttgtttgaacgaggcagtgccgactcctgaatgagttaagcattacgcgagtttgatatggagaatttgtctgccgttggctatcaaggttcgccgcactctgtttgcgacgattctgtaagctcattacacgcatgcacaaaattgatgccaacggcaaccagcaataattttcatcgagttcacaagggaattttacggccgagctccacgcccccaacttcctaagcttgtcagacaagaatttacacaacttcctaagcaaaagcttctaatggctatagaagctgcggtgtggataaaatcttttgagccctgggctctacgagagctaacttatctcatgctcttggaggctaactaaacagagcttttcaggttcaaatcagacaagtcttcaataccagaggtaattccactcaaaaaacaggctcaacaatgtaaggcgggcaagagtaagaaaccattgctaagaaaacaaatgcccttgaatggctgggttggatcgcatcaggagttagacaatcacacgatctgagttcaacaatgccctacttggtttaaactcacttccgagctcttcctcgcttccccctcttcccgcctcgccccaagctcccagttttctgagcaggagactcggttttcttcgggcggcctctgccccttgcagatggctttggctcaggagttgcctttttagctcccctgcctctccctctgtttgaaggtttgcggccacgtctacccttaccaccttttatttcaccattttcatcgtcgtcgctatcatcttcctcatcatcatcctcttctgattcggaaacatccttggttttcttgcgcttgttagatcgtgcattggtgctagcagatgccttcttggcaacctggacctccactctgtcttctactgcagtgaagagttccaatcatgcatgagtcgatgcaaaataataaaatggtaaatgatatgagaagcatttcagcagcctgcatgattacaataccagtccattcaaatttcagacaatacgctcacagcaaaatgtaaagtaacagcaggatatagaaatggcatgtaaagccaaaagttgctcacatacttgactacttgagttacaccaacaatcacactggcactattaagcgattttccctccacaagcggagcagcctccccgcacaagggcataaccacattagctcatagaactaagcacataaaaactattgactgtaaacaaaaggaaccatggtggtaggggactatccaattatatacaattggagacaataatttattctgcacatatcaaaccaaactaaggatgatattcatacaacgttaaatttcttgaagcttgcatacataatttaacaatgtgattgtaaaacaaaataaagaggacatgcaaaatacaaaccttcagtggaggtatcaccgtcataaatatccagctgagaaaaaaaaacatttattataagataaccaataataatccaaaaacctagggtaacgagagaatgcaagaaattagcatacatctgtacagtttgtactgcgactactaaaagagatgctagatgataaaacaaaattattagtctaagcaatataagagacgaaataagataagtgaataaggtagctcattaaagaacaccttggtaacagataaactatcttgatcaaagctgtgcttttaaaagactgtaaggacaaatgtagccatttttaacattagtgtagctccatttcaagggtagatagcctaatgcaagtctttaaacctaaaagttatagcataacatccgttggtaaatctaatgtgccttattcgagatagagactatgataccgcataacacctaacatagctgctaactcgagcaactcattttctttgttgaacatctcaagtaaatgttgcaacatattgtaatctcttggtagcatcaagcagatggcctgtgaattggagcacattcagttacctgattaagccggtcactagcaattgatctgtctacaacaatcgcagacaacccatatccacaaccaacactgcagaatgtgtcagcaatttagttgattatacaggagctgcaactatataaacattttgatttagtgtagttaccttataacatgcattccttcaaggatgtcaacctttttaggattagcagatgacctgcattacaagttcaatgactgtaagaggaattctatggttttaacaattgctagcctagtattaaaatgatattaacagtattcaataggcgtacttttgcccattagggccatagccaagctctccattttgggctgttccccagcttatgcaagaatcatctgcaccaacaacgtggtgcatgttaccagaagccatgcaacgaatgttccaaccactgaacaataaaatcaccagttaaacagataactttggataacatcatttgaacaggcagctaatcacgatttatcaacagaaagaatagccaaggacggaactattcatcactatatggtatctacagttaagtttgtccgcaagtaaccttaaatccaataatggctttggatacatccagtcgtcgcctgtattctttaactttccccacatgtacaactgtcctccacctaataaacaaagcaaatacccaaaaattaataataatgtggtgttcattcttatctttttatgcaacactatcaacatcattttggttagcagaatccaagtctccaaggttcaagtatgatattcttaacaggacataaataatactacacaacatgaatctccatctaactagcaggaaacacatagagtgggaaaaaaataaacctgatgcatgctcatatcggcctatcagaaggccagaaaaaaatgagcaggcttacgctataagatgcttagtgtacatgctaaagcatttaaaaacactcaactggctcctcgactacataggatcccctttgcctatagcacctcgctactcaatcatcaaagcaaagaggttgtaacagcaaattagagcaaagccaatagtatcaacatttcagcagacacaaaaccctgatgacaattgttcacataataacacatgggaggatcaataaaacggcaataagttgataataacttgacagatttgttggcagagataatgcacaggaattccataagacaataaaataatgtcttcccgattttgaaaaagttagcatgcgacatgctgaatttcatgtctcatttattagtccatgccatttaactgaatacatgaataacagtacaatcatcgaatttcagaaatacaaccaaaatgctctataatattataattacaaacaaaacaaaatataaacttacatcacaaatagcttattttccatgtatgatactcagctaattgcctaatttacaggcccaaagtggtttttattaagtatttctttatgattgagccaaataataacagaactactctatcgatgtccaaatatcagaaaaggaaacataccggcagtgcatgcagaacttgccgcaccagctgatataatagcattgggtggcagaacattatgcttctggaagacttcaacaaggcgaggctgccactcatccttttgttctctatggcccaacctatgcaaataacaagtggatggggatcagaccaacgatgctatcctgattatagtgggatattgggttatatgacatcagtgtctcaccttccatatccaccaaagccccatctgccagggccaaaagaaaagagaaacgatattagaaaccataaacagggaactgaagaaaacatgtattattagatattgcagataggaaacggcttgatagctgatacaggacagatggatactatcatactagcaagtcaaaataatttaaagttggtaattgcataaaaaattgatgaataaataacatacgtgtaaacatagccacttgaatcaactgcaactgcagcacacaagtaaatgaacagtgtgagattggtgttaatcctgaaaggttagaataaccaaaatatatatctgtaaatataacagaaacctgtatgatttgttccacatgcagctttgacgatagttttcccagataatgaagctattgccctgggacggggctggggatcatatgccagctttacagatgagtctttaatattgtactgcaacagcacaaatcaattatcagtgcattgatatgaaataaatgaacaggttatctgtgttaatagagtagcaaacaacctcattgtcggttccatgaccaagctgaccgtactggggaagacctgctgtactgaatagcacagaagaataaaatactgcctcaaaaaagttcacgaacaacactcactaacaagagcacaagcagatataattaaaagggttgaaaatatattagtgtcgtattataagcaagacatacagtatagtagagccctccactgatgacagccagacagtaaaatcagcaccacaaacagcattagttgcttcagtaacaagacagggcattggtgatgtctcaatttctgcagcaatttttgaaccaaaggaacaagaatcaaataatgtaataaataaaggggaaataagctgcccaaaacaagtaaaataagtttatcagttatcacacattgtgtcgcagagctaggaagaatttacgaaatgtccaacatttgttagcatatattataagaatatgaaaaactccccgtgaaacactgcattgcagcatcaatgtctaaacagacagatcacacatggaagcattaccaaaaaagaatcaaccatccgcgaagcagatatatccagacttttccaaagacagaatgatttgtctgcaggacatgtatttggtgtactactgatgtcagtgagttaaaaatgaaccaaaggtacataccattccttagggagcctgtacccaactgtccgtgtttattgtgaccaaatgagaatgacttcccgtcatcggttacaaccactgtgtgatttcttccaacacttgctttaatgactttgtacctgaaaacatttagcacccataaataattcatctcaaccagtgcacctggtcaattcatgaatttagcataccaagagctattgttaacaattgaagtacaaacaaatagttagttcctactttgatagttcagaaacaacagtcggcaggttacgctgaagagtatccccatgccccaactgccccttctgctagaaagtaacagtgttaaaaaatatagtgaagaaaggtggcgtcaagtaaatttcgtacctcatttcgaccccatgtatagcaacgtccttcagcatccaaggcaacacaatggcaagccgctggataaatgatgttatagagttattacaggagtactgaggatcaccagaagatcgaatttgcttgtggattacaggaaataaattaggaaacttaatcaaccaagcctaaatgcttatgacagaatgccctaaagttgaactcttaccactcctagagttaaactccgtccgatcacccaaaaccaaaattaggaaaacgacaacctcgtattaagtccgtcttaaaagcacacatactcgctggatggttgcatcagcagtctatctagaccattaagtccactgcattgtatgtttctcacacgtgtctgaatcgctaaaatccaatcaaccagcacccccgcgttagaactttccatatgtactatctgtctcgatgctatcaatctaataggtcatgacagcattttgcaacattaagcagtaagcacacgtgtctaaatcgctaaaatccaatcaaccagcgccttcgcgttagaattttccatatgtgttatctgtcgcaatacggtcaatttaataggtcaggaaaacattttccagcattaacttgatagtactaaacagagtggcgccgtttcggcattagctcatccagccactggaagagcccgcgaactttaaacctgaccaattccacctgacctggtttcacgcatccaacgaataaatataaactaaaccagcggcagttctcatccctccgtgacttgactctaggagaccatctgaaactgacagaaggacgaggggactcactgcacccggaggcaacgaatcgtatgtcgacgcccatgagcgaccgcatccgcgtcggcgacactaggttaccctgcgccccgcccaccaccttccgccccatggtctcgaagttggtcgcgccgcagtacagcagctctcccccggagcccgcggcatccttcgcgccgtccgccttctcctctccctcggcggcggcggggaccttctcgggctcgccgctggccgacattatcgccggtagtaacgccggcggcggtggaggattccgatccgaaaccctagatttgttcgggggtagcggagaggagaagcaacgaatgggggagatttgaaattagagattgcagatagaaactctttttatgtgcgggttagttatttatgagccagtgcggattcatagtacgcagtgggttcggctagtgggtcgactaatcaaagcggaccaggagatatttcctatcacgtcaaatgtggcactgaccagtgggaccgggaaaagtggggcccatttgtcagtgatgatcagttcgtggtccaagtggcactgggtttagttaaggccgtggttttaacttcagccttttcccgggcttcgttcctatggacaggccaagaggcccaagacgacgtcgatgggtcgtactttgcgaggtgatgagttactgacttgtggtccatcgtcatcgtagggtccacttgtcggtagatttgagcatggagtaataaaactgtaagtacgagcaaatgttgtggtcataactaatttttgctggctggccaggcgagggcaaggatgtcagaagtcatggattgagggcaactccagtgtatgttcgattactatatgtgttagttcgtgaatggcgaatgcaactttggtttggtggctgcagtgtgcacatctatttatgtgacccgtttacaataagaaaagttgagagaaattgtaaattatttgatttggcttggatgtgttcaaccccgtcagcaacaattaaggccctatttagatcccctagtaaaattatacaccctatcacatcgaatgttttgacatatgcatagaatattaaatatatatgaaaaaataactaattacacagattgtgtgtaaattacgagacgagtcttttaaacctaatagcgctatgatttaataatgtggtgctacggtaaacatttgctagtgatggattaattaggcttaataaattcgtctcgcgatttacaaaagcggattctgtaatttgttttgttattagactacgttaaatactttaaacgtgtgtccgtatatctgatgggacacgtcaaaactatacacccttggatctaaacacggcctaatactttaattgtctaacatcgactcaagtttggaggtcgattctgctatctcacacaacgatcgactctctcagcgtgatgtgttcgatacttttggctcacgattcgatttctccacacactggagctgctctaagaggatagatttccttgtgaggctaggtcatgaagtaatatggcgagtggtttcgggccttcaccttgctaagcctcaaccttagctaagagagtggcttcattgagcatagatgtctagcggaggatataggagtatggaaagggaaggtggatgtggagcgggatatgaaattataggaggaaagtgataaagaggatgtcatttgaagaacaaatattgagctgagcaccacgacgagccatgtgtgcgaagaagaaagctagccacatgatgatggccttgacaactctagcaataaggagaccaaatgagtatagctatatcgcagtggctcatgaaggaatcaaaggtcagtagacacgggctgcacatcatctgccctcgtcggtcggtcgtgtcatatactttacgaacaacctaacaatcgactcattgggtggataacaaaaactagcgctgtcagctagaggggtgcgaggaatgatgatgactggagaggagagggggcaaggacaactgaacagcagatgaatggtagtaactagagtgagggatttggaggcttcgacgtcaagatgataaaaaaggcggagaagagattggagataggatgacatctggggctatatgaaataccatctctcttaaaaccgcaccacgagaacgcctgcattgtaaatttatgaagcgtataaatttattgtatgtgactattatatgtatgagtttattttgtgagatattatttaacaaaagtaatattttagtttcgcctcgcgaagggaaaacaaaaataatttttatctatgacaaccctttggtatcaataaaaatataaatttatgaagtatattgatggagtgtataaatttattgtatacgactatcatatttatgagtttattttgtgagatattatttaacaaaaataatttttatctcgcatagcaagatttatcttataaaaatttccgtacaactataacaaaatatgcagtttttaatggtaaaaaaaaactacgttttgttttatctaaaataaattttgccatagataaaaattattttgttttcccttcgcaaggcgtaaaatattacttttgttaaaaatatctcacaaaataaactcataaatatgacagtcacacacaataaatttatacactccatcaatatacttcataaatttatattttcttgataccaaagggtaaaatggactttatgatatgaatttaacggtcaactgacaaaaggggtatataagagatccaaattgaaatttaggggtatggaagtgaatgcgcaaatctcagggatataaaaaggattggatgaactttcaggggtacacagggaattttctctaaatgtttctagtgatagcgttttcaaagtaaatttggccatatattgctttaggaaacaagtgtgacaaggaagcataaatatgtgctaataggttccttgtggtggaatatgttcactcgagtttaacctaacatggatgctcccatatgatgttatttcagtggtaggcgatatatatgtcaataacggaacgttgtggtgacttcattaattttatgatacaccggtccaatttttttagatacacatgaggatcgagtgtgtgtatgtatttatagaggtgagctcatgttgttagaatccgcatttatacgtactccatccgtccaaaaaaaaagacaaaccctaggttttcgtgtccagcgttcgattgtccgtcttatataaattttttttataattagtattttcattgttgttagatgataaaacatgattaatactttatgcgtgacttgtctttttaattttttaataattttttttaaataagacggacggtcaaacgttggacacggaaactcagggtttatctttttttaaggacggaggaagtatctcttaaagagattcaattccaaaaaaattatccggtataaaagcagagataaacggaagaatatacccacctatcatttttattatcttttctactaggagaatcatttttattctctcgttgaaatgcggggatggatatagcttgcagccacgggcaaccacaaaaaatgtcaaatttcaacgaaagcccgaccctcccactgaccctgttaccgcacgtttgagtaacccgaccgcaacgaaacacacgccccaattttcttggttcgtgatgactctcccataggttgatccgatccgtaggttctcgatccaacggtcaccgtgacgcgcagctccctgcagccgacctggccacccacaccttcgtggtcgtggcttaccagcaccacccacctaccgctcgtaaagcaaccgccccccacctcaccaaacaccgcatccggtgcacgagacggcgaccggtcgaccacccccgcctcaccgcgagtcgtgagactggagccgcactttttttctttccggcttgtgggccccacaaatcctcaaacccccatcgtaacgcgtgccactggagagcggggcccaccgccccactttatataagccttttggaattcggcccggtccaaaaattccgggacgcgctgaggcctgtgaaaggaaaggaaaggaaaggagaggagtggaggcgaggcggcggcggcggcgagatccacacatgacacatctcgaggcgcgcggtgggcatcaattctcctccactccaccgcgtttttttattatttatctatttttgcgcggccgcaagctcgcgcaccttgtgctatctctcgccgccgcctaataatagctcgagtgaccaggcaccaccaccgccatgggagcgctcgaggaggcccacctcgccgccgccatctccgcgtgcgagtgcgagtgctacgaggaggaggaggaggatgacctcgtcgagggggacggcgaggcggcggccgccgacgccatggagccggcggtgcgcgcgctgctgctggggctcggcgaggacgcgcgccgggaggggctgcggaggacgcccaagcgcgtcgccaaggccttccgcgacggcacccgaggtacggcccagactccctcctccggcctccggagttcgtggatccgtttttgtgtgtgtgtgtgtgctgtttgtggagtccatggcataattttttgatccgtgatttgcgagctgcgggccgcagctgtctctcttgcttgtctagcaccgaacctggtgaagcagaacaaagccgtggggcatttgaactcgtgtggtgttgtttggatctcaggacgatgggtcgggttgtctgggaattattcctgaatgattgaattctatctcggtagcccatcatagaagtgataacttgatgtaaatggttttgcccatcggtcataatcattgctgttatggtggtgttaggctattacagcgctattatgcttgtagtttcagcaattaactcccctctctttaaaaatttagcaactggccaccaaacagactttgatgcaagcatgaatgaccaaagtatgcagcaggattgtgcaaagagaagttggattcggatggttacaacgaggatccgttgtatgtagttactaggagtcttatgattggattgcatacttgcaataagccattccacagtttcttatggttatgaaaattgtttatttcagtctgcaatactgggaattcctgtagtaatcacaatggctgtcctttatttattagtctacttttgccttatgggctgcagcagcaggataatgctgtgccatgtgcttgggtttgtctttttggattatttaaattatgttaatctattattaccttccaaagttcctgctccgtacagactaattgcaacttcaaccggcagctcttctacttagtacttaaaatgtaatctattttcttttagttctcatcctagccacactttttacacaaactcgcctgctccttgattaaattagaaatatgttctttgtttcattatgaaatgtaacgttggatcgtagttatgtactgttccgctgttttgacttttgatacattactactacgatttcaaagagaaaatttggaaataaaagttactttaattatttcatagctgatgccatgccaacttgccaagcattagtatccttttttgtgaccagctggcagttaccatattcttggagagctttctgtatcaatctgtcttacgcaaccattttttaatttaattgtgtctacttgtccataaaacagtgcttctcatttagtttgagtaccaattcatgggatttggggggcattggaattgattacattgttcttatatttgttttatcaaatggttgtactctggaaactagccacaaaaaatgactgttttttcatcattgcttgtttgataaattactgctgtcaatgagagaccgtagtctacataaagcttaggggcaactgagaagtgagaactaaccaccaaattttatttgtttctcggagcattcttttggccacaatcaacacttaacaatgatactcttacaatatttccaagaagggaaccctttattgctggttggtttacagcataaattataccatgaaaagcctgttcttgtacatttattccatactcgtattactttagaacacaatgccatttttacctgtgatggtaaagaggactgctgatgttctgtggtattactggattactggaccattgtcagcgttggagcgttgtttgagtatgctgtttctcttataatctcttttgaaagaaaactgttattttatatttattttagtggcttaactcacaagaacagaacccttacaacagtagcatggtaatagcaactttgaatactcaaactggtagggctagggagcttgtggttcttgtcttctcccaagttgtgcatgcatagatgacaaaataacaagtcaacttttttggctactttgttgcagctgataatggtcttgtagaacttaatcaagtgctggagttatacagtatagccaatcagcgaacatttgctaactcttaccattgctttggagtcgaataaatataatatttttccgtatcatctataggaccattttacactagactgctagtttacctgaacaggacagttttgagcttgatgtgtgcaacttgcagcatcccaatccaagctacatcatgctgggtctaatcttgaaaggtttgtgtgaagtcatggatagtcagcacatgcgttcatgtgcacaatctgtggtcatgttattcttatgcaaggcaaagaatcctttcagccccatcagcaggcagtggtgccaatatatttactttgttgtatcagcgtctcttctttgttgttacaatgtttgggctgctaacaattatttgtttgtaaaaaaaaaactgtaatgcagttgctttatgagctttatttgacatatagttaaaactaatattacaggttacaagcaaaaagtaaaggacattgtgcagggggctctctttcctgaggttggtgttgacaagaggactggttctgctggaggaactggagggcaagttgttgttcgtgatattgatcttttctcatactgtgagtcatgcttacttccattcagcatacaattccatgttggctatgtgccctctggtggaagggttgttgggttaagcaagctttcgagagtagctgatgtcttcgccaagaggttgcagaatcctcaaagactggctagtgaagtttgtggtgcattgcatgctagcatacaacctgctggtgtggctgttgctctgcaatgttggcacatacctttgccagaaaacttgaaatgcaagactttgcaaggttggattagcacttcacattcatctcgctctggagtttttgagggtgagagcagctctttttggaatgacttctcagcccttcttaagcttaggggcatagacatggagagggacagccattctgcctccatagcttggtgccctttaaggtctcatgatgtcccagtctgcaatgggcactgcaagaaggctacaaccaacggtgcaatttcacccaaatcagtaccagctccctctaatatggtttctgctgttagctcaatgctcttatcccttggagaggatcccttcaggaaagaacttgtaggtactcctcagcgttacgtgcaatggctgatgaagttcagagcatgtaacctagatgtgaagctgaatggctttacactcaataatttgagtgtataccagagtccagctggagatgctgctgaccatcgagcaatccattctgagctgcatttgccattttgtgcgcagtgcgagcaccatcttctgccgttctatggagtagtgcatattggctaccttgacggcggagatggtgaagtgattgatcgatctcattttcaggccttggttcatttttatggatgcaagcttcaggttcaagagagaatgacaaggcagatagctgaagcagtttattctgtttcgcattgtggggccatagttgttgtagaagctaaccacatttgcatgatatcaaggggaatagagaaaatcaggagtagcactgcaacgattgcagttctgggtcagtttttgacggacccttctgccaaggcacgctttctgcagaacgtagtagatacaactggtttggcagtatgaatcacttagatcatacaaactagaatatcagctaagaatacatgattcagagaagtaccgcagccactttaatatggttgaaagttggtacccagttcggtgtgttaccggcaaacattgcccattggttcgagaccggggctggtgccacgtctctctggaaggaaaatgtccatttgcttggtgagggaaaattttcgtcacatggaagattatattgaagctgtcactggaagcaccaaaagggtttggttttctctgtgttgtaccatttttcatttgcacggcacttgaaatctatactgcactaattgcagatgtgccgagaaagatatatacacagaagcaatgtttgtcacatcatttttcactgtagcaaattttgatgagatcaatggctccagctcctgtgaaatgaatgtgattgttctcttgagtgttgacccgccaatgcactcgctgtcttcttctctctttttttcctgagggcatcatatgcatatttttggctcgtggggtttgcaccaactggcattttgcccttttggtgcttgtagattgcagatacgcggggctagcgatttactggtattttgacgggctgttgcgacaggttggtggagcacgcgacgtctccctccccgccgggagaacgcgcgccacggctacccgcccgctcaccaccaatcgttcaaagcggccgcgcgaactaagcagcgggaccggatcttacatcactgttcactcatcgcgtgccatgcagacaaacgagacgtggtactatactacctcattcctaaccgatcccagtcgaacagttgttagttcatggtagcatgatgtgatcatcccagaagagtgtgtttttcctcgcgtagttgcggataatgcttctcctcgaacgtctgaagtaaggagaaaagtcggacaggcagcctctgacacacgtacacctattcaagactatatctctatctccaaccatataacatacacttttaacgatatttaaaacgaatttttttcttaaattacttagctgatctacaattcgatcacaccgttatattcgttataattaaatctttacaacaagatatcgcttgattatattccgatacaaaataatcatatgttttaatccattaacattttttttcttacgtgatagggacatgtttcaatatgtgtcttcagcgtgtttcacaaaattcactcacaaaactaactgttactactctctcctctctctctccacctcatgcatgcatgcatgcattttaactagtttcaaaacgatttttctcttaaactaattattcaacctacgatctgatcacaccgttgtattctttgtaattaaatctttaaaacaagatatcgcatgattatattttgatgaaagaaaaacatatgtttcgatccattaacattggttgttttatatgtgatagtgatatgtttcaacgtgtatcttcatcatgtttcataaactttttaaatgtttcagttgctgatatttttgtttcaccatatataacttgatgtttcacttgttagttaactggaacatttgactgaccgatttttttttgcatgctgcatacacaggtggtgtgatgacgtgtaaacagtcgggcgtccgatatttggtggaatatcggacgtccgatgcggagtcatctcccgtagttgcccgttgccaatttttttctacagtaactacaacttctctgatatggacaaaaatccaaactatttaggtgagtttctgtttatggaagaagctgcagctgttaaaaactctcccaaacatatccaaagatatttcctacgctcatctctaggatatttgtaggtattgtagggctagtttagctcccatagtcccattgaagcgtacgtgcacacaaccaaaaatgtttgctggagcagtggagagcacggaatgttagatagcacctacccttcaccgtcaaatcggaactacctaagcttatcgatcgggtgatcagttatgctaaaggcctgcagctagctagagaacacaaacgcatcgatgagtagtagttggaacgtgccactgcccactgcacgactttagttcttcgaccctgtgtgagtagtagcgaacccagcctctctatgtagcgtgctccacccgtacagtacgcccctccctatatacggatgatcacgcagtacacgctctccctatcgtaaaacccgcgaaaaccacaaccgaaacgcaagggtcgatccatccacgcctatcgcgcgcgcgtgcatcgggtcgatcgatcgagatggcgccggtggccacgacgttcctcccgacggcgtcgaacgaggcgacgctgcggccgtcgttcgtgcgcgacgaggacgagcgccccagggtggcgtacaaccagttcagcgacgcggtcccggtgatctcgctccaggggatcgacgaagcggcgcgggcggagatccgtgcccgcgtggccggcgcgtgcgaggagtggggcatcttccaggtggtggaccacggcgtggacgcggggctcgtcgccgacatggcgcgcctcgcccgcgacttcttcgcgctgccgccggaggacaagctccggttcgacatgtccggcggcaagaagggcggattcatcgtctccagccacctccaggtacgtcacgtcacgtcacttcacgtcgttacgttcctagagcactcgaagtcgacgcacgcgcgggaacggcgacatgtcgatcaccatgtctgctctgttgcttcgtcagagcagtgatcaccgaagatattcctatgccaatgttgactaggttgcaattccaatggtttgtcgtattggcctcggctgctatattttcaaaagaaaagaaaacgaatggaatccttacacaatcctgaattctccaaaaggatctggtaaaatattcttgtgttatatttcccttcattagccgacgaacagtttggagagacgaactagtcatgaaggacgaagacaacaggagtatttttttttttagaaaataggagtagattactgtcttcaattcaacaaacaaattgacagatcccatgttgcactctaaacttcaaattaatctcatttatactgtttctgtacagtctttgtgaatggacagacccgtacgaccaatgagaggccaagaaccttaacctttcaaacttccaattgtttaccaccgtttctatagctgcataacttcctattctttgtgcaccaacgtttctgtagctatcatcttcgttgaaacaattaaatatatttcggtaaatctaactcaagagcatctcgatttagtcctaaccagcgacacgacattgaccggaagaatttacttaactatagtaatactagtccaacaagtaagtagagaaatatatttctatcacctatgtttcaaataaaattttctcttagattactcatcgaatttacgatccgattacactgttgtgttcataacaattaaatctttataacaatatctcacatgattatatttttgataaaaaaatacaaattacttttataatatatctaaattacttttagattttattaaattaccttttagacatataaaagtaaattcaataaagcctaaaagtaatatatatatataaagtaacttaaaacaaaacgaaagtaacttgtcacgacattagaagtaaatccgttgtggggggtaaaaacatgagtctatctaaaaattaaatgtaattagcatacattatggaattgattaaaaatggtaataaaacaaacaactcacaaaagtatttttttatatatgataaaagtaacttacatattaataaaagtaattcatagatattttttaataaaaaaaatataattatgtaaggttttgttgtaaatatttaattgcaacgaatacaatagtttaatcggattatagatcggataagtaatttaagagaaaattttataagaataaaaaaaggcatacattgttaggtatagacgtaaaggtctctcattaaaacaatacagtgtacagtctctgtgtagtcacgtccaatatatttgtcagtttcaatttacagttttacacgtttagagtttactgtaacgtgcagggtgaagcggtgaaagactggcgggagatcgtgacctacttctcgtacccggtgaagtcccgcgactactcgcggtggcccgacaagccggcggggtggcgcgcagtggtggagcagtacagcgagcggctcatgggcctcgcctgcaagctgctgggcgtgctctccgaggccatgggcctcgacaccaacgcgctggccgatgcctgcgtcgacatggaccagaaggttgtcgtcaacttctaccccaagtgcccccagcccgacctcacccttggcctcaagcgccacaccgaccccggtaccatcacgctcctcctccaggacctcgtcggcggcctccaggccacccgcgacgccggcaagacgtggatcaccgtccagcccatccccggctccttcgtcgtcaacctcggtgaccatgctcacgtgagtactacggccacactgtatccttggtgattttgttttagatcatgcatctcttaggcaatgtgaacttgcagtatctgagcaatgggaggttcaagaacgcggatcaccaggcggtggtgaactccgactgctgccggctgtcgatcgcgacgttccagaacccggcgccggacgcgatggtgtacccgctggcggtgcgcgacggggaggagcccatactggaggagccgatcacgttcgcggagatgtaccggcgcaagatggcacgcgacctcgagctcgccaagctcaagaagaaggccaaggagcagcggcagctgcagcaggcggcgctgccgccgccgccgccgacgcaggtcgccgcggagttggcagcacagaagcccaagtctctcgacgagattcttgcctagatcgccatggacgcagcgcgatcgatgtgtggagtactgtggactagatataagtataactatgctgtctatgcatttgcagcacgaatgcttgaagactgaaataatgtgtatcttccgtcgaaaatcgaagcagtcgtaatactactaatatagtagtaaacgaagtaaggactctttacatgagaccttctttacattttcagagttgtcttttctctatatcggctaagtaatagctagggacagacctcccgcctccctttgtcaaagagagcaaaagggggagaactttatatgaaacatgaccaaattcacttatgaactgaaaaatatctcacgctcatgacctttaaattttgataaggaacagggcaaacatatgcagacgtgataattaactggccaattgcctaccactcggcaagaaatgcaggctaaatggtcctcatcatgcggcccaatcacttggtgcatgcaagtggaacaagttggcccacgagcacaagcatagatcgctgccattggtagagatccaacctgggccgtccatcccaacgcccgatccgttcgttcgccgctcacgaacccaaccccatattccgtgatcttttcgatctgggtgacctgagcactatcggacggctgtcatgaaccaaccccatgtcagcttgtcaggggccacaaaataaaaattacactgtcccgttcttgaggacgcgatcattgcgacaactcaaatcacttcatcctcccatgctttgcagtttaagtacacacgacaaaagaagagataaaaaaccaagctgattactgaagcctctatcagtctgtcaccccaccgtgcaccagccagcagtaataaatcaaaaaccggcagacgagcccccggtttcgaggtgcacgagccagccaggatccccggaaatgtggggcggctcaggtgaggcacgcgacgacgacgcgatcgatcgatcacacgtacgcgcggtgggcgccgtccccgttgcgcttgtgcagtgccctcccgcgcaggcaaaccatcgcatcgcacagggcagcgtacgcgcgcaacgcccgcaatctcgcacccgtacgtcgcggtcgcttgctcgccatgcacggcgcgcgtcgatctcctccggaaaggcggccgccccgcgcccgctcacgcgcgcgagcccgtgacaagatcgagcaggagtagtacgctcccatgccgcagcgctgttccatccgcgcgcccgcagcaaaaaggcaaaggcgccccgcgcccgtcccgactctgtgtgcgcgagccgaaaccgggcaaaactttccaatatcccttaattatacattttatacggtgtgctatgtgtgtgtgtgtgtgtatgtcgtgtgtatccgtcgtcgatgaactccgttgatcttaatttaaatattgtggttttgcatgcacgcatggatgtgcaggcggcaagttgcaaggcgtgacgaaataattcggcagctgatatgctgtaacgtggttcctgtagaatatgtcatcgatttcagtttggaggctccaaattaatgggtgatcgtactgccacacctgcaaaaccgtgagcatagcatagcagcagacgcccggtattttgcaatctgttggctgaacagtattgtcgcgcttgtcatcacggagaagccagaattattccggcccagtagagattatggacgtacaggtttcagtttcactgctgaagtgctcatgtgtgccggtgatggcgagggcccaacggtatgagatggtgaatcctcgtatcgtatcgtcacatgcagctagccagctacgccgaaaaaaaaaagaagcctctctttatcggaaaagaatcaacatagtactactccacttcctagtgtcaaatcatcgtgcatggtgacagattacctgtggtgagaactcaatgacctgttaaactcgacacgatgcaaataaggccgatgtttagttacccaaattaccaacttttcatcacatcacattacattaaaaacttttctacccacataaattactaactttttcctctaaactatcaacttttttctaacttctaacttttccaccatctaaacacagcctaaaccgagttacggcgtactctggatttagaacccgttcacaagtgggcgacctcaccatcaaaggcttatcctgaataatccatacaccagcctgttctggggccacgtacgtgcccagttgagatcagtagatcacctcgcaagggtgcatgctctgcatgacagatcagggtgcacatccaccgggcagacacgccgccggcagcacgtacgagctgcgaggaaagcaaaataaatgtggtgtacccctcgcccgacgacataagaaacgcatgtttcaacactgcaggtctcacgcgaacgcatccatgtatgcgtggtgcaggctgcagccgtgcagctggtggggaatcgaagccaacgggaggactacgtcgcagccgccttctttataaaaaagaaaaagaaaacaagatttgaaaggagatatatccctaaattacgagagtgttaagatagtattgaaactaaatattacttatcactgcactatcaagtacatctcgatgtagtcgtcatctcgctggtagcgaggaagattttgcagggcacgccggtgtgaatattttacattttaatcatttttaaaaactttgtaaatatataaaaaaaaacttattttaaaatggttctttttctcagcattagtgaccttcatgttcaacgtcttggtaccaacaacactaatgttaataccctcattttcttaaaatacttatgtcatcgatgtaaaggggatcgatgctaatgataatggcaggatctatttgtcagtcctggaatctagcacaccgatgatgactgtgtcttaattctgagttcggcgcacgagctgatatgcacgccagcttcgcgaaggttcggcagagtcctcctgccgtcctgcgtggtgaacgtgcgcgtttgagcggttgagccggatttaacggtgaacaggcagtcggtgctatacctgtatagctatgtactcctagctgaatagctgcgtccagtttcggggaaagattgttgatcagtttgggaactctccgcatgtacctgcccattgaaccaggggtaagctatttttacgtttgattccaacctccagaactgagaatactggaacaaaaatgatctatagtaaaagatccagactagtaagagaagactgtaagaaggctaaatgctgatatggatgagagaggagaggaaagagaggagaaacgggtaataagcttacagccggcttagatacataaaaataaagggcttgtttggtttggtgccaaattatgccctaccaattcattggtaattttgaatagtgcttctatatgtttggattggtgccaaattttaccaacaccatttattaggtagtacaaaatctgtccacccaaatttggtagtgccaaaagttgcctaaactttggtactaccaagattttggtagggcaccaaaccaaactggctcaaaaatttgtgagagagataggtggacatatattaatagttaagagctaatcactatgtgagttggttaagaggtaaactgtaaagatctactagtatacagtaaacaactatttactggctatattattagccatgttctaactcgatacgttgattatgctccaggaactgagacaaacaatatcttttgcttttgtttcagactttcaggtgtgctaatgaccaggttagcatccctgtaacatgtgaaagtgaaacatgggattgtaagcattcccaatctcgtgttttcactttacactcagcagtcaggactagagcagtactcgtacggtggtagcacagcaatcagcagcacccagacttcgagaaacgacacaaaccgcttaccgatgccaaagtatcgcctcacctgcgaaacatacacgcacagtcacacactgacacacacaaaagaaagaaaaacaaaaggtgacacatgtcgatgccattcctgcaattttcgcccaactccagtggccaacacctaaccaaactgctatatattccaagtccgtcttgccctcctccaaccaacagctcgcgcgccaagcaaagagccaaagagagatcgaaaagccaccgccgagcaacaaacacagctcgctcgttccgccattggccgccgctcaatcgatcgttcgatcagcctcattctcgccgtcaaccatgtgcaaggtcatcacgatccagtcgctcgtctggctgcgccgcacggtgcggcggtggcgctcccgcgccgcggcgcgcccggccggcagcaagatggagcgggacggcgacgcggttccggcgggtcacgtggccgtgcgggtgggaggcggcggggaggacgcgaggcggttcgtggtgcgggtggcgcacttgaaccacccggcgttccgggagctgctccgccaggcggaggaggagtacggcttcccgtccggcgcctccggccccgtcgcgctcccctgcgacgaggaccacttccgcgacgtcctccgccgcgtgtcctccgacgagcgccacgacctggccttctgccggcccgccgccacctgcggcgtcacgaagcgccgcgccgagtcgtcttcgtcgtcgtcgtcgcgggcgccgctgcttcaagggatggacagcctcgtctggtgatccgcgccaatccgaaagcctcgtacctaagccaccgataagcaaaagcagctgcaaaccgtgcacgcgcgtccatgtcgtcgatcggcggcattgcagctggtcgttcgggcgcgcgtggcgaccgcgggacaagaaggccgtgcacgacacgtacgcacgcgggcacatgcaagaacgcgcgctggggcatgcatgcgacgtctaaagggcgccctcccgtgctcggcgtaatggcggcgcgcgcaactggggcaggcggccggcacacagtactgtagctagctaagctagctagcatagcaagtaggctatagctatctgccatgggctgacagctactacaagatatactaatctgattgagagggtggtgatgattttaggtattcttctccctgtaattctactcggaaattaataaagaatcgatatatggcttattgtgtagtgcatgtatgcgttttgtcgtcgtttgtcatgtgctcgtgatgttgatgtggcaaacttgtctcaacccaaaatggtttggatctttggatatgccatgtattagcctttaaactagtggcatgcctttgtcctagcttctagcagccggaagtccggcaccagtcgataatacaggaaaaaataacagcaaaacaagagctgcagtgaacacgatggacgacggatgaacagttaatgcggatagtttagctagatcaaagtcaaggcatatggacacatatggttcaatatcaatgctagtggatactcacgcgttgcaacaggccattagaacttcttttctttaccgagaattgatttgatgattgatgttttacatacactttgataaaatggttagtatagtttgatggctaaaaatgtgaaagctgctttataacaatcaataatgcagttagtatgttgtaacgatgtaggaaaaaaaatatcttcattccaaaatataacaacatatgatcagatttaaagtttagaaaagaggaagtaaaaaatacaagcggcggagctaggggccggtaaccatgggcaattgcccgggctccaccgccgcacacatcattaaagcaagtttaatagtatagccaactattggcttcaaattatctatagtcaatttaatagccagttcatacgatagttacctataaatatatattacacaattaatatctagtcccacatgtcatacacacatatatgttggagtccgtgctgcagctggctacaaatctgtagctcgttgttcttctctctcctcttttatcttcttaaaatgtgtttatagctggcttatagtctgctattgtacctgctcttagagtagtcttaaatcatggtgcttaaccacaacatacagcagtataagcacactacttggttgggacactttaataatttgtataagtattagagagcatgcttagccacaacatgcagcagtataagtacgttttaataatctgttaatagatgttagacacacaatcatctagagtaacctgaagcaccatgaatgtttactagatcgttgtacctattacttgagtgcaagttattagatgtctacaacctgaaagcaaagtaaattttctagcgtccattatattttttttcattttcaagataataaattactaagtcccatagtctgcaaaaacacaaccatcgttttcctctaaattagaatacggtaaaaaaaattgttgtatggtgcatagtctatggagttatatgagatttgttatatatttgttggcgttgttaataaggcttgcccaggctaacaaaagtttctagatccgccactgcaaaatacatatgtgcatatgcatacctacactccattcttagtctctccgctctcatcttttgctattgctgtctaagggcagccacaatgtgaacataagggtgggttttaagactctaaagtgaaccttatatattgtgagagtagtctttataggtggcatttatttgagctagccatatgtataaagaccacccacaaggagtaaaaaaaatatattattctttcctctctcataatagtgatactctctctccctctctcaatggctaatcttgggtttgtggggtccaccttaatatccactctttccatatacattgtggacatgataatatattttagtgtgatccaccataatagcaatgtagttcatatacattgagcatgccctaagacgtgtaagctagcatagtaaataagtaatccctcctattctaaatattaaatatttataaaaaattgattaaatttaaaattctgtccatcagttatatagtacaaaatctaataagtttatgaattatgataatatttgtgagataaatctacatgtatcatttcttttattttgagactaagtatttaagaaattatcgatcgatagtaagttggtcttggaggagacgaaataccgtttatttgagttgcttcgtatgtgagactagggttcaatttgttggtccaccacaaagtgtgtttccaccctcttgccaacttgtatataagatctgaggttgataacgctggagtcacataatagcagagttggtatgacaattcaatttgtagggaccagattaaactttaaagcatgcaattcgaaccacgtatacgcttggattcggacgtggcaggttcctgtctttccgatccggatacggattaatggtctctccatccaggcatccatttcggcaaatatcaagctcgtccgcagcaaataagcggatgtgctgcagctgtccaactcccaaacgaactgcacgcctgagaaatagcagggctactgcctcatgaaattaatcagctaatttcaacagttggtttaactggtttgatgtaattttggagttcttaggcctgtagtctcacaaccttgtttgttgtacgtaatctatattcaaactcttctttgtcttaatgaagttggccgtcgtttcgtcgctggcctagcggaaaataaaaacaaaaatcaagctaatgccatcatctaggacatgcatcctgccaccgtgtcactgtcaattccacactggattgatcagagtactctgggaacagtgtcgcatacgccccctcgttgcacatttcagctgcacaaagttgagtacatgcatcttattatgctcctaattactaacacctgtcgatagggacttctagtacaatacatttaactgattaaagcttggtctgatcatccagggtaaggcagatctggttcagctgaggattcataggacaaaacctcgttccagacaagatttgaagtctgggctctggaccaactgatcattcagaatgctgtaggattcatgggacaaaatctcgttccagacaagatttgacaatgctgaaaacttcactgcatgcatgtttgcgacctctgcaccctgcaccggatatcactatactaacatgtgtcacctaaatagaacaacataacaaaattataaaccataaatttctgcacttgccatgtctatatactactactagcacatggatctttttgtttcaagataaaactaataattagctaattgaccatcgtatcgtagccacgtagcgagctgaatcgtgtgtaccccagggcaattccaggatggatttcagccagttacactgcactttcaggttcgttatctctgaagattatatccttcgctgccgccaagcatctgcgctcgtgcacgacgcctaaggctcagcgcacgatcacgaaggccgtgtacgtgtcagctcgccaaggcggtgaacatgcacaacccccagaatctttgtgaaatgatgaagaacccccgtggattgagcgactgttccaaccgaaattggtttttgtccttttggttgcgagatcacatcatctagctacacgcaatattatcatctaataaaatgcaaatgcattatgcatgagctagataggagctagctgagtgctgagaggctgagacaagagagagaaaaaaggttcttatttttagagtgttccggaataaattaactcgtcactcatagatgtatgcatacacatgaatgaccagatgcatgaaccgggcattctggtgcttagttgtactaatcgtgactaacaattaccagtgcattcctgcattgagtattgttcttcagattaattaggaaagaccctgagtttctgcgtgttcgctagtgattctttcatattggaagtctatgtgctatccagctgagctgaaaaagaaatgagtttttttctaggcatgttttatatatgtagtatatatagattactttgaaattagctacgagtcacaagaatctagtagttaaattgctatgcagagtcagccacatgctcccatgacacacatggcaccaccacatgtatcaccatggtcatggagaatcatcatttgcaaggcatccagtatgctacttaacaaattgcaaggacgtcaagtgcgtacttagcgttggtggttgacacgtagagcatctgtgaagcacaggacaaaggttgatttggtgacatatgattagcgaattaggaaaaggacgaatagactcatttggcttataagcctacatataaatctcctcctcgcaatgttcccttcacacccttttctattggcgagatcataaaagagaatctctgttcggtgaagcgatttagaaaggggaaaacggatgaaaaatatgattatattttggtacgcttaatcatttggctaatcatttatcgtcaaacaaggttgatagttaaagacgtctaataccattttcaaatgtgtacctgcagctaatcatgctactccacacacaataagattcagtcagaactgggtagttttaactaaaagtgcaaaacatgtcaaccgatcatgcaaccaactatcctacagtagtttatactctgctaaatattcaggcttctttatactctctaaatatttgtattcgatccttgcacgcaataatttttttcagtaaaaatatattttttgttattacatagaagctatgcatgtgtacatcgttgtttataaccacgcacacccaactcacacaagcaaaaacatttctcgagaaacaatatggtgatactgtaatcgcaccagcagtcgacagtagaccaaaattaaaaatttgttcacagaaaagtaatagttcacgtcaaatcgtttggatattgtggaggctaagccttttatgcggtacagcgagaatgctgaatgcatctagacaaatgacactctgtctaaagttagaaatttgaaccgttctttccaatgcatgggcactacttaggctctgttcgttacagagtgacaggggagatatgtctcattttccacgcgcacgttttttaaactactaaacgatgtgttttttataaaaaaaaattctatagtaaagttgctttaaaaatcatattaatctatttttgaaatttaaaatagttaatacttaattaatcatgagctaatggctcacctcgttttacgtatcttctcaatctcctcaatccccttctccttaaacacacccttagagtacaatataacgcaatgtacgacgttgcacttaaattgatgtgaaacatatacaatgtttctgttctatctctcttttttcgcagcttcgctggcgcaaatagcaaaagatgaaaaggctatgtctgctcctttttttttttggttgcacgccctgctgattctttcttctttggcgctttatgacgagacagtcctatgataatattatcaggaaaggttggaggatgcactactagtgcgtaaaaaatgtatgatagtttatgcctgcaaatatatattcttttgtttgatacttagtgctcgcaatcttcctgaatcactggctcgatcgagagaagcaaaatgcagtagcagataatgatcctgcaggccagaaatgaaaaaaatcgaactgacaagttactagtacaccggtgtttggtcaggtattgtctgctacgttgcatatacgtcaaatttcgattcgttttgctttggctgtttacgataagtgccatgttaataagcgaaaattaaacatactagtcatgaacagagaaaaacaaaaacagtggttagccttagtttgtttcatcagcatgattaccggctagagctaaataactactccctccgtactaaaatataacaacttttgtttggatgggatatattctagtattataaatctagataggaggcactatgatgcattccattcaaccaaaaattgctatattctggaacggagggagtagctagcttacttcaccagttgattttctaaaccttacataatctttttttagataatcttaatttagcaatttagaagtatgtaccaatacattacattccttggtgttgacacttgacatttcagactgaaagcaaacgatatatcctacttattgcggccactctgcatgctaattaagctcatatactttgagcagttcttatttttatggtacactttgtagcacgtcatcgtggtcctttgatcgtttcccgtgcatctatggcgatcatcacttggttgacaacagttaacacgaattttaaaaataaatggaagttaagggtgtcatatagttagtcataggatgcaaaagagaggatggcatggaaagtaaaccgtcatcctcatcattctgggctgcaacaaccgttgtagacagcagccaagtatgaaattcctaaacaaattactagtagaagagaatccttactttagtggttcagacttcagaccatttctccttttgttgttgttttatagctttagaaaactagagatccagcctgaaaaggcagaggtgtgagtactttttttggacctcttttgttaaactttcaccggccggaatggatcaggatttattctttaaagcaagttatccttactgctactaaatttgtaataactccaaattaattatgcaagcctcaaaaccaccggaccaaagtacactgtatgtccttccaagtacacccacttggttgccacttgccccggtggttatgccaaaacaatacgacttcagaccattagacgctaaccaagtttggcgttcacattcttatgccctctgtgacctgtggaatggaacatcacctcagctttcctctagggtctaggctcaactggctgaaagagcaccaatgcagccagtcaacgtgatgacgtaggcaggaaacttgaacatatgcggatgggtttttaattggatttagtgagattaaagaaatagcactgatataatcgtgtgttaattgatgtattcgtaggtgtgtcagtggtgctgtgtacaaggtggtgcatgtacttatgcagtcctgtgatcgaaaaaaatagtgaatttaataaaactaaaagtactttgatcaaattattataaaactatagatttgacactaaatttaccataaaactaaaatatcacaaaactacatatttagtaacaaattttgttatcacaaaactataagttttggtgacaatttaatcacaaaacatgaacaattataagtccaacataacattagtgctaaagatttaagccccataattttgtgataattttattattaaacatgtagtttatgatgcttagccttaaacctatagttttatgataaatttatcgttaaatctatagttctgttatatattaacttaaatatatagttttatgatgatttgaccaaagtacctgtactttcgtaaaatttactaaggccctatttagatccctcttcaaaaattttcaccttgtcacatcgaacgttttaacacttgcatgaaatattaaatataggctaaaaaataactagttgcacagattgcgactaatttgcgagacgaatcttttaagcctaattgcttcatgatttgacaacgtggtgctagagtaaacatttgctaatgatgggttaattaggcttaataaattcatttcgcggtttactgatagatcctataattagttttttttattattgtccgaacactctacgtgacatctatataataactgatgtgacacgtcaaaactttacccctagacctacacaccccctatgtgttgacgtagcaggcatgtgactgacaagacggacgagcagctatctcgctcaaactctgaggagatggaggcggttagtttgcgacgaaaagaccaactggtggcgcatgggcgagccaccgtttttccaatgctcgtcgcgcaatcggcgtgcccactgcccagctagcggccaagcacgcggctgcctcccgccgcaccgaagcgcaaaggaaattcgcggcccggctgcgccgcgcgcgccgcaactcgcgacgcgagcctctccgttcattggccaccgatcctccatcatccatgcgtattcctgcgtgacaacttgcggttcgtttttgtttaatctatcgcggaatctgtgggggaaaagacacggtacggaccacacgtctcgtggtacttcctgtcctttctttttgggggggtatggaacaccgttatttggcgcgtactagtacgtgacaaagtgacatgcccgtctcgatgtaaccccgtttggtgcgtgtgtgcacgtacgagtgagtgtatcacttcacacgtacgcgccgcccgtggttcgaacagaggatgttgtcctgatcgacgcatatgcagtatctctatgaattgttattcttggtattttctggggcgtctggttggttggtcgacagaagcatcaaccatgatgaaagttttttgctctcttttggtgtacgtccatgcgatcgaaggtgcgtacgattcgggtgtacgatgagaaaggaaccgttggcttgtcgcgctagtttaattactcctttgctaatttatgcataacaacaaatacgtacgtgcattaagctgtgaatttgcacgtatgctcccttttgttgtcagtggaacgtgctagacgaagacgagtattatgttcgtaggctagttgctggttgagtcaatcggtaacctctgccctctcgtggcaactggcagtgcgagatgtggacttggcaaccaaaacaaaacaaagcccaactagctcgtgaactactatggccaacgcaaaatgtgaccccatatgatcatcaaaattactgcagtattaaactttgcactgcattggttggcagctagcgctgctccagcgacgttgcctgtacgacaccactacctaggcgcccaggctcaggaccagcacgcacgaaccaggggacaggccacattccacgaggtgcacgtaatgcacggcagggcgatgctactggatcgcgcaatagatgaccgggcgaacgtacgtaccgaccgacgtacgctcgtaccctgcgaccaaccacacccaaaccggccggcgaaaactgccacaaacgccgtagcatgccggctcgcgcggcctcctccccgccgcctgcacatttacttcgcgcgcctactacggcgtgccgcggcaacagccacggcacatgggtgttggtcgcgcgcgcggtgtgtggggatcacttgcgcggcgcggcgtttacccggggccaaatcaaacgcgcggcgcggcgcgccgcgccgtgccgtgccgtgccgcgagccgcgacgcgagcatattccaactgcccgcgcgcgcgcgggcgcaacggcgacgggctaacgaacgacgacgtacgcggcgcggcccaatccggcacgaaatcctcctctcgtcgccgcgcgcgcggcggcatgcacgtggagagcgcgccgcggccacactctctccactgcacctgggcgagcatgcatgcggggcatcttgctggtattcgtatcgcgttatctacctagcgaatcgtggagtccgcggcggccggtcggcccagccgggagcgtgtacgacgccagttttatcggagttctttttgcatgcaagggcgagcttagctagtcttttggaccatatgtacgcacgcagagcaggtacacgcatctgcgtgatttcagtgtggcacgtgcaacagtagacgctgcatgctgcgatcagtgactgacgactgacgagacgacttgggttaacttaattagccgaggtcttagctaggaaaagggaacggaagcatgcatgtgtagtctctagttgcttacctgggaagcatgtcgatgcttcaggacagttaaccggtatcacggcttttgacagggatcagattctggacggacgcacgactgaaccgcccggatcgatgcttaattttgtcaaagaagatgtaccagcgctatagctagtaagaatggaacaccctatatagtataacaaatccttactcgacaaaaggcttaattagttacactagtagagtgcacatggcggttagggatcgttaaaatgtcgtaatgcacttcctacccactatggatggcattgccaaacaattgtttatcgtactgcaaacttactgaactttttaattgaagaaggaagagcatggcaaccagttagtaagggcccgtttagttcacaaattttttttcccaaaaacatcacattaaatctttagacatatgcatggagtattaaatatagataaaaataaaaactaattgtacagttaggggggaaatcgcgagacgaatcttttgagactaattagtccgtgattagccataagtggtacagtaacccacatgtgctaatgacggcttaattaggctcaaaagattcgtctcacggtttcccgatgagttctgaaattagttttttcattcgtgtccgaaaaccccttccgacatccggtcaaatgtccgatgtgacatctaaaaattttctttttcccaacttaaacaagccaagatgaatcatcctcattttagccaaaatgaaatgcagtatcaaaaagggtggaggcgtgtgcaaataattaagctcgttaggtgcgagaggggacatgcatggcctgaaatctgcggtggagatctttgacaggtacaggaccggcagggattttttccatcacgcaggcgcaaaatctgatgagagatcaggaattcagacagaccaaattcgggcacatgtagcccgattgactgcccgctcagccccggacacagccgggtcacatgcacgagcacaccagtacaccaccaagctaagctaccctgcatgctcatgagttgcttggccaccctgaccacctcactgtcactggccgcagggatccaccacttgagcaagctgatctttttagttcccaaaaacattttcctaaaaacatctatcaaatgtttagatacatatatagagtattaaatataaataaaaaaaaattaatttcacagtttacatgtaaatcgcgagatgaatcttttaagcctaattaggtcatgattagccataaatgctacagtaacccacatgtactaatgacgaattaattaggctcgaaaaattcgtctcgtgattttcaagcgaggtatggaattagtttttttattcgtatctgaaaaccccttccgtcatccggtaaaacgttcaatatgacacctaaaaattttcattccaccaacttaaacaggcccaaagtaaacgattcctcctagctcgtctctctgctcgacacagggacaccgccgatgtgatgggacttcgcgatgatgtgagattgtgcgcccagttaagcttaagctacagcttagctacagcgacccacgttactatgtacgacgccgctacgctagcttgcgcgagtcgagtcaccgatgcagcacgacaaatgcgcctcctgtttcagatttgtagcggcgaaataggaagtgagctttgctatagtggccctgaatgcgacgggcattcggctacacgtctgcaagatgccaaaatgtgctagacactgccttgtggtgcactctgcaattcctgtttcagaaagttcacaagcagtccgtggtttgtccttgcatctccaccatttttcaatgtgtgtgatgagcttattagaaaacataagaaatattaagttttgatccttataattgggctcatgttatccacgcgaaaagggagtttgttgataagttggagatggaatgccgtggtgcatgagtaggatttcttgcgagacagccaattcgttagtacaaaaaaaagaaagacaatatgtacacatgacatttggcgccctgtttcatcatgttttaaaaattaaaacacactgaaaatgcaagtgaagtcatcaattcgtttttatgcatactatcatgcatgtatgatgtatcgctgtgaacataaactaaaaagtgacacacaaaatttaatggctagtccaaggtacaaacaagaactatatcatggctacagttttcggatcctattcttagacaaaatagctacagcactctagaagaaaacgttcagatcacagatcgaccttcattggagcgttgtgaaagaggagtaatgagcaatatttatagatgacttacaaaattttgaaatgaaaaaaacagcacggctatatcatcaaccacatgtccttttccgatccttttcttctaatatgttgtacacttttttccagctggaattatttcatccaaccaaaagctcctccctccacatataaatcaaacctcttcttagacccaactcttgcaaattatgggaagaatgacaaaaagacatgcgtgaatgtgctgaccccgtgcatgcaaacgtgtcctattcccttttgcaagcgattttaagctttaactttcagcatatatatttttataggtagaaaattttgttatataaactttatatttttatagtataaactttctacaaataagattttaaagaaattataaaaaatcaaaacatttctactcaaaatcatgaaagtttatttgaatagttgaaagtttctactaaaaaaatcaataactttcaaccaaactaaaaaaaatctactcaaaatcatgaaactttcatatgaatatttgaaagtttttacttaaaaaaatcagaaaccttcaacctaaaatagaagggtgctaagcttatatgtgggccagatctaaggaagaaggatgtaaggaacctcatcggggttgcgatcatgaagcacaagtctagttcgaaaaggaggtagaagcaaatgcttgggatctttatcttggaggaagatgaagaggacctcaggctagtcgttgtctcgccaaagacgacgagaacctctaatgtgttgtggcctacaaggcgtaaacctggttgacgacagtgaagaaggggatgcaacgggaaggatgaagggggaataatgggagaggctagatttggtttcactctcttgtgttcacggagaggaacaaatagaaagagaagaggaatatgaatatcaaagactctagccttaatagatcacaagttggaagttaatagatcaccaagttggaacgtgttcgctcgttaaagtgacttgggtaagttcggcaattagctatcccaaagaatggtgcatctgtgggaggctaaaaaagaatttgattgttagatgtgacttaagtgttatagagaaaaaatttattgaccgacattgcgagtcagtctctaggaaatacaaacttccaatttaacaagcagcaaatccatacacatcaacattccattccgtcacttgaataatttggtatgtacaaacgaatatcaaaggagggtccaacaaaaaaatgaatatcaaaggagggagtgaactaaggttcattgtgacacatgttacacataattattatgtgagtggtaaattatatgcacattgatggtgatatacatgtgatagcttcgtctcaagatacattgtcctagttcctcaaagatagttataaggacatggtataaaagtgtatgttcataagactaacatatatataagtgtctgtgtttatactatgtatcgaaaaaaaggaaatgataaaaatgaacaagaaagcttacatttttttcacctatggaggaatggagcataccgtagaactcaattgaaattattttccttacaaatgggcttccctaccatagatagacaacatatgcatgcatgggcaaactactaatccaaatgaattttccaatgtttgtttcctatacataccaaacgatgattcaaaaatcccaagataaaaaaagattaaatacagttttcactttatagtaatatatcatgtgttacatcactattaaattaatttattttagggacgaaaggagtataaaataggagaataaagtcacatctcgccgtagtattaaaaaactttgcgagccaactggacgacccaaaaacattttcccagttcgtctgtcccgtcctataaaacgtcccgccccgcccactcgaaaagccagctcctccatttcaccaactcacacccccacacacgccattaactcacccaacagcagctagccgagccgagccaaccaacggacgaacacctctctggctctctcccccaccgcgtcgtcgtcgtcgtcgtcgccgatggccaaatgcagcaagatccgctacatcgtctggctccggcagacgctgcggcggtggcggtcccgggccgcggcgcgcgcggcggcggaggcggtgccggcggggcacgtggcggtgtgcgtgggcggggcgtcgcggcggttcgtggtgcgggcggcgcacctgaaccacccggtgttcagggagctgctccggcaggcggaggaggagtacggcttcccgtcgggcgcctactgtggccccatcgcgctcccctgcgacgagggcctcttcgagcacgtcctccggcacctctcctcgccgtcctccgccgcgcggttcgtcaccctcgaggacatccagagcggcgccctctcctgctgctgcgccgccgccggcgacgccctcccgctcctccgcggcattgccaccgacaaggccgtgtggtgaatgcgatgtgtgatcccacccctagctagccgctccgctcgccattgcgcgtgcgtgcatgcgcgcgaccgttcttgccaccattttttttttctcttctcttcttgtcctcttttttcccctctccctccatggccatttgagaggagctgagactcgccggagcaagagaaagagagagaaatcggcgaccggccggcggtggcggtgaagtgagatggctgagaaagtcttaggattttgagacggccaagtctagtcatccattcccttgtcaaatccgggaaaattatttagcaccggagatttttattctttcttcttcttcttcttattttcacttaataattcgccagtgtaaataactgtactactgcgattattctgccaccatttcaagtgaattgaaacattctttctttacaaagcctcactgtctcttaattttctttctactgtacggtcctgtatgtacttgctgctactactactacatttctgtgtgagctgaagcttcttactatttggaccgtacggattattagggggcttaattaaaggtagcttaattagaaaaggatttgacacggtatcttctccttttgtgggaaaattaagaatggagcaggagtagtgcaagcttagtactggagtagaatatatgttcaagctgtcgctaggctgtttgcaatggtttaggtatgcattatcatggatgcatcgaccagctaccgatcggaattatgggctgataattgatactgcaacttaagtattcctagctactgctatcaatgttgtgtgcggtagtcaactattttctgttcttttctctgggactgaaaattaagcgacttaaattatccctgaagcctgaagatatcgtcaagctcttagcaacagccatagttcagaaaagctgtttttttagaaaaaaaaaacattttgatctactactttctagtcgaatctcaacacataacggtatggccgtccactttgcaccgaacaggcgaaacactgaacctgaagagagcagcttatcatttagtggtagtcagtaaacgactttgtatattgcactattgctcctagagaagatcaggttaattatgcagtggtagtatgcaaacacctctcaaagattcccctttcgaatgttcttcctcctctctctggatgattatttttgtccgtctctccttaagattactagattttcagcaggttagcctgcaaaaattcggcaatcagggaggaaaccgttttatccagtactggcccccggctaatccagtccaattattacgtggacgaaaaaaaatatcgtaaagttatgagctactcctgtatgtggggatggagagagagagagagagagtgtgtgtgtattcagtattctactgtgtaggctccgattgttcgagctataagccacagaaaaataaacatggtaatataaataatatatgaaatacaatttatatttgtgcgatccaaaagtaatgtcaaaattagattattgtaagacaactttcaaactaactttatagttaaattttaaaattgaaattttggttgtaattgacaataaactaataacgagaccagaaggagagggtcacttcagtactgttaatacggtagtaaaaacactgatgtgtggatccggagtggagaggatctgcatcccacttggtctacgtactccagtagtactcctattttttactgtgctgccgctgccgctgaaatggatgggtgcgattcggtggtgggggaggggaggttgagagggagggaggggcgcgcatgtgggccgtgggccccgctgcatgtgtgatgataccccggcccgggacggcgcggtgtggaccagcagccgcacgccgttgccccatcatcacctgcttctgcttgcctccgagtccgtagtcctttgcggccttttcttttttgcggtttagtcctttctcctccgcctttttgtgccccgtcctttctcccgtcctcccttcttcttctccgttgcccgatccgttccgttccgttctcgcgaagcaaaaatgcaaaactgcaagagtcggggcggcagccggtacgcctgcggcgctacacgtgcggctctggacacgtgggggtaggacatacaggcggcgacgttcctctccgggtaaatacggatttacgggcggtgaaatcctgtatgacgtcaaatttatttatttactccctccgtccgaaatactccctcctttcaaaatgtttgataccgttgagtttttaatacgtgtttgaccattcgttttattcaaaaaatttaaataattatttattcttttcatatcatttgattcattgttaaatatactttcatatgcacatatagttttacatatttcacaatttttttagaataagactaacggtcaaacatgtgctaaaaagtcaacggtgtcaaacattttaaaacggagggagtataagggattttaggtggatgtaaaatcccttatatttcgggacggatgaagtatttgttatggcaaattttatcaaaatgtactcaaaatttatataatttatccgtggacatctaaaaacctgacacggttagaggacaccatataaaattaaaaactagtaatttgatggagaatatcataatcattattctattattgagtaaagcacatgaacgatatctaaacttgtacggatgtattatgtagatccctcaactttcaaaacgtatttttggtaccgaacttgttttgggtgtcatataattctaaacgggttccaacccactctatgtactaacgtgacatgccatagcggtttctaaatgacattttttttgatagattaggaatctaaatgacatacccgcataattttaagaaccgtccgtgcacttcactctttactatttttatccaattggagagagatttttaaaatacaaaaaacacccttgatccatgagcttctaacctgtcacaagcaatatgatatagttggggtgatcacaggttgcgaattgcataatgtacggtttgaaatttttgggaaaaaaaagaaaatttcaaaaaaaatttgaaaatatagataattatgctaatattttaagaaaaaaacttttcatcctgcttttgattgaaagcaaataagtatgatatagttatatttaaaaggtttgaaaaaaactgtggaaagttgtatagctaatcccacattaaaaccggcataggattccactaaaaagaccgacgtaggaaaagaaacagaaatctagcaaaacagaactgaaaaaaaaaattcaggctcacacacggggcccacaaggcacgcaacgtcacggcccacaaggcccactcagcccacgccacaacacacacaagctcccacaagtcccaaccaaccctagagccgcgccgcctcgcttctccccgactcccgcgtgctcgccgcgccgcccaccgtcaccgcctggagcgtgcgaaagctcgccggtgcggtttctccgctcaggtaagtccacctgctgcttccgcccgcaccctgtaatcttcgtctccgtcggttcttgctgaatcgccggccctgccttgcagcgtgaaggatgaggaagctcaggttccacgagcagaagctactcaagaagaccaacttcctcgacttcaagagggagaaaggccaccgcgacgccatcgtcacgcagcgctacctcctcgtcgagagagacgactacaagaagtactaactcatctctctctccagagtatcaactcgtaccttatcggttggttaaaggattatctgtgtgttctttcgcgttttactgttcatcctgtccatggacatggatttgctgcaaatttgtgattttgtttttgggtggtggcaggtacaatggcatatgcctgatggtgcaaaagctcgtcaacattataaagcaaatggacccgagagacccttacagagcggagatgacagacatgttgctcgataagctgtaagtagcctgttgcgtggtctgcatacaaatttagagctggacagttacgatctacaattccacatgacccatcaaacacgttaggcacacaaatttgctgtttgctgaattgtcatagagtcagaatcgagattgctcagggaaattcagttcctgtatataatgtttcagagaattttatagcatgtcaactaattcgtgtgtttgaggaggggctgtgtgcctgtgtctatttttgaattaccaaattgattggatttgcaatcgaggctataaagtatatacacatgactagtttctcagtagttcatctgcttcttgtccagggacataattgtttcgataatcctgccaaagatttttcgaataattctcgctcttatgtttggatacgaacctcggtagtcctcttcttttttactcccaacattttgagcttggactggactaaaagattgatagacttgtgctaagcagaacttataatctaatgttactttctgcaatggattgcctatgcttgggtacttcatatagaactgtgcactcttaattttgtatgcttttcttgtttccagttgtctagccatttccagattttgtactactcatgtgtagtttgatgaagttcatgaaatttcaggtacaacatgggtgtaattccaacaaaaaagagcctgttaacatgtgaaaaactttcagtgagctccttttgcaggtcctttctctctctctctctctctctccatgtatatgtgctgtgtagccatcttttaccatttagtggcaaatgtttactcatctcagttcaacaattgttaaattgcacgtttcattggtcagctgtatgttaaagtgttgttgtaccactgcttcaacataaatgagacttaccatggctaaccacttaacaaacactataacctcgattagcacacaagactaaagttgtaggagatcagacatatcgtacatcacttattgcgtgtattggcaaattattgcaggcggaggcttgcaacagtcatggtgaagctcaagttcgcggagcaccttaaagaggccgtgacatacatacagcagggtcatgtgcgtgtaggcccagagacagtcaccgatccagcctttcttgtaaccaggaacatggaggatttcatcacctgggttgactcctcaaagatcaagagaaaggtccaggagtataatggtgaattggacgattttgatgctatggcttgagaatatcgttgagcagaatttctgggtccatcggtgtagctactcgtgtatgattttttttttggaactttttaaggtgaggtcgtgatttgctgcagagctacttgcatgtgcattgttgttgtcaatgttgtgtaatgcagctcaacgcctatgacagttcattcacttactaatacaattttgtagccgtttctctattacagtagcgctttgcttatgttcttgagtgtattttcctgtcacattacaacctgattatgcaggataattctcatggtcagattcatcgactttcatgtcagtgcgtggccaatctaggctacggattacggatagatggcccttgcttactctttgatgttctcttagttgtgttcgttgggatgtgttgcctatgtgcactatagttgtgtgcacaattttttcgctgagttcaaaaaagctttcattatcttaaaaaagtatgtggagactgagtattatacgctatatgaaccagtagcagatggcgcatactgcaaaaaaagaaccgtacttgattccaatcttcagtatttgtttactgcacattcaggcactataaatttacaatggtgcacgttatgccattcagcaagaagctgcatgcacattcaggccatgcataggtgttacttctaatacagttttcaagccgacattcaactggaagcatgagacccaaagaaagaatagatagctcctcacacacaaaatggattttatactaccatcatgtcctaaatttcagttcacaacactaactatgaatcttgagattcttcatcacctggtaacgtttgagaatccctactgcattttgattcttgcatctcgacctcaacagtagtcacatcttttgccttcccattttctgtctccatccttcttaccttctccttttgtatggctcgtagctcatacctacaaataaaaaaaaaaacagaacatatgtttcaaatgttgatgctgttaaattgtctatggtaatagggactaggagaacatgtaaatatgaaattcatagacttctgcggataacatttgaaatagcagcctaaatctatgaggtctttgcacatcaaatatcagcctatctcgattgcataggtggaagcagataatgagcaaagctgattgcaaagtctcacgaggctacagaggagttaactgtatatttggtctagtgtttacatgcctgtctataattttagcctggatcctgtaacttcagcactcgcaaggatgaataattcattttacctataatttcacctatttgaagtatatgcctacaatacctctaaatcttaggacatataattcagaccaaacaaggatgaataattcctttttttcaggataggtcatttaggtaacttaagttagtgaggtacaatggagaacaataaccttccaacattccatgataattaacaaaatcacaggatgtaaacggcaattatatctggcagaagcactacttcaccaagaagatagcaattaatgggcaatctcatgtttttgcatactcatcacttcatcaggtacagcaaacccaacttcttaaatatgtacaagggctcacatttgatgtaacttatctgatgagatataaattggttgtgcgtaatgttaagtgcaaggtaatgtaatgtccatagtttataattatgtactgtattaaattggattagaaggtaatgcataactcattgaattatgaaggaaaaagtgagatgctactctgatgttagcttgtgttgcatatcaatactcagaaactaaatttacatgacgataatcgaaataatttcagaatggaagcttacggagaagtgtaactcttagcgagcagaaagtatatcctccagaactgcttatccttcatgtggcgcgggcacagatcgtaccggatcttggccaattcctgcgcatcaagcacgcatgcgtttgctcaaacttccacaacatcctcatcacagacagagagaagcgagcgatacagaaccgagatccgccgggaagcgtaccttggctttggagagcacgagcacggcgtgccgctcctgccagccggtgaggtcgccagcttccacccctgcgagaagcacgcacggacatcacgatcgagcccggatcggagtgggaaggatgaaatcgagatggagatggcgagtgtgtggctgttgccttggagctggagcgcggaggacttgaaggagtccggggagagcgtccggaggaagtcgagcagctgcggcgtcacgcccagctcctcctcctcgttcccggccgcggcggcggcggcggcggcggcggaggacgcggagggtttgctcgggccgcctccgcctccgccgcctcggcggcggaacggccacgagaaagaggagaaggccataggggggacgagctgcgtttgcgcctcgcgatggtgaattcggcgatgggttggagaggatggccgcgaccgcgacgattcgattcgctacggcttacgaattcgccgagtcgtaatcagcagacgcacacaccacgcaaaccgttctggaatctggaggatgatttcgacgaattttgtcttgtgccttgtgccgatggagtttggaacgggtttattattattattattattattattattattattattattattattattattattattattattattattattattattattattattattattattattattattattattattattattattattattattattattattattattattattattattattattattattattattattattattattattattattattattattattattattattattattattattattattattattattattattattattattattattattattattattattattattattatttattttacgaatttggccgtgtgcttttatttttcagagaacagtaacagtttcaaagtaggaattgggaaaaacgttcgactgcaattcatttcgaggtagatttacaacgaggttcagtaagtttcaaagtaggaattaggaaaaacctgcaactccaattcagccgctacatcaaggttccaaaaccgttcgctgatcaagtactcaacggttgtccatttttatgaaaacgatttgaaaattgcaaaaatagatgaaagataatccagggcagtttagtttgacgtcatgaattgaattagttcaccagggtagtttttgaactcgagccgaagcgaaaaccacctgtgtgcacccatcagcgctccattgacagccgccaactagagaacacatacgataagcctcgccaagaaaacctgtcctagcaacttgttaggtatcaattacaatgttgccacaagccgaacaaactaatggttttgcgtcaagtaaacatttactagaagttaatcgtacgacaatccgcatcacaaaacatgatgcaccccatgaaacattgtatataagatcaagatgaaagctcaagaggtagtatgacctaagctcacagaatgtaaagtttgccgttgaccttatcgtacatgaaataaacatcgaaagtgtaaaaccaaggtcaaagacaattggttcaaacgccatcatgctaacatgtcacaattcttttggcttccactgggtccaaaatctaaggcaaataaagcacattcagctcccagcagcactaggtatggcggttggcttcgaatcctcggctttctcatgctccttgtttagcatctggaatcaaataaaaggaagtcttacaataaatgacaagtatctcctaactcccgcatcttctatattcaatagataagacagaaacaatttaccttgttattgatcaagttatggagtgcgatgacactccggataagagaagacaagtatatgaccaacatcatatcgtttgttttaactgcaggaaagaacattagcatcgaaccattttaagataagaaacccagacgacaggttcagctcaattatagtaaattggtgagaacatgtgttattacctgcaaaggctttaataagctcgtttacattgagattggggagcagattaaacacatcctgtgatttttttaaaaaataaacaggttattaactgcatcagtaaaattgtttcagcaacagaactttgaattatatttaaattttgtttggcaagttacatgtagtaaactgtcatgaccttcattagtttttttagacatgttgtgtcacagttttcttattaaggtagtgacaagctgagtaaaaatattagacaaaaaaccaacaaatcataaaaaacatacataaaacaaatttggccatccaaaagatcccttatatctcgcgtccaatgtattgtgaaaactaccagtagcatcacagggaattaccagtggcagcatattccactttgtaagcaacttttaagcactttttttatttgatttgggagtgatatttagtgatactgaattccgaacaaccacaataatggaggtgtatatctcaaaggcacaaatattccataaaaccaaacggcggtagcatgagatagctttcaagtgctgacctcaataatatagcaaatgcaagagaattggaggtatatgtaactcctaagaataccatacagaaagcaatgagtagaaggcgaacctgcaagtggtacaaaatctcatgattcagtgggagcttcccttcaattacaagatctaagtacccacggatctccctgagccttgcgtccagtcctttcaaggctgcaagcttgctggttacctttaatgacaacaatgataaaggatatattagggcataataaagcaacttgtaggctgaaaatgcatattcttgtgaaatattacctctgtcgcaagcgtgcttattgttgtgtccttgacatccctcagaagatgctcaactcctataagtaggatgaacatacatcagtcaacaatcctttctgaaggaaaaagacttcaccacaaaaatattctttcctcttggtgaagaaacctcactagcatcaacaacttaatatatttaccgctcaaacaagctaactattatctgtaacttgcaaaatacataaagcatccctttttcctagtaaaaacagatgagacagacataccgatttcctcaacctcgtgggcagctatttctgaaggaacatgaacaaacaccttttgacttttttgagtagcattctgtaaaagacaacatgtacattaatgaaacagaacaagacaatggacaagcacaataaacctccagcttcttagatcacatgctaacctctttaacctcctccacagcatagtatgctttggtgggtattcctaactccttgggttgaacatcaataatcaccaggacagggttaggaacatagctacaattg

SEQ ID NO: 10120 - DNA, 9410 bp, Oryza sativa
gcgcgccgccttcgctcttccaaatagtcgaggtcatctctgcgaagctgatcttgatcagcctcgcaatacatggtgacccgaggggacctcagggtgagctcagatgggagaaccgcctccgcgccgtagatgaggaagaaaggcgtttccccagttgctcggcttggcgtggttcggtttgcccagagcaccactggcaactcctcgatccacgagtcgccgtgcttcttgaggatgttgaaggtcttggttttgaggcccttaaggatttccgcgttggcgcgctccacttggccgttgcttctgggatgggcgggtgaggcgaagcagagcttgatgcccatgtcttcgcagtagccaccgaagagctcactagtgaactgggtgccgttatccgtaatgatacggttaggcaccccaaaccgagcagtgatgcccctgatgaatttaagcgcggagtgcttatcgatcttgatgaccggataagcctcgggccacttagtgaacttgtcgatagcgacatacagatactcgaacccgcccggggcccgcctgaacggacccaggatatcgagcccccagacagcaaacggccatgaaagaggtatgatctgcagggcctgagccggctggtgggtttgcctggcgtggaactggcacgccctgcaccgccggaccaagtcgaccgcatcgttgagagccgttggccaatagaaaccctggcgaaaggccttgccaaccaaggtgcgtgaggcggagtgggctccgcactcgccttcatggatatcggcaagaagctcgacgccttgttcccgaggaatgcacttcaggaggactccgttagccgcgcgccgataaagggtcccttccaccagcacgtagcgcttggagatgcgctggacgcgttcactcccttcgcggtcctcgggtagagtcttatctgtgaggtacgcctggatctcaacgatccaagcgatcaatctaagagagctgggagcgctctcctcgggtcccgaggcctggactccgacgggcctcgggggccgttcaggcgcgtccgtctcccctagggggtcggtgtcacgccctgaagtttccccctctccttgctttaaaaattggctaaataaatcgtccgaagaaattatcttaattaacctagagctaattccctaattaataaatgcaattaataattggaattggcattgtgggatttttcttgggttccacatgtcacaatatattaacaggatttttagtggaattttcagagccttggaaataatttttaccaattaaaaatcaccaaagtgcaatttttaatcccaggaaaaatcctttcttccttttctttttcttttccttctttctctgttgggccgtcggcccactccctcccgcgcccggcctcccctttgttgggccggcccaagccgcccctccctcctctctcgggacgccgacaggtgggccccacctgtcggtcgtctccttcctccggcaaccgctgctgccgtcgaaaccgccctcgtcgccgctgccgtttcccgccgttctccgcgccccactccgcccgcacctcgcgcccacgtcgccgccctctcccccgcatctcccggcccgcatgcgcgcccgcaaatgggcgggaatcgatttgaatccacctctctctctctctcctccccacgtcgccggccaaatcgggagggttcccggccacgtcctcccctccctcgcccataaaagcactcccccgagtcccctccctcgtttcccccatttgccgtcctctcccacgccccctaccgcgcccgcgccgtcacacccgagctccgccgcttgccgccgccttcggccgcgagccgccgccgctagagtcgccgccgcgccaaaccgccgccgccgttagcttcgccgccgcaagagctttcccggccgccgcctcgcgtcgccggaatcccaccggagcgcttctcccctcgcgagccggtgagttcttccctcccctccatctccggccggcaattcaagccgccgtggtcgtcgtctcctctcctaacgcctctccatcttctcctagggtgtcgccgccgctgtccgtgcctccgcgtcgccggtcatcgccgccgcctttcatcctccgctttggtcgccgtgctcaccggtgacgctcccctccgctcccctttttccctctctcccgtgtgcgccgccgtcctatcgcgcgtgcgctgtcgccttcagccgctgccgccgcttttcgccccgtccgtgtcgcttcctgcgccgccgattgccgtcgccggcgaccgtgcgcgtcgccgccggttgccatggccggccggccggttttgaagccgagccgagccgtgcctagccgccgccgtgccgtccgatcggcctcccggccgatccggaccgtcggtcccgtggaccggcggtggaccccccccgcgtggtcccggtccacggtggaccggccaccttgtgccgctgacccatggggcccgcttgccggcgcccccttcctctctcttgaaccgctgacatgcgggccccgcctgtcggcgccgcccccccttccgctgacgtcagccctgggctttattgcgcaataaattgattaaggacttttctttattagtaaaaacacagtttatcttctaaaattcataagtaattcatccgagctccgtttaagtccattcaagtctcagtaaatcaagaaaaatgcaaagaatccattaaaaatggttttgtttcctgtttctgtagtcttatagcatgttttgcttgtgtgctttgtttgtcgcgtaggcttcggccgtttcgtcgatccgcggtttctcgaagacgttgctgaggtctcatcagttcgagagcaaggcaagtcatgcaatacgtttgatcatattgtacccaatttacaaatatcccgcatttctattaaatgttgcatccttttacaatgtcatgtgggataggtcctaatactcagccatttattgtttaccttatgccattgataacttgggtatcaaaatgactagatgttggtttaggaaatacttagccatgcttagttcaactagcacacacatggggatcacattattacatagactttgactatgagcatagctttggattggtgccaccgcaatggtgtgagttaattaaaatacactgaatggtgggctgtgggtgcatggttttgctggtcgcacccatggcagttaaggaccggttcacgggaaaccctgggagacttaccgtgcttaccacaagcgggagtgggtaactgcttgatctgaagtatagctcgaccctttcctaggcaccggtggcgagggtgggcgtgatggagttgggtcggccggggtgtccggttgtccagctgccggattcaccgcggcgcaagaggggaccgcccactgccttttgaggggtgggggtgaaaccttagcgtggtgtggatggttaggggagggttatgtggagggtcttgtcacgatttccccctttgcagtatcatggtgatacttcggggcatggcgacatgtgtggaatcgtgtcttgtgggtacagttgtacacctctggccagagtaaaactattcgaatagccgtgcccgcggttatgggcgatcaaccagattcaccgtgattagtctcacccctagtttagcttaatgaactggtgtagttcaagtggttggttgggcctgttgcaacgtggtgtagcgttggacagtgtttggttaatgttgattaattactacaactgttttactgccttcaactaccgtttttaaatgctagctttatgcaaaagaacctctagcttcctttggttatatcttgcatcatacctcctcttccggtatgacttgctgagtacagtgggtagtactcagtcttgctctcttttcccccacaccagagctgaagatcttcctagttggagctgttttgtcaaagttggtttcgtcgctgccgtcaaggattgcctgtggagtggagtcgcccgctgctgaagtcaagcttcccggtttagctcgcttttatcttttccgctgcatttgtaatcttttctatttttgtaagacgtggatctgtatgtcaacaattgtcgtttgtgtaccctggctggtcctggacagggatttaatgcacattcagcttagaaattctggttcgagaatttctgggcgtgacaagttggtatcagagccgaccttgaccgtaggacaagccaactggaaaccctaagagccctctgaacccctttttcatatgcatatgcccttttgcacctggaattgtttcgggaaaatttggagttttgcctttttggtttgcgggaaaaatcttggtcgttctttcggatcggattttttttttaaaaaaaagaaaaaaattagctcagtctagggctttagaaaaattttagttggagtttattcgacagtcagtcgggaatttattgggggttatgcattaggtcgtgtctatattcgatgggggcaatgttatgcgcatcattttccatgcaactagtctatgcattaatttattgtttagttgcattagtgtctttatttgagttcatgaaaaatgttctatgcataaaaatcatcatgctcggttatttatttgagtcttcttttgctttgtttaatttggatttgagcatgagttggttcctatcccttgtctactttagatgtcagtcctatccctcgtttgcaagcgccgcctcgagcttcagagtcgccgcccttagctttatcgccttcttagtctgtttgcttgctagttttcgtgtttaggtttgttgcttgtgggttagtcggcggtcgatatcatgtgtcagtggtatgactgcctcaattaggagttgcgtgcctctttttcagtgttttaatcaagattaagataattgcacttaaattcataagcaagattagtttctgagccccctgtttttcttccttttctcatatttctacctatccccttcagatggagataaggaatggttcacccgactcgaacaacgccaatggcaggcgaagagccgatcaatggagcacgtgccaacggtgcatctgacaacagtccgtccccaccgcccgagaacccaacaattgctcaggtgttggacaatcagactcagatgatgacaatgatgatgcaacagatgcagcaacagtaccatcaggtgttgcagcaggtgcagcagcaagcacagctgcagcagcagaacctgcagtttggtctccacctcctcagtccaaactgttagaatttcttcgtgtcaagccgcccactttctcaagcaccaccaacccaatcgaggcccacgactggcttcatgccattgagaagaagctgaatcttttgcaatgcaacgagcaggagaaggttgcttttgctacacaccagctacaaggtcccgcttctatttggtgggacaactacatggtgacccgtccaactggggcagaagttacttggacagagttttgtcatagtttcaataaagcacaggttcccgagggaattgtggcacaaaagaagagagagttccgttccctgcaacaaggaaccagaacagttatagagtatttgcatgagttcaaccgcctcgcgcgctacgcccctgaggacgtgcgtaccgatgccgagaggcaggagaagtttctgtctggtcttgatgatgaattgactaaccagttgatctctagagattatgaggactttgagaagctggtggataaggctatccgtcaggaggagcactgtaacaaaataaaccgtaagaggaaggcagctcagttcaggactccccaggggaagagtcagaagcctcggttcacgatgggacatcacggtggaccttccaccatgattatccggcagcaccgtccctaccacccgggtagcttcaacaagaaccaccatagtggcagccacaacaacagtgagcagcacagtctcaaccctactccgagttcactaaagattccagctcaatcagttcagccagctctgccagaacagcccaagaggttggtagaaaaacccgaactctgcttcaattgtaacaaacccggacacacggttggaaagtgcccgaagccaagacgtgctggacccaagttcgttcaggcccgtgttaatcatgcatctgcagaggaggcgcagtcagcaccagaggttatattgggcacattccccgtcaactcgacaccggcagtaatattgtttgattctggtgcaacccattccttcatttccaagcgttttgctggtgcacatgggttatctttagtgaagcttaagataccaatgcgagttcatactcctggaggtggcatgaccacaactcactactgcccatctgtgacagttgaaattcaagggtcgatttttccagccaacctcattcttctcgaatccaaggacctagatgtcatacttggaatggattggttgacaaggcacagaggagtgattgattgcgccagccgcaccatcaagttgaccaatgcaaaaggagaggtggtaaccttccagtccccagtgccgcagaagccaaggatcagtttaaaccaggctgctggtgaagaacaagaggtagcagtggagaaaaccactaagaagctggaggatattcccatagtcagagagtatccagaggtttttccggacgatctgaccacaatgccaccaaaaagggatatcgagttccggattgacttggtacctggaactgcaccgatccacaagaggccttacagaatgggagccaacgagttggcggaagtcaagaagcaagttgatgaacagttacagaagggatacatccgcccgagcacgtcgccttggggtgctccggttatctttgtggagaagaaagacaaaaccaagaggatgtgtgttgactaccgcgcactcaatgaggtcaccatcaagaacaagtatcctttgccaaggattgatgatctgttcgatcagctgaaaggagctactgtgttctctaagatagaccttcggtcaggctatcaccagttgaggatccgcgaagaggatattccaaagacagcattcatcactcggtacgggttgttcgaatgcacagttatgtctttcggactcactaatgcacctgccttcttcatgaatttgatgaacaaggtgtttatggaatttctagacaagtttgtcgtggtttttatcgatgacatacttatctactccaagtccgaggaagaacatgagcagcatcttcggctggtacttgaaaagttaaaagagcaccaactatatgccaagttcagcaagtgcgacttctggcttaaggaagttcagtttctcggtcacatcgtgaatgctcaaggagtagctgtggatccagcaaatgtggagtcagttaccaaatggaccccaccaaggacagtcactcaggttcggagtttcttaggacttgcgggctattaccgccggttcattgagaacttctctaaaattgctaagccaatgacacagctattgaagaaggaagaaaagtttatctggtctgctgaatgcaataggagttttgaagaactcaaacgacggttggtgtctgcaccagtcttaatcctgcctgatcagacgaaagatttccaggtctattgtgatgcatctcgccaggggctaggatgtgtgttgatgcaggatggcaaagtggtttcttatgcttcacggcagttgcgtcctcatgaaggcaactacccgacgcatgatctggaattagccgcagttgttcatgctttaaagatttggcggcactatctcatcggtaaccgttgtgaggtatatacagatcacaaaagtctaaagtacatctttactcaacctgatttgaatcttagacagcgaagatggttggagctgatcaaggattatgatatgggaatacattatcatcccggcaaggctaatgtggttgcagatgccttgagcaggaagagtcactgcaacgtcgcatgggtagaggaactatgctgtgaggttcaacgtgatttgggacatttgaaccttggtatagttgagcacggattcgtggctgccctagaggcacagcccacactggtggagcaggttcgcatagctcaagcaagtgatcctgaaatagcagagctcaaaaagaacatgagggttggaaaagcccgaggttttgttgaggacgaacaaggaacaatctggatgggagaaagattgtgtgtacccgaaaacaaggaattaaaagacctaatactaaccgaggctcatcaaactcaatattccattcatcccggcagtaccaaaatgtaccaagacctcaaagaaaagttctggtgggtcagcatgagaagggaaatagctgaattcgtagcactctgcgacgtctgtcaacgagtaaaggcagaacaccaaaggccagcaggtttgctacagccacttcagattccagaatggaagtgggaagaaatcggaatggatttcatcaccggtttgcccaggacgtcatcggggcatgattctatttgggtagtcgttgaccgactcaccaaaatggctcacttcattccggtgcacactacctactcagggaagaaattagcagaactctatctggcaagaatcatgtgtttacatggtgtacctaagaagatcgtgtctgatcgaggaagtcaattcacttcaaagttctggcagaaattgcaagaagaattgggaacccgtctaaacttcagcactgcttaccatccacaaacagatggccagaccgagcgagtcaatcaaatactagaggatatgttgagagcctgtgcgcttgactttggtggagcatgggacaaaagcttaccgtatgctgagttctcgtacaacaacagttaccaagctagtctgcagatggcaccgtttgaagcactgtatggacgaaggtgtcgtactccgctcttctgggatcagacaggggaacgccagttgtttggtacagaagttttaaatgaggcagaagagaaagtcagagctgtcagggaaagattgagaatcgcgcaatctcggcagaaaagctatgcagacaaccgccgaagggagctcgctttcgaaacaggggattatgtgtatctccgtgtcactccgctcaggggagtacatcgcttccaaaccaaaggaaagttggcaccacgctttgtgggaccatacaggatcttggaacgtagaggtgaagttgcttaccagctcgaacttccctccaacatgcttggcatccacaatgtgttccacgtctctcagttgaaaaaatgtttgagagttcctgaggaacaggcaagtccggatcacatcgaaattcaggaagacttgacg

SEQ ID NO: 10121 - DNA, 5581 bp, Oryza sativa
gtaacttgtaacttgtgtcctggctcctggtcccctggacggggggactacgggtgcgtctgcgagcgtggctgctgtcctgtgtggtgtggactgtagaggacgccacggcccacggccacacacgagacaagggaaacgcagggagattatgggcatgtttggtgaagctttgtagcggtagcttctcctaaaattttcagaagctaacttccaaacagtttatattttcatctatattctgaaaagttacagttatagaatccagaaaatgaattagaagccaaaagttgggtttgtcagcttttctaaattctcaactagcttcttacccgctgcttctcaaaattttacactcaaacaagacctatatactcccttcggccagaaaattaatttaacgtttaaaactttataatcactaatgctaaattaattaaaaaaggtatatgtatcactaaagcctctcatgtagtgtattcttctagcattaagttagattattgcaatcttgtttagcaacagtattagacttttgatgtttactatagctaactaaatgaaaccccgcgcgttacagcaggaattatgtataatagtattaaaaaaatataagacaacatataaataactttatatgttttatataattttcatctttaatcgatcatcaaaaagttgtaaacgattaagatgaattggtttataacaacttaagtcatatataggtttatcattcaaaagtaaactaagatgatgtgtctcaatgatagaaggaaaacaagggagataattaatatagattaatcatccaaagacaaatctaaggtagtatgactttataggggaagaaatgaatggagataatttgaaccatggatcaatcatccaagtgctaggaacaattgaggtgatgtgatttaatgagatataagagaaatattattaactacacttagcgtggatgagctttatagatatataggattactctttttatctaagttgtattagtttataatattactgaatgaaaaaatatggaacaatggtgaacggcgtagccatagacgacacaatgtttgcataactttaattaaaatggtttgtgatatataatacaatgtttatgtattatattcattctaaaaaggtataaatcaccacattaatctgattaaacaaagttatgcagcgttttgatttgtggttgtatttgtctagatagaatggtgcaaattgatagatataatttgtatataaaatataagtgtgagtatataggaacataaagcaagagttgtatattaaatccaattatacttttaaaatatagcttcatgtaaaattgtacgtgaaaacggtcgggaaccatttaactatttagtgtcaacaagcaatacgatgctaaaatatttcttttaagaaaaacatattttatattggctaagataaaaaacggtatcacttaattgtatggaaataacgttcaatcagtcgggaatttccaataacgttttcatccctgccactagttgatttatgttacctaaaattatttttcttttaatatattgacgtgcaatccttctgcgtgttcgcaaaaaactagttgatttatgtttggacataaagagaaataacattagagaaaatcttgagaagaaagacagatagaaatccaggtgtaggtaaatgtttcagatggtggttattgagggaatcaattaaacatgcaatgcaacaacaaattcaagtctgagtagaatatttaaaagtccttcataacatacaaccaaaatttcaagctctgtacatttttattgcacggttaaacagtatatatatgttacatttcccatggctatattacctaggctcaagggggatagttgggaggatcctcaagagcacagaaacacagcagcacagcatttgatcactatcgctgcaaaccagccaggccggcccggccttccaatgatcgaaacaggcaaaaaggacgggacagagatcgagagaagaaaaggggaaaaaaagatccagctacatccaaaatgacccatctgggcatctcaatcaagaggctgctatctcgatcaagaatccggcccagaacacctacactattagctagctagcattggaaaagtcccatggctgacccgatcgatcaaattaaccgtacgcgcgcggttaattgagagaacctggcggctgcgtgccggcgacgaagaagcggccggaggcggcgtcctggctggcgtagtacaccgtgctggggctcacgtggttgtgcgtcccctcgtacgtcgtcaccacgtagctcgggtcgtccttgtcccgctccaccctcttcttcacgttgcacccttccgtcgagcaccggtagtagttcctgcaacgcacaatcgatcgatcgctgttagttagcgatgtccattcattcattgccaggaaagagacttgcacttgcacatatagtatatgacgatggaattcgcgtgattaattgcatcatcggtgtatttgatgatcgaagtgatggcgacgacgacgacgacgggatgatttatgatgatgatatgatcatcttgaattttgtgaaggggatatgattttggtttagttggttagttagtaccttgggttggggctgttcttgacggacttcttgccgtacttgcgccacttgtagccgtcgtcaagaatctcgatctctgacttcgtccggaacgcgatccgctccgtccgcggcctctccacggccgccggcgccggcgccggcaccgcctccgccgcgctcctgaattttcccgatcaaatgcccccaattcagaccaaatgaacaggtgattgcacacttgagagtagtactctacttgacaagtgacacacgccactagccactcaccttgttgcgtttgcggcggcgccatccggcagcgcggcggtgggcgcgccattgaacacggcggccggaggcgcgtcgtcgaagaagaactcggagatgtcgaactgcgaccccgacgggtcgggaagcggcggcgtcgttgcggcggcgagggcggcggagaagctggacgcggagctggaggtcgagcttcccccgtgggagaagtacgatgacatcgagtaggcggcgtcgcccgccggcgccgagaggcccgagaccgggtggtggtagaccgctgcgtgcgcgccgactgccgccatggccgagtacgaggccggcgcgaaagctccgtatttataaggattggcgctaaatctgcatggatatgaggggatgatgtagtggtggcggggtggatttgtactggtagtagtaggcgatcgagagggatgagatcgatcgtgatcgatcgcacgcggggcgcgggggagctggttgtgttgtgtttgtgtctctctctccgggaggattttgccggcttcgcggtgagcttcgtgaggagggagaaggttcggagcgggtgcgggagttgccgcgcgcgcgccgccgctcgaacgcacgcacgcgcgcacggcgtgcccacttattttagcagcatggcggaaatgtctccgggggaaagacttcgacggggtgcggtcttcgcctcttcgccacgtagttgccgtgggggccttctcacacacccacggtccatccggttcaagccgctttctttgtttgggttccctgcgagttggttggtgtggctaaaccaagaaattttgggagggggtgaagctaggagataggatagtcaagaaccggttaagaaaattttttagatatagtttatttattttcattaaatatgcactcacttaatttaaactcagacgcttatatcagtttaaattcgatctaaaataaaacaaattaaatgagtggcatctctctttattttattttagctccgtctactttggactgagcagcgatagcgattttacccacggatactgtgttcgataggcacgggcatgtgttcgacatgtctgacatgatgctcccaaatcatatgtgctgattcataatctctgtttagttatctagccatgcatatattatcgatgtttttaaatacgcacccgacaccgacgtgggcgttgatttttgcctgctaatactatcgtgctccgattgtccaagaggtatcgggtcttggatcaggtgtgttcctgctttgcccgagtctaatcaaacctattgacaggaaagttagagatattgtagctaccacagttaaatctggtgtatttatcctttttcgcttcagccattattagtcatgtattttatgcctgtaagatcctttttatcccttagcaaaatttcacaccctatcacattaaatgtttaacacatgcatggagtattaaatatagacgaaaaaataactaattacatagattgcatgtaaattacgagacgaatcttttaaacctaattgcgctatgatttgacaatgtggtgctacagtaaacatttgctaatgatggattaattaggcttaataaattcatctcgcggtttacaggtggatcctgtaatttattttgttattagactatatttaatacttcaaatatgtattcgtatatccgatgtgacacgtcaaaactttacatctggatttaacacaacctaagttgtttatgaaagttcaccggtcggaacatggctcattgaataattagctcaaaactcatgaatttcgtcaaattccacataatctcacatatatatatatatatatatatatatatatatatatatataacttcgctagaatttcatctaaagaatttttctcatgagacactacccacttaggtagtgttcgtttctacttaagatggagatgaagttatggaaaaaaacaacaatgtcattagctcatagttaattacattttaattattactactatagataaactttaaaaatattttatataatacattaaagcagctattatatactcactccgtcgaaaaaaaacttaacctaagaggggaatctcgacaaaggaggttgtccaaattctttatccaggatggtcccatcctcttcaaggttaagtttattttagacggaggaagtagaaagttttagtgcaaatgcaccattcaacaatttaaaaaatatgataacgaaaatttcatgcctatgcggctatgcctaccaaaactgtttcatttgatactaacaatcactgtcaataatcaatatttacttctattcgcccatgttcggccagcaggcgggcacggccaggccacggtcacgctcttaccgccgatcgccatcacccccaccgccccacagtacaaaccatccaaccccagccgccatccgatggcgtcatcagcaatacgccgagacggaagttcaagttcaatcattcgagcttttcgttgggggctcggctggtacggtcccaaaaatgacggtattctccggaaaaacatataacaggttcgtagcactacaaacgtacactatcgagcactgtggtcactttattagtattttcgctttgctgtcgctttcgtactcccgaaaaatttagagcgggctgcagga

SEQ ID NO: 10122 - DNA, 3817 bp, Oryza sativa
acgtttaaccactcgtcttattcaattttttttgaaattattattattttgtttgagacttactttattatctacagtactttgagcacaacttttcgttttttatatttggaaaaaaaatttgaataagacgagtggtcaaacattgcaagcaaaaactcaaaatcccttatattatgggacggagggagtaattagcaagctagtgcattttcacttggtcaggtcttggtctatggtctaaatttccgggcggaaatgaagtgacagagagtcaagttaagaccgaattgaagacttgatcggcaaagtgtccctcgtttttgcatgtcgtaaaaaaagatctgaagaaaatttgacggatcaacacaagggcttcggtgatcggtggtgtgcttgggtcgctatgcttttttgaactgcaacaacaagagtgttaatcaatggcaatcccgggaatgagattcatcaccgctgaggagtccgccaaggcgacccaatctcaccaatgatattcatcctcgtgatggattttctcagccttctgtttcaaaaggcggaacacgaggggctattgcaggatttgggaatccctcacataatctctctttatgctgatgatgtggtcgttttcatcaaaccgacgattgaggaggttaaggtcgcaactgaaatcctaagcatcttcggtgaggcctctgggctccggacaaattttggcaaatgttcagccctgccgattcagtgctctgaggagttgcttgctgagatacagccagaattgccctgccctattgcttccttcccctgcaaatacttagtctgcccctttccatcttccggttgaagaaggaagacctgcagccattcattgacagcatagcccagcggcttccagcttggaaatccaaccaaatgtcgtcgataggtcgtgtaacaatggtgcaggctgtactcagtgcaatcccaatctacctgctgatttctgtcgacgcacccaagtgggtgatcaaaggaattgacaaaatccagcgcgggtttctctgggcaggcaaagtgcaagccaatggaggttgctgtcggatcgcttggtcgagggtgtgtgctcctaagaactatggcggtttaggcttgccgaatctggagttgatgggtattgcacttcgctccagatggacttggctacagcggacttcactaggtaaaccatggaaaggcctagacatcccggggtcgcaaaaagagaagagcttcgtggctgcatccacagtctgtcagctgggagatggacaaacgatcctcttctgggaggatagctggctgcaagagggctgcatccggtccattgctcctaacatctacgatcgcgtttcgccttgcatgcgccggcaccggacggtggctgaggcactaacggatcgtagatggatcaaggatatcgccggggcacttgggatccaagccatcctagagtatttgaagctttggtcgctacttcatttggcgacctgtatccctaccactcctgattctttcagctggaaatgggaaagctcgggtcagtacatctcaagatcttcttacaaggctctgttctttggtcggatctccttcctctcgaccccgatttggaaatcacttgctccacctcgatgccgctttttcctgtggttggtagcaataaacagatgttggaccgccgatcgtctgcgaagccaggggttgcctcacctggaccgctgtgtcctttgtgaccaaaaggaggagagcattgaccacattctggtaggctgcccagagtcgaggcaactttggtggtggacattaagagcgttaggcattccagattgtctacccatcaacgaaccatcctttcacctctggctttgtggaagccggatgaaattgagagagcaacatcgctggggctttgacaccattacaacgctgatggcttggtcgatttggaaggagcaaaataatcggatcttcaatcagcagtccaagtcttggatcgaagtggcgaaagcaatggtggaagaagccgtactttggaagtcgacaaatgcaggggtcccttccattttacctctgtgaggtcgtggtagccaaatctagcgccagatatcatgttagatcactagtctccagtatcggtcccgtgcttgtttttcatttctcactgtaaataacttttatttctcttaagggaaaaaatgcgctccttgtgtattccccaaaaaaaattttgatggatcaacgagtccttgttttgctgtagcgcgtcgtctgcatgtctggcctacagtacacgaggaaaatccacctcgatttgatgagcatatactcccttcggttttgtattattaacgttttaaataaggttaaggttaactttttataattttgattaccaataactttaaaatatataatttaaagacactatcacgccatatgtaaatttattttacaaatcagcataataaaaataaaatcatatttattatatatattatattacaaaatctagttaaagatatattttagagacagtgttattattgtttaattatcgaatcggagagaatacttactatagtcactgtagctcgtctgcatgtctggcctacacgaggcatataccccagggcccaagagaagaccgtgacgaggcatgcaccgcacgtgacgtcattcccgaccatcgccgtcgtgtgttctaggcttctagcacacgtctaaacgagattacaggacactagccacgtgtttttatcacttaacacacctgtgtgtatgtactgtgtcctgagattaaatactggaaaatgtgatcgagcaaccgtgtcacttttcaacaagaaatttataatttgattgttggtcaaacaaactgccagtatttagtgccgattcttagtacagctagcatcctagtagtagttatactgcagtcggtatattttttgaactcaaggaaaatgaattcagtatcacaggagagaaagcagtctactgcactctgcagtgtcaaccttcagcatctaaatcagttcagaagttaaaaaaaaaaggaaatccataatgcaaataaccattccatgcaccaacctactgaaagcctgaaccacatgtcatttaacctagtacataacacaatttgatatgtagctgtaataaggaggaatccgagatttccacaccaaaacctcgaatttccctcggcgcctgacgcgtccagacagcaaatcaaccagcttaatctttggaccatcatcttcaacaagagccttctggtagctatcacgcagtacaaagtaattttcaggtttaggtctcacaattacccaaccgaacttaggatgatcctggcaatcacaaggcataagggagttaatttcgtctctgtactctctgacgaacgcaacaaacctgctccagaatttggagttgaaattggctttcagtagagctcctccgatgtgtgcacacaagaagcagcctcttagcactgtcgcgatctccatcgccatggatgcaagctttggatgctgctctgggtctgtggctccaaatgcaagaaccttgaagaagtaccagtaggcttcgaatggcaggaaattcagcctcagagcttgtttggctcccaacctgatgatcttctctgatcggcttgtgatcatgattttgatctcatgtgtcatttgctttctgaaagaagagtggattttcttgagtgttctttcatcaacatctcctaagagctcaatgataagcagcaatcttccatccatggcatcgtttgattcatttc

SEQ ID NO: 10123 - DNA, 1745 bp, Oryza sativa
gcgcgggagggaggggtgggagagcacggtggcgtaaagaaaggacgcgagcgccggctcggcgtcggcgtcgcggcgcgcctcggccttgatctgggaccagacccaggactcctcgtcctccgactccggcggcgcgaacgccgggaccacctccgcggggagcgacggcggcgactggggccggcggtggctcgcgccgccgccgtcgggctcgtgcgcgtgcggctggccggccggcatcgcggcgcggtgggatcgggtttggtgggcggcgacgcgagcggaggaggaggatttgcgggccactaccactagcatcggacgccgagaggccaaggcgtatataggcgacaagtggagcgattgcctacacaactcagccatacagacacagtgatacagattatatactgggtgtcgctaatgcgcgcgcgcgcgactagtccagcccttacgtactttgtataccagttttatacgtatacgtataaaatttatatttactactccctccgtaccctaatataatgggttttaacattttgcttgcactctatttgtgtaaatataaaaaacaaaaagttatgcttaaagtactttggataataaagtaagtcacaaataaaataaataataattccaaaatttcaaacagtgaaagaaaaatgtcaaaatcccttatatcaggggggcggagggagtagaaaaaaagacccgtgcgttgcaacgggtaaatgatattttaatcgtattattgttatactatttagttaggataaaattgattgtggaaatttgcttgaatattttttttagaaaattatgagctgcaattaggagtctgactttatctcaagttagcatgcgagttttttaaaagtttcttatacaactcattttgtatttaaaaaagcaaacgagcttaaaatccaactcaaatacggatttgtatttgcaaaagcgaacgaacttaaaaaccgactcaaacacggatgatgtaccaaaataccggcaaaaacatcttcaatttttataatagtagagataaatgtaagtgtatttttatgtatgtatcaaacagaattatatgtgtaaattttatatgtatacatatgtattttggatataaaaagtttgctcgcatatatacaaactttgtatatatatgtgtataaagtatgtatatatacatatacgtgtacatatatatatgtataaaaaattttggatagcacatgaaaaaatgcaaacaagccgagttcaatacaatatgaaactttctactttatagaaactttgtatagataaatttcgtaaacaagaaatcagctgtttcagattgggccacaatttttcttaaataagcccaaaaaaagaaggtaaaagaaaagaaaaaaatcaataaaaaaggaaaagaaacgagaaaacagtgaactagttgcgcgggtggagacgcgtgcgtctagtcactgctccctccgtcccaaaataagtgcagccatgagtttccgtgtccaactttaatcgttcgttttatataaaaaatttttgaaaaaactttaaaaaataaccacgagtaaagtactattcatgttttatcatatcataacaacaaaaatactaatcataaaaaaatttcaaataagacggacgattaaagttgggcgcggaaactcatggctgcacttattttaggacggagctacctaattagcattcgcgcagatttctacatagacctt

SEQ ID NO: 10124 - DNA, 2742 bp, Oryza sativa
ttcctgcagccctcccacttgagaggccatctagctcaaccttacctctaacaaaagattggaaggatatggatgtgttgtgtagcataagaaattgttcacgagcaacatgagtgcgaaatctactctgaacagctctagctgctctattctgcacttcagttcttctagcatccaattcagccatctgaccggctctcagaaacaccttagttcttccaatctgtcaaagacagcaattatttgcaatatttttgagaagtttcacgattaaacagtctatatatttgcatgaagctcatcaaagaaaataatcataaaaagcaagttgtggagtaaaactatttagtgtatcttgttaattccaccgtgacttttgttttccagggagaatatctagtgaaagtaaaagaaatcaacttttttgaacagttgaaaacttcagttgcatcaccaaatcaacaagaaaaatcctcaagaacttactttctaccttacaagctgtaactattcaagaacatttcttttagataatggttcagtaacacatacatatctttttacttggtagccttatgggatgagaaaaagaggaaaatggttgtacaatacatataaagtaggatttattctgttaaagaatgactcacctgataaccctggagtcccattttgtccaaaatcttttggcagattactttttcatcatttctgtcaaatatcataacagtaaatgcaggacagaggtagcagaattagaaggtataggtaaacattatactcacctttctttgaaaaaatcaggagcaataatgcgaaaccgttgaagaaaatcacgaaataattttcttgtagggtatccagcacaactgatgcgaatagcttcaagaacaccctgaaaggatgacccgttaggttatataatagtactggctttctctggagactatctgatgaatgatgtattccttaccgaacatcgaagttgatgtaaaacattggcgttctcaaaagtagcaggcttaagaagattattgggcttaatacatctaatataatgaggttctgtagaacttaaagtctccatcaggtcatggagttgcccctgataatttgcatgaaatgctcagatattgtcactgtacagaagaatttacatgaaaaaaaaataatcttaattgcttcacatgccccctatcaagtaaatgcaatcttttcttcttgaacttgatggcactactgctctacgttgtgaaaggtatgaatgtttagaaaccattgtatctacgcactccaaataaaagtataaataaaagcaaccatcattcaggttcatatttcaagtacatacgactacacataggcacatgtcaccctgttatatatgaagatatttctagagtaaagtaaaatataagtgcaaccatgcagacctttgcagttctagaatcagatcaatataaataagtcaaggataaaatttgatcatgagatatatgaaatgttgaattatccaccaaattttcaacattaatcccataatttgagaagaaacaaacagaaaagggagaagattatgttactgctagtgttcgatcttttctacgcttctgtccagtgtatcatgtcagaatttttcagttttgaacactgaatgtaatttgattctggtgttcaaatattatatttcaatcggaactttccgcgtagatccttttttattacgtaggcaggctacactgagagaattaatggctaaattctatttttatgctcaaggccaagttagtttgcatatagtacccagctaataattttcactatgtatgtccttattaaatacagtctgcataatagtgaggcttttacctgaatttagagtctagagaacaaaattgaactagcaggatcataccttaaaacgattagcaattgaggactttgaagattttgagttctcctcttgtactgatgggaataaccctgacacaaaggagcacgtggaagcattaacaactctggatgttctacgactacataatctctgtttttgtccaggaaatgatcagactgatatgttacctgcaatgatatcaagggattaaaaggaatatgcttaatcaaatgcatataagcaaagaatgctatgttgtgacagaatgctcacttctcctgcataatgttggattgtaaatgcagtacgagaaagctttggtttgctaaaccttttgtggttcttgaacttctcgtacagcttctgagaaaatgactcatgtgtacatttaggaaacatactggtgcacacaggatagagaaaagaatgaaagaatgatgaatcattgtcagaactactaattcagaaatagatatagcaatgttgattataacaaagaagcaattattttcacgagctgcctgttgcatgcagtccatcgaagaagggtttaaacactaaccaagcttcatcaagaagtgcaacaatcccaccaggtttctgaaaataaaaggagatatgaacaatattgaacttaaacagagaaaagacaactatatctagtatgcacaaatatgttggtgttatgggcacgggcaaggcccatgcagcagtttaggcatgataaattaggaataagtcatataaaggtaggagattatctagttaggaaagagatgaggtttattagaaagttttgagataaagattggattggtttctataatactatagattagttccttaga

SEQ ID NO: 10125 - DNA, 8365 bp, Oryza sativa
cagtacaaagtaattttcaggtttaggtctcacaattacccaaccgaacttaggatgatcctggcaatcacaaggcataagggagttaatttcgtctctgtactctctgacgaacgcaacaaacctgctccagaatttggagttgaaattggctttcagtagagctcctccgatgtgtgcacacaagaagcagcctcttagcactgtcgcgatctccatcgccatggatgcaagctttggatgctgctctgggtctgtggctccaaatgcaagaaccttgaagaagtaccagtaggcttcgaatggcaggaaattcagcctcagagcttgtttggctcccaacctgatgatcttctctgatcggcttgtgatcatgattttgatctcatgtgtcatttgctttctgaaagaagagtggattttcttgagtgttctttcatcaacatctcctaagagctcaatgataagcagcaatcttccatccatggcatcgtttgattcatttcgatgcttggtttgacaaatttcactgaaagtttctgccttctcatatctcagatcatctccactgtaatacaagatgagagagaagtgttcacgcactctctgatcacggcagatatgttcaacgagagtgctcttcccgacgaattccgggccaacaaccggcaaaacctgaacaatttcttctgcaactgcaagaggctctctctgcagcaggaagctgatggcattttctctctccatttgacggttgaacatgcatccatccaggtacagatgcgtgctgtaaggctggcgatacacaggaggatagctcatcaagaacacgacgaattccttggtgtcaccgatgattctctcgaggctagtgacagtctgatgcagatcgttcgtgcttcttgtctgaatttgagtgttgctgctgctgtcagagaagcggatacgcttagcccggttgaatttggacagagcaaaacgtggtgttacctcgtcctcctcctcatctctgaatctgaaggcgtcaagaacgcagtggcctctgaacatctgctccctgagcagctcgagctgacggatcatcccatggttcgtgacatgccgctgctcagcttcctcgacgacggtgcggatccgcacaaggagatggtgcagcctctgaagattttcatcgaccgatggccgctgcttcgggtacctgtcgatcatgaaggttattgatctgctgacaaaatcgccaagaattgcagataagagctccatcaagaacccttctctgaagaaagtagtgagtgccatggatgcagagatgagagcagagaagtgcagttttgcaggtggtgttgtgttgtttgcttgcacaagagtagcaggactgaccaaacgccttatctaagggcagagtcaatgccgtgaggattgggtcacgaagtgcagatgattaggcgtacagaaactgtcaggtcagattcatcagaccaaatttactaacccttcctgttccataagaaatcacaggtcttttatctctgagatatcacatctttgacaaagattgtgatttgtgagttgaagtttggtacggtgataacaggggactaggttatttgcaccatgtagctactaataataaaaaaaacagaggtgttatgcattcttgcagaaaaaaatggcacaagtcgttgctggactcactagctgttgactgaataataaaaacagcggggttatgaattctacagaaaaaattggcacaagtcgttgctggactcagactgaaagcaacatttttgttttctggaacgaatagtaccaaacaatgcgagatttcatatcgatatagcaagaaaaaaaaagattataggcctgggactatgaaagcaacggaattagcacagcacagttccgttctgttcaatgcctgaacctttttgggaatacgcgagaagcacatcattgtattaagaaggaataaatgtatgtacaaaacggtccgaaaaattaaaaccgaaagggacaagatacaagagggggaagaagaaacaaaagcctaatctcccaaagaatttggcgacccatctccattcataggaactaccatgaccagtattgcggctctagccagtcgccaaagatccgcttcacccgtcatagccctagcaatctctgtccatggtctgctattctagttgaagacccgattgtttctttcctttcaaatcgtccacgctaccagtgctgtgatggtgttgaacccccggcgatgttccttggccatctttttgcgactgtgatacaaccaagaatgaaaagattgctcgttgagtggtaaacactcagaatgcccaatagctctaagagcaatccaccacagctggcgagactccgggcatgcgaccaagagatgatcaatcgtttcgtcgtattgatcacagagaagacagcgagccgggtgcgatataccacgactccgaagacggtacactgtccaacagcggttaagggcgaccaaccaaaggaagtaccaacaacaaggggtgccaccgtgccaaagacttccagattggcttgtgttggaggcgagttcttccaaagaagaggacacgatacgccgagcgggagaagtacagtcccgaggtctcccagcgccatgaaagcgtgtcgggttcccccaagagttgcatagatcgaaggaggtcccaaagcttgaagtactccaggatcgcttgcaccttcaacaccacacagatgtctcaaatccatctcatgtcgtgcaatgcctcagccactgtacgcctgttctagaagcgggcggggacagctgcgtagaaggccggcgccagcaattgaattaaagagccctgcagccaacatcccagaacaacaccgaaatcccgtctcccaccgagaataccatagacgagatgaggttgcctttcttctgtgaaagtggaatattaaacccctgccatggcttgtccagcgaggtccgttgctgccagagccatcgcgacctcaacgcaactcccaacctctcgagatcggggatacccaaaccaccatactctttgggtgagcaaactcaacgcaactcccaacctcttgagatcggggatacccaaaccaccctactctttgggtgagcaaactcgagcccatgcgacctgacagacgctgccagtgcctgaaactgacagggcaatgcaatgactgaacaaccagagcattcgctcaactaaggaaagcaagccattactaatctcgaacttacagaaatggacaagcataatacagccaacgtatgcttctaagatcttatagttcaaatagacatcagaatatggctcagatagagtacaaggaaaatgtaggttataactaaaaaagaggagcaaataaacacacatcaaacaccaactcgtctacaacatgctgtgattcgtgaagattgtaccacacatcgtgaaataaagttatggtagggtggaatctgggatttccatactaagatttcagaattgcttctagccttagcttttccacatagcatatcttgcactgttgtatctggaacatcatcttcaagagaaccttttgggtaaggttcatacatacaaaagtgtttgataggctgagctattcccttgatataggcaggatggttcattgtaacatcatctggatattcactgtacaaattgaggttatttgggatgtgctctctggtccatgcaagaactctgtaccaaaattgagcattgaaatttgttcttagtaagccggcaaaaacgtttccatgcatgaacgatccttccatctcctttgctatctccatggctatggatgctagcttcacatgctcttcggatctatacttccgaagatgcgtaccttgaagaaataccagaatgcttcacatgtcaatggtctcagtctaagaggtcgcgtggtcccgaaacttgtgatgttctcagatcgacttgtgattatgattttagtaccatgtggcatgcgcagttctgaagagtataatctccatttctcctcatcagcatacctggagagttcaatgacaagtagcaatcttttgtggaaagcattaccccgatgcttaacgataaaattctctctcagagtggttggtgtttcatccttcatggaatttccactgtaaaagagaatcagagagaagtgatttctgactctctcatcgatgcagacatgttcaacaagagtgctctttccgatatgtcttggaccgatgattgggaggacaccaagatttgaactaccgggtggttccatctgtagcaagaactcaatggcatgttcaagttccatatgtcgattgaacatacacttgtccaaaaacaaatgcgtgctgtaaggttggcgatacataggacggtactgcacaagaaattcaatgaactccttcatgtcagctatgaggatttctagcctatgaaccatcttctgcaaatcttctacctccccaccactgaataccgtttgttgaggtttactagttgggaaacgaagacgcttagcaggattgaatctggacaaagcaaatgaatggctcacctcgtcatctttggccttgtcttgaatagctcggtatctgaagttatcgagaatgtagcagcctttcaacatctcatctctaaggatcttgagctgctggagcatcccttggtttctgacgtgccgcccttcagcctcctcgacgatggtactgatcctcataagcagctgccgtagcctctgtaggttctcctcagcagttgcctgattgcagttgcagtacttcccaactaagaaggacatggacctctgataagatccccaatagctgcagaaatgaacatctccattaactgtgacctggaaatggacatcttgatctctcctagagtcccacacacactcactgaagtctgaagatgatactaatcgagtctgaaggttcttgggagctttgtcacttgttgcagagtaaagcttcagcgcaggatttggataataaactgtgttatctgcaagactgccacttcgttatatattattcttgtgacccagctccaacgattgcggcaattgttttgttggtggttgactggctgtgtgctattcaaagcttatctgtctcgaggaaacagaaaatatttgccactgtgctccagttcgcccaggtgtgcagacgtgtgtgttgcgcttgacttccaaagtttcaagctcgataatgcctcctagttgaacctgtcaccatctgcaaaaataagagctatacctgttgccttgccagtcgccggcacaccggtatccggaccccgagaagttgctcatcgctgcaggtaggctgatgcagtgaaacggaagctgggaaaatgggcatcctttcgtgatagcagcaaatcaagttgggccaatgcaaacctgccgtcgccgtcatcgatcagcagttgggagcaccggctgctgacgagacccaagcctggagcaatctgcacctgcatctcaaagtacttgtagcatgcctgaaaatatatgcagggaattcgcaatttgggttaataagatgaacaccagttcatcagcagagtgaatgcaaccagattctctacaggtgctgaaaagaaataaataaaaaaaaaaccctccgtcccaaaaaaagaccaatcctacctacgaacctggagacatgtgtatccaggtttgtagctaggaattcgttttttttttggggggggggagggggggggacggagtagtactgttgatttatgatttgaactgttgatccaacttcagagcaaaatactgtcaaacagtgtatgatggatgtgactcatctacttgccacaagtgaaacagcatataaacacctagaagttctagaacccattgagttctatggttgtttatagctagacaagtcatggcaatacagaagattcactccttccctgaaagcaacctaccacactaaaaccaactcaagactgtttcaccaaaagggcacaactacctaatatgagcacttcctcaccacacatctcaaaacagacagaataagatacaatgggcaaaccagcaaaacaagaccaaaggtcaaaggatagcactctcaagaaaaaatggtgcccaagactgagtaaaagaatcttagctttagcgaaatatttagaaaagaattaccaaataaacatcctttcctcagatcctttgtgaggaaaaagacatttcctttcctcacatcctttgtgctagtttccgtatcagttctttaattcagatcttcgtcgaaacagggcttaatgcttacaggatgtcttaaatattaagttgctagtatggcttaaatattaagttgctagtatgtttcccaaagagcaaattcacagtatccaaacatgtccgcgtacgatcttaaggatgtcttttactttctagtagaagattgtggtccacatttgatctccaaccccagtggtttcccaataatgcagtttagcacattcacaggccttaaggcacacgaaaaatccaagtggcataaaatacaactagctccagtaagcaatgcatctgtggctagtacaccaatgatttctgcaagtaattgtaattcagaatttggttaaatcaataagttatgaactttttacaatgcaaagcaccgtgttgtcctatgcgaactgcaatgtcacacatgctattttaagcaaagtacatgagtgttaactaactgtccctagtcataatcagtagacatgcttaagaactattcaccatgtgcaagtagcgaaagacaagatatgtaaaaaaaaaaaggatggtgcaaacataagtatatgcagacaagataaagtgcaaagttgagctcatcacttatggaaattttactgaattgagaataaataggtgatgaaactgagacaaggtttactatttacctgctgttttttaaggaaagttattcaatgctcttatttagttctgttaatcaaacatatgtacaattataagtatctgcccaagagattagaagttaggaaccgaagcatatgaaaaataacagatttaaaagcaacttctgcaagcacacaagtgattcatcacaagagtttcaaggctcgacagatcctcaacagtcttgaaaaactaatggaatgcaattatcacaaaagttgatgcaaatacgacataatcaataaggataaaaaggcttgacttcaataacgtaactgcttgtacagataggcaaatcaaggtgtacacagcgaaagcgaaacaccaccacatgacgagtttccacatatcaatggataagtaaacatatggaaagtaatgaaaatgatccgtcaccagattcaacctgctagaagaagaaccttttatgtgcaaaaatgctttcagaaattctcaggagacattcatcaaccccttcaaaagcttcgaacaaattcttgcaataagagctcttgtaaactgacatttcgtttaatttacctaatgtaaagaaaatgacactggggatggggggacaatgtgacacctaaactgaataacaactccacaagttcagaatatgcattgtgacatcagtcattgtggtaaaattaaatcacgcacacagatatagcacctggagttgcatcatataaaatagcagaaacatcatatggaatctttacacaataaaaagttaaaatcgcaatctaatgtgtccttgaagcttgactcatctggcaaatgataaaatcaaaagttatacaacttttatttgactcatcatttcatcaatcaccagttatcagtacatgagcatgggcattcgactgataaaacggctgatgatacaacactacagtacagattacccaaagcacgacaagtacatcagtttttggcatatcaacactacggattatacagagaggaagagaaatagacctcggcgcgtcgccctcaaatggtgtagtccgaccactgtcgaatgaaggatgtgtgatccatggattccccgggcatgtcctcatccttctcaacctcaccgttcttcctgccaatcaacctggctggattccccaccgccgtgttcctcgccggcacatctatcagcaccactgacccggcaccaatcttggccccggctccaatcttgacgttgccaagaatcgtcgccccggcgccaatcagaacaccatccccaatcttggggtgccggtcaccgacagccttgcctgtgccacccagtgtaacgtggtggaggatggagacgttgtcgccgacgacggcggtctcgccgatgacgacgccggtggcgtggtcgaggaggatgcccttgccgacgacggcc

SEQ ID NO: 10126 - DNA, 8477 bp, Oryza sativa
  unsure (1)..(8477): unsure at all n locations
catttaacttctgttgattatctttgcagcatacctttttcacttgaagacattgcgaagtcgatgccaaccattgaggagacgacagagaatgacctgctaccttttgtccgtgaaaaccaaagctttgcgtttatattgcacaggagagattgagtggttccctcttcacagatcattcaccggctatgtgaaaaaggagcgcctctgtgtagcgtggatattacacgttattcatgttgtagactagtaacccatttaggaatcaagagcaattgcagctgagggtttctaggcctctctggtttgaatggttggttaagcaaactgtacatgttttatctgcagtgtgtataacacacgttattcatgttgtagactagtgacccatttatgaattaagagcaattggacctgacgttttctagtcttctggtttgggcggttggtcaagcaatcatacttattttctcacgtcatctagccagctgtttctttcttctttctttgggtgggataaagcaacatatgatgcaaccgttctcgcatgaaaaagctcaattcaggaaaggtgatcacaattatgttaattttactggtcatctcagccacttagctttttccaagttcaattattgtacaagggatacttcttgccagggctgaaaactgaagctgacgggatagaatggaggtaggtagatatttatccctagatggaagatacatctagcatatacatgtacaatttcttgaagcccagcaaaaaaaacagtgggtcaagtcccgtgaggaagaccgactagttgtatgaaactctttgacacacatcatggtcagctactcaagatgaacccaggccctgttatgaaatgttcttgagtttctttcgcggtttcaagtcgacaacaatgacagtgatgttatcctcgctgcctttcttcagagcgagtctcatcagataatcggcagctgcttgggcagcagggtcggtggatccttcaccctcatcagacaatggtgatgcagcgccattgttcttgtgccacagaaggatctgtcggcgtgcgactttgcatgcctcttcatttgacacaacatcccacagcccatcgcttgctagaataagacagtcatcatccttcgcccgtggaacgaccataacttccggttttggaatgacaaatggtttcagatagcgatcacctgcaacatcaggaacacggataaaattagcacaaggggcactaaatttggacatgcaatccaatgcacagggaagtcagctgaactgtcattggttcaaccaaatttcaggtgaaatggagcaacaatgttgtccaagtgtataacacaatagagttagtttatttgaatggcgcaagagatgtgaacaggtccaactaagacccatttagtcatggtccaagctgcaagtgccacttgcatgaacatgacataaggtacctttgttgcttcgataaacgatggcttttctactttggcaggtaacttcttttcctaatcaaatctgcatactcaattctataacagagatatgtttaacctcatcgcaagttcatcaacaagattagtgccaaactggcaatatccagatagtcacatgattgcagaatcttcacatatgtatgtctcgcatagaaacaagattttagggcccaaactgctgttacttgtaggtaaatatattcctaatgaataatacaacaccatggaaatatctcacagcacgtaatatattcatcactaaaaataagatctagcgtaatagttctttgggcaatacggtaacaggacattttgcctagccaatctgaaataatccactattgatatacttttcttagtgccgaaaactacaagcaatggcaaaggacttggggacttgcactaacatagtgttaacatcatcatataatatatggcaacaattaattctacagcactatgatgcagaagatctcaaaacaaggtggcaataggccaaaatcaatgtaagatcatgtaattttttacatcatgtcgcatagtttcatgtgctttgttcttgccatggccacaatttccaggcccaaagcacagtccttactatggcagtgtcacacaactcatttacagggaaaagagacagacaagtgcttcagcctagatctagcacagggatcaatatgcataccgattgatcgggacatagcaagtataccggacacccggtaaccattccattggatgaccttgcctccctgggcttcaatccttgcccgctcatccttcctgtcaggctgaaaacaaaggcataatcggattcagattaattatccccaaaaatggaccatgacctttacaggcataacaaagcttccccagtttaccttgtgatcaattgacaaggctacgggctccttcccgcggcagagcacgatgcgcgaatctccacagttggcaaccaccacatgagatgagcagacaagcgcaacgaccgccgtcgagccgacgttctctgcggtcaccggttctgaccggacctcaccgccaccattgacaaccctggtcactctccctgaaacctcatcgtccactctctggaaacatttcgtgaacacatcatcccagtgctctttcatgtccacctcgcccatctcccccaaattcttgccaagtcgcttcagctcctcgctcaagacgacgtggatcctttcacggcagtagttcgccacctgcacagcaacacgagggccacggaatcggtcaaaatcgtgagcttaggctgcgccgtgggcgaccaatccggacgccgcggatggttctcaagcacacgcgtatacctcggcgccgccgtggccgtcgaacacgccgaagaggtgcgccggcaggcggagcgcgtcggcgtcgaggcccagcgcgtcgaggtcgcgccggctggcgagcagccgcaccggcacgtccgcgaaccgcggcacggcggcgctcgcgtcctccatctccgcgctgcggccgcgcgtcgacgcgcagccccacaccggcgcgcagtccatcaggtagacgctcctcttccccgcccccgccgccgccaccgcctccttcctctccccaagatccaccctctcgatcccgcccgcccattcccccgtgcaccccacccgcgccgccgtctcatcctccccacatatcgccgccgccgccgccgccgccgccatcaccaagatcacctctccctcctccccccacaaagaaaatcacccccaacaacaccagcaacttctcctcctcctcctcctcctcctcctcctccaacaacaacaacaaaactacttcccaagaagccaacgaagccgaccacctgacctcgcaagcacaaggtggggtgggtgaagagaaccaaagagaggagcagagaggaagaagaggaggtgtgtgcttgcccaaagacgcgcgcgtgtcgagggggaggggaaaggggaggaggaggaggagaggaaggagggagaaggcgaggggaggtggtgagacgggattggacgggtgggggtgagcgggacgcgccgtatcggacaggtctccccgtctgctgctgctgctgctggagggggtccgcgtggcgttaatattcatttgttgctccgcgaacgggggtgtttgctgctaccttcacgccacttcggtacacttgttgcgctcccactcggcgccacatttattttcgccatcccttgcgctgattttgtttcgagatttggagggagagaactttttttaagaaagaaataatgaacctattgaggattggagactggacctgaagttgaaactatacatctcttgccactgtactatagatacatatcttttctgtctctagagaggagttgaaaggataaaataatcaataatacttgttttactaggtgagttgttactccatgattaattgagtattaatatatttttactccatgattaattgagtattaatatattttttacttttttatagaaaattttgtaaaaaaatatatttgtctagcagttcaagaaatgtgtatgtgtaaatacactttctatccgaaacaaatgtcgccttaaacgcctatgttgtatgcttattggtttatcagccacaaccaaactttaagcttttgaaacttaaatttaaagatgatactaagatttttttttaatatagtttcttttcaatattgattttgaaattattaagaacacatatataaaattttatttatacattataattttttttacttcgttcattctttcacgacttatgagccatggggcaaacaatgagaggcttaatttgaggtgaaaaaatattttaaattgtaaatatctcggtgtttgaattagtattactcctaccttatatgtgatgctttgacaagggtgtttagatttgattgggaattcatgattcaaaaagggtggtaactggataggataaaatatctgatagattggttaggccagatgttgatcttattaaaatatgtacaacttatatacaaatgtataagtttagacttccacttatttagggtagctttatactcatgttgcctattgttttttacttaatattgtgctacgtggccaaacttcttgtaaagtttgttgctgaaagtcgagatccccaagcaaacataatatattctaccaactaatatctggggtgcgtctatctgttctatactttactttgctcgcttatggaagcaatggtttttctagaaaataaatttgcattgttcacaattaaatcgcaacacaaaaatagtacatttcgatgtactcttttgaattaagctgttcttcctcatcccttatgcgcttctctgcttgtaaaattaaagctattttgtgatcaatgaagttcatgccgatcaacggtgatgacattcctgtggctcctttaaataattaagcaaaataataatatattttttattgctacacaaatatactgtacgtaggaagatagaagatctaacaaaatcttgccatgcccattactggaccttttagaatgggtgacctgtagtatctgcctagcaaaatgccaaagcaaaatggaagaaaacaaaatagccggagatgactggtacacatgtggtgcccccttacattttctctctccattgttttctctccagtctccactgtgcccaagcttgacacgtcgccccatttggtgagagtgttttgcccccggcaaagtctgaattcgcacctttctaggaggccgggcccactccccctccggccaatgcgagcccgccacttgtccacgtcggatgcgaacacagaaaggactagcagcagcagttgctttctgtgccgggtctcagcgggcgtttagatcggactaaaacttcctatgtcacatcggatgtttggacgctaatttagagtattaaacatagattaataaaaaaactaatttcataaatgagagctaattcgctagacgatttttttaagcctaattaatccataattatcaaaagtttactgtagcatcacattgttaaaatcatggcgtaattagactcaaaagattcgtctcgcaaattagtccaagcttatggaatgggttttgtaattagtatatgtttaatacttcaaattagtgtccaaacatccgatgtgacagggacttggaataagtccccggaaaacaaacaacccctcagccttgtaacttttgtcacgatgagaagtgagaagagtgtgacatacggctgctcgatccaaggagaaagccaagtgtcgcacacttggtagaattccgaggataacgtttgcgtgtaccaggatcgatcggtctttcagctggtagtagatggaaaggttgatcgaatccaggatttatcaaatctttcggggtggaattatcatcgttttacagtttaactgtaaccatgtaaccatgtggttactgtaaaaaccgcgtatattatcgtgtggtataccgttattttaaaaactaaaataaatattacacgtgataatcacgataaccatacagttttgtaaacgtccatcgaatgaatgagagtcacagctgttcgtgactcgtctaggaaacgagattatacggttatacgaagagaaaggattgatctagtactagtactggtgcactgtacattgtcatgatcacggtcacaggcgtgtatacttttttacgtggatgaatacgtacggagtatgagtattttcggttgagcttaggctgtgtagttggaagtttgggttaaaattggtacgatgtgactgaaaagttatgtgtgtatgacatgttgatgcgatgaaaaaaagttagaagtttggatcaaagtttgaatataaacacagccgtaattagcttgcctctacgaccctgtcgtagttcgtgtcatgtccaaatccaacagagcgttcgagaagtactacagatcagctcttcactttcccttttttttttccttcggtttcatgtgattatgtgaaacgtgatgtatttatgtctcgtacgtgctaccactactacttgaaatgtggcgggttccaccagcgagttcgcgagtaaaaatgacgaggcgatcgattaacctgcacgtacacctatatggaccaaagaaaaaaaagcagtatgggtcgccagcgcgtgggcaactcccaccgggcaaaggcacatgtacgcacgcacagtgtgggggtgggcacgtacggggccgcgacgtgcacacgatgacacggcgacatgtacaggcggccggcgccgctcgcgcggcgtctcgatcgcgggggaggggggggggggacgcatcaccgcgcgcccggcacacgtgagcactcgcgcgcgcgtacgtgcaatgcaccggtcgtttgatagccgcgcgagatcggttttgatcgccgagatctgcacgcgcgcgccgcgtcgtgccgatcgatcgtgatcccgccgcgcgctcgcgcgcgcaccggtggatgggggcgcctcgctaccgagtgattgcgccgcgtgcgcgcgtaccagccgccgtgacttggcagctgcgacgcccacccgcgcgcgaaagccagggttgctgcaccgatcgagcatcaaccacccatccgttggcgagctctctggtggttgggttttgggccttttggcgatggatcgcgcggaacctggaatatttgatcagccagctagcgcggagatgcgcccggggatcgatgatatgccgggcgttgccccggcccgccacgcgcgcacttctgcatgtacgacggttgtgttcttttagttaggtgtttggataataggaattgggggtgggattaggattaagaaatgaacgaaggtttagaattaaatggaagatggagaatgaatggttaggatttaaatatgggtggaaaattattttcatttcccatttactaaacactgtcttgaggttgacaaccttctcttctagtataaaaacagaacgacacattaacacatgattaattaagtattaatttagaaaacttaaaaataaattaatatgatttaaaaatattttttctatagaaaattcttgtaaaaacacaaagttaaataatttgaaaaacatgaaactagagagtgaagttgaaaaagtgttgtaacagagtctaggctctatttggtatccctttatcccttttcccaaccactcttctttgttttctgcggcacgcttttcaaactagcgttttttttgcaaaaaaagtttctatacgaaagttacttaaaaaaatcaaattaatcaatttttttaaaaaagctaatacttaattattcatgcactaatagactactccatttttcatcatcactcttatgggaacagatgtgcgaacagctggttcggaccgcatcatcggctcggcaacanaacggacggattatacgagacgaggcgcatttcagaggaaagtgaacgaggcactcatgataattgggtactacaccgacgtaagtgccattgagttgtaaaacggcgacaggtttaattatctcgaacgattttgacttaggtgattccaaactactaaaaatgcaaggcggaaaacatatgaaaagctacaaacctccggagaaagcagggaatgagattattggattgcagctaagctggccgggatatgccgtgcacacgtccctgtcatcgatcgttacgtgttcctccctgtggagcctcgccattggtccaactgtccatcaacgcctttaatttttatacgacgtgtgaacttagctgatgggaggaatcctatatacggatgataaagcgatcgatattagtagtagctttcacaggagcccacaaaagtggctcgtctcgtgcataataacttatttcaaggtcgagctcttgcagtggtcctcaaacgtatcgaaggttttgtatatggcgcaaaagaccgatatgaag

SEQ ID NO: 10127 - DNA, 5748 bp, Oryza sativa
taggttcaaatatcaaagtgtctagaagaactgactggaactgatccttgcaaaacatatatagagaaaatggacatggagccattcaacactcatttttgcttgttaatttgttcatgtggttgcataactagatgaccatcattatggtttctccatgaagttaaatatatttttcctatgccgtccaggttacaacatcaagcatgatagagcacatgaaaaaccttctcaaaataccaggatcaaaggtcctgtttggtggtgaacctctggagaaccattctatcccagaaatatatggtgccttcaaaccaactgctgtatttgttcctctatcggaaatccttaaaagtggcaattttgagcttgtgacaagggagatctttggtcctttccaggtaagagatttttgatgcattgtcttgccacgattagatacaattttttatttaacggtaacctggcatagctatgacatgaattttgttaacctactgcatggttaaagaataggagtacttttctttaatatggtatggtctacttgtagttaatcagtgattttgtgcatatgcatgctagctttcaatagaattgataacaacctacaagtttcaattgtcattgtgatatagtactaacctattccaagttcatatgcgcaggtggttacagagtattctgatgatgagcttgaattagtattagaagcctgtgaaaggatgaacgctcatctgacggctgcagttgtttcaaacgaccctttattcctgcaggtaagttggttttcatctctgttgtgtgttgcacccatgcccattcacttggttgaataattctaccacggtaccaccaagctagttaggctaacatttgtcaagccatcttgtagcaatactcacgcagcttttgccaccaacaattgaacacttgaatccaatcggctcagtgacttatccaacacacactcatcggttttcaggaagtacttgggcgatcagttaacgggacaacatatgccggcatccgagcaaggacaactggtgctccacagaaccactggtgagctaagactagaaactggaacctgccatcttccttttttaaccaaaataggttaacatgtcattttattatttgtaattcaggtttgggcctgctggtgatccaagaggtgcagggatcggaactccagaagccattaaactcgtttggtcttgccacagggagatcatatatgacattggccccttgcctaagaaccgggcactaccttccgctacataaatactatgtcaaggctagattagcttgtagcatgttattctgaataatttgccccgtctgggcaatcatgtgtttcattaaccccgagagcataataaaaaggcaggaaatggttgtgaaatgtgttctgaataatggttgcctgtttgctagtgtccaaactttgctcgcgcttttttttgtccatccactaggcagtacttcgttaacatcaatgacttgtttggaacgtggagattatacatgaaatcagttgcatttgaacaaaaaaaatttaatcgagttcagactagctcgtaaacatctgagatcagatgaatgtgacgaacccagttgtcacaggagcattccctcatcactcaatatttggggtgagagaggctcgaactctcgacctcaggattactcacgtttagctatgagacctacgcgctagccaactgcgccaccaccccgtttttgttgcacgttctttattttcatatatttccggtgcttcttccgccttctgggcgaacactgtagctagtagaaattttaaggcaaattttgctcccagacactctaatttggtagcgatccaaacttcaatggctctaattggatcggcattcctgtccatgacacgaactctggtgagcccagacataatgagaactctgtccatggcgcgctcagactgcagatgagaccgtgagctgcaaaagacgctaacacagatacaaacaaggcggaaaaaaagcacagttttctcagctatttgctgctgttttgtctcgccacaagaaggcgccaagatttgagcttggactcgtgtgagaataatactttggcttcttgttgcagcctgtatgacaccgcaaaatatgctgacaataaacaggtaaaaaaaattgtactcgattctgcacatctcacagccgccttgagacaaaaaacatttgcggttaaaatcgatgtttccaaacaggaatatggacaagaactcatcatagtaatcagggacgcagtgaagctcatttagccatggaatcatcaacacattgtcttgtctctactaggtgacaaactctgtcgccagccaatgcaaccagtacataaacacacctgcaggtaatggtgtctctcctggatcaaatccgcttcttttcttcagtgttgctactgttcattcagtcattcagatagctacatgctacattggaggccaagaaccaagttagtaagcagtaacaactaacaaccatggatcatagcatcatgatggtgaagaatgagattgaaaactactcaggatcatctccagcaatgatcatcaatgcgctggaaggcggcgccgaggcgggcccggttgtcaggaggagaaggagggagccgtctttgctcgcaccgatcaatggtgatggtgacaccaatggtggtggcattggcaagtcgtccttgtcaggcatcactgtcaagaggagctctaggtttcgtggagttagcaggtaaaagaagtaaaccatatatacactgaaaaattcttgtgccttgtgacagattcagagcttgtagagatgacaagaagatgttgtcatgtaggcatcggtggacaggtcgtttcgaagcacatttgtgggacaagaactcgtggaatcctacacagaggaagaagggcaagcagggtaaagtgatcttgttcttcttccttctgcttgtgtttgcaatagcatagctatgctatagatcagtttgagtaattatgcacatgttgttttgatttgcatcagtctatcttggagcatatgatgaggaggaggcagcagcaagggcttatgaccttgctgctctcaagtactggggaccaactacctatacaaattttccggtataagaatatctacttagcaagctggcccatactagaaacacagttgtgaatcataatatatgaggttcatttgatatatttcaggtaatggactatgaaaaggagttgaagataatggagaatcttactaaggaagagtatcttgcatctctaaggaggtaccatcaaagtctttagcatgttcaatctcctattctttttttacttttttttagagagaggttcagtctcctattctgttatcacctattcaactttgacaagcatctaaactgatgccaggaagagcagtggcttctcaagaggtgtgtccaagtacagaggggttgcgaggtatatttggacagaaaaatgtattgtactctatcaacagttctgaagataggtttgtcactgaatgtctactgcatactttcaggcatcatcaaaatggaagatgggaagcaagaattgggcgtgttttcggaaacaagtacctctacctaggaacctacagtgagtacaagaacagtgcttatactctattctacattgtgaattggtattccaatgcatccaaaacttcacatcttaacatcggcccatctgccattcttcctaaatctttttctccaggcactcaagaagaggctgcccgtgcctacgacatcgccgcgatcgagtacaaaggcgtaaacgccgtcacgaacttcgacctcagatcatacatcacatggctgaagccaacccctgctcatgttgccatgaaccctgcagaagctcttgcaatgcagatccctgtagatcacttcctcccaatggaaacccagatgatgatgctccctcagagcaatcctttcacctcatatcacaatgcacaatcactgggtggtggtgacggtggcagtagcagtactaataatcaagaagcctccatgataatctctcccagtggctcatctagaaagagatcatcatccactgctcttagccttcttctgaaatcgtcgatgttcaggcagctggttgagaagaattcagatgcaggtgaagaaaatggaggtgagatgagagagccgggtgcccatccaggagaaggatatgaataccacaacttcttccagggagatgctgctccggacatggacatgtgtgatctgctttcatcaggaaatgtgcatgctgcaagtggtagtgctggatttgaagaggacatcgcatgttatagtggttttggaagcatgcagtcgctgcagcaatagcatgttggtggctcaggatttgtatcttgtgtaaattgctaacactttgtgttcagctacaaatcaaccttccctttttcactgattacttttccatttgacatgtttacagacttgtgccgaacaacaaagcagaaagcttattttgctcactaacactttccaggcattgcattgaacaaaaaggagatagtgattatagtgatataatgataaacaaataacagaatagtgattatagtgatataatgataaacaaataacagaatggcatgtcgtgtgcttcaatgattactacgggctcagacctgtctaataacgaattagccaaataaatgcatcctgtgcacttataagcagcagatatatgccatcttatgatgaacaagatgaattcaaagtagcctagttagagaagaaatatggttttgaatcaaacagaagtatctgcagctggattcagagggtgaactttgaagtacgtgaccaatttcacccaagagttttgacactcagattccgggacatgttttcccatcaatatgcccgcaaatgaccaaaaagaaaccgagacagattgactggtaacagaaaccctcatgtagtctagaacaggctagaggcaaccaaagttaagccgattacaagttttgttcaatgagctgctgatatcaaaagctagcatcctaaaccaaaccagaaaaagcaggcgaccttcaaggcttgaggaccagggacagcccaaccttggagctcttgtcgatggccttggtatcaacctcagtggagatggtgacgagcgacttgggcctgaactcgtgctggatgagcgcactggccatgccaaagttgttgaagcgcgccttcacagtagtgagttcatccagggcatgctgtgtcccgaaggtgagagtgttctcgttgctcgagaagctgtgagccagctctgctccaacagcacttgttttgctcaccttgtggtagtaggaagcagcaaggctgtctcccttgttgttcctgaaatttgcaaatcactctgttactaccaaaatcaaagcatgctagaataacacatctattgcagtaacttgttgcaccaattccaaactagcatatagatgacacatgcaaagcaaactgcccaagaagtccccagaaactgctgccaaaatctaagcatgttagaaaaacacatcaactgcggtaacttgttgcactaatactagtccaaactagcatacagatgacacagaggatgctgagcaagctgccctaagaagtccccagaaaatactgccaattgattgggacttggaggagttaaacaacaggtaaagggccaaa

SEQ ID NO: 10128 - DNA, 18636 bp, Oryza sativa
  unsure (1)..(18636): unsure at all n locations
cggtgaagtcgtagacgcccaacagcagcggcataataggccagccgtgtaggcggaggcaccactcggcggctacggaggcaagccggcggtgaagtcgtagacgcccaacagcggcggcataataggccagccgtgtaggcggaggcaccactcggcggcaacggaggcaagccggcggtgaagtcgtagacgcccaacagcggccgcataataggccagccgtgcaggcggaggcaccactcggcggcgacggaggcaagccggcggtgaagtcgtagacgcccaacagcggcggcgacgaaggccagccggtcggtaaagacgtggacgcccatgaacggtggtgtgaccaaccaaccgtataggcgaggacaccagtcggcggcgacggaggcaggccggcggtgaagtcgtagacacccaacagcggcggcataataggccagccgtgtaggcggaggcaccactcggcggcgacggaggcgggccggcggtgaagtcgtagacgcccaacagcagcggcataataggccagccatgtaggcggaggcaccactcggcggcaacggaggcaagccggcggtgaagtcgtagacgcccaacagcggcagcataataggccagccgtgtaggcggaggcaccactcggcggcaacggaggcaggccggcggtgaagtcgtagacgcccaacaacggcggcataataggccagccgtgtaggcggaggcaccactcggcggcaacggaggcaggccggcggtgaagtcgttgacgcccaacagcagcggcataataggccagccatgcagacgaaaacaccagtcggcaagagtagtgccgcggcgttacatgcaaacagcagaaaataccaagagagattaatctgacatttagagatcaatctaataaacaacaataagttgaaaaggaaaaaacccggcgaagtcggagattaaaaggaaaaaactcgccgagattgatctcttcgactgactccgagacggagcggaggaggcggaggtcgcagtcgcgggcggcgttggtgtccatcagcacgacgcaggacggcaggaaggcatcggcgtggctgcagccgtctcctatgcatccgattagatcggttttggcatgcttcgtgtttgtagatccatcttgcaacaccatggcatcctcgttgggtagattggaccagtaggcttggtggtggacgaggacgaccatcaaatccgtcgaactgtcgttgccccgtcgttgccgtcgtgctgatgcgaacaagatcaggcagagaatagcagcgacgattcgtcttgttgaagtcgtcggcggcgaggaatcaaggagctcccaaagcgaagacgaagccggcgactcataaagttgattccatcgcactcgtcgtcaggaaactcggcgtttacccctacctggcgcgccaactgtcgaaacatggattcggcaataataaaagggggtagcgcacgagacctaaaagtggatggatgcggagacaaaggatttagacaggttcaggccctctcaatgagaggtaataccctactcctgtttggggatttgaatccgccgggtgtgtattgatctgatgatcaggttgtctcctgcccctagagggggctccctgccctccttatataggttggggggcagggttacaagatagaaaccttaaccaatacggtatcggtttcctaaatctactttacaatcttatcaaaccaggactttaggccgttccataatatacagggaaacgtaatacccaagtcatgatctgttacatatttcatatatataagttatcccctataactagtcggataaccatgccgtgtgggtatggggtacccataatctccacaaaactcaacctataattctagggacgtaaagtggactttttgctgctcagtttggtgggtgctgagtgctgactgactatgttgagctgagttgaactacttggaacaatctcatcagtaatcacatttatctaggctataacaatatgaaattggaagttccatctcaaaaaatggcatgggaattgattagccgtttggaagctttcattaatcgcggagggcgtagataaagaaaaaacacaacatgctaaatctaagcagaatctttattagaatcgaagagctcgacaaattcagtagcgcccatttgcacttcagcacttatgttcatcagcaagacagtaactgtgttctatgaagagaacgacatgcatgctcaagtctgttggtaatgtgaagtgtttattcagcaacagcactctccgcgcaagattgcagctccgctacgagctgcacacaaggtgttcgacggaatggcacaaccaaccaaaagcaaaaggcaccaacctctacggaagcttcgacgagcggcctcagtcgcggagcacgacggccgggtccttggacgtcgcgacgtcgtcttcttccccggcgtggtcaggctgggcggcggcaccggaggcggagccgtggtgggtggtgtcgtccatggcctcctgggcgcggtcgaggtagggcttgaagccgacgcggaaggagaggtagccgaaggcggcggcgcccagcaccaccaggcccgaccgcatcgcgttctgccgcgcccggctcctgccgccgagcgcgcctctcatcgcgattctttcctccctcccttctctctcgtgtgcgcttcgttggagtggcggattcgagactcactggaagtgattccgctttgtgaatcgtagctgactagctgttgctgaagggacagatcacttcgcttcgtcgatgtttttttacctgcgcggcagatgatccagcattgaaattgtagatggaaaaggaatttaaaaggcattgaaattgaaggaaaagggttagatataaaatgcagaaaaaaatggaaaaggattaaataaaatgcagaataaaaaaactgttgctgcccaggatcgaactggagaccttcagtgtgtaagactgacgtgataaccactacaccacagcaacttttaatgttatattcacttgattcattataaatacaatttatgaatttttgaaagaacaaaaactgataataccaagtggagcagagtgcaaacgtggtgttaaaacgaagaaacatgaaaaatgctaggaatatatttttaggatgtggttggaacttacacctctacacagtggctaggtcttggcagcattctgtcaaccgagctatgtactccctctctctcaaaaacttggttgtataaaggtgaagaaaaagaaaagagtaataaaaaatattatattttgaattagtagttggagcttttgttgtcttaactactcaactctacaaattaaaatgccgtaagtatactgatcgtatcagtaatttccaaatttaagatagacaaaacacaaaggaaaaagtacgaattaccctccgaacaatcgtgttagtacgaattaccccctaaaccacaaaactggacatttaaaaccctaaactacttataccggacgaattacccccctaactcactccgaagcggttttagtccgatgtgacgcacacatggtaatccagtcagtaataccaaatacaaaaatttgtagggcccacatgtcatatggctttctagttcctcaatcctcaccctatcctcgctgaagcatgtgttggcggcgagggcagtctccattagcgctcacgctaaaggaaggcagggccgggtaggtgtaggcaggaacgagctagaggtggcggcgatggtcgcgcttgacccctcaagccacgcttccacgagccggcgacgacggtggcggcaacggcggcggcttccatcagctgcaaccttctacctattttaacacataagaaattaattacatgtactaactaacaactcattaaaccatacgactactttaatatctctactaacatttaacaatgacaaatgttaacaaaccatacttactaactgtcggtgacatgggatcgggggtatcgtgactagaggcttgggcagccgcggtcacccacgtggcctgaccccctcgggggggtcgggcccgagggagacttggccaccccctcctctgtctccccgaggggtcgggccgctcctgtttcggccccgagggctggggcgccccgaccccctgtggtattggcgccacgtgtgtgggttaggtgggcacagcggcgctcacctaaccgcatttattgcgggatgaacaagcgcgccacgccgcatttaatgcggcatggcgcacgcatatccggtccgtgaccggtcgcagtgtgtgaccggtcacagaccggtcagatcgcgggttagatggcagcaggcagcctgtcatacgcctcgccccgtcccgtcggaatgatgagagcctcttggcactcatccctagctggagccggcgtggtaactcctgggattagcacgtcagtcccggctcgattcatgccaggcttcatcgcaaccattgcaaggaaggcactgtatgaagaagggcaggtgtgtggcatgccgaactgacgcgtagtggacaagaatgaccggtctgtcactggtccgacgccggtcacgtcatcagcagacaaccgtgctctcatattgcatcagcttccggcggagtggaggcaggtatgacccatcccatcggagggtcattcgaacagcggccattgcaaatctccgccggaagatgaagaaatgacagggtgatcccctgtgtctgacaagtgacggcgttgggcatcattcaaagacaggcgttgattcagcttcaaggcggaggcgcgtgtcaagatttggtcaagatagggtgggtctccacccaaaggaagagtagttagaagtggtgcatgtggtatccccttgaaatataaaaggaggaccttgcccacgagaagagggggagaaaaaaggaaagagaagaaaaagaggaggaaaaggaggaggaaaaaggaggggttctagagctggaactctcttgcttgccggctctctgtaactttttctcacacatgcccaccagaacacaggagtagggtattacgcttcccagcggcccgaacctgtctacatcgcccgtgtctcgtgcgtttgctctctcgcgtacattccacagatcgagggtgaagaacctcactcagcgcccccggccgaaccggcaaaggggggcctgcgcggtctcccggtgaggagcctcacgctccgtcatctggcgcgccaggtagggggcgcgtgtgtttttcgggccctcgtcctctttcgtgtgcgccaagtttctcccgctcagcccaatggccgaacgggtagtggcgcacaacctctctccgagcgctagcggtgacgacagggagcggaacccgcgccgtcgagctcgtactccaccgtctccctctcgccgaagtcttgggcgggaggaggcgctcgaggggatcgaaagatccgcgacttcgccacccacgggtgatggagaaggacggcgagacggggagcgtcgcctcctcgtctacggcgatggcagcacgccccagggcgcgctccaggctgcgggcgcgctcctgcgtcacccgcccgtcgtccccgatccagagactccagctcgacgttggctggatgatgtggctaacttggtcatgacggcgcagcagcgcctaggcgccggcgggcggtcctacgcccccaaggcctctggcgctgctaccaccggctccgtgtcgtcgaggcggagggcgcggcgaaaggcggccgttacccgccgttcgtctgctattccctcgtcgacgcctccgacccaagaagatgtgcgtggggggccggatgcccgcctcaatattgagcgtcgacgcaatggtcgtcgtgctgcccacgcaacggagggcgcttcctcgtccggagcgccacttcagtttgggcatgggggccagcctcccatgtccccggttggcggtgccggctgtcgagcctttgtggcgagccttcggaacgtccgttggcccccaaggttccggcccaccatcaccgaaaaatacgacggaagcgtcaaccccgccgagtttctccagatctatacgaccgggattgaggctgctgggggtgacgacagggtcatggcgaatttcttccccatggtcctaaaaggtcaggcgtggggttggctgatgaacttgtcacccgcgtcggtacactcttgggaggatttgtgccagcagttcaccatgaacttccagggcacatatccgcgcccaggtgaagaagcggacttgcacgcggtacagcgaggggatgatgagtctcttcgctcgtacattcagcggttctgtcaagtccgcaacactataccgtgcatccccgcacacgcagtgatctatgcgttaagggggggcgtgcggcacaatcgcatgctcgaaaagatcgcctccaaggagccccagaccaccgcggagctttttcagcttgcggactgtgtggctcgcaaggaggaggcctggacctggaactcctccggttccggtgtggcagctccggccgcccccgggtccgctgctcgatcagggcggcgggacaggaggaggaagaagaggtcggccctttccgacgacgaggggcacgtcctcgccgtcgagggcgcttcgcgggccacccgaaaggggaggcttgcgagcgacagaaagaaggaggccggcgctcccagcagggagcgcccgaccggcaagtggtgctccgtgcacaacacttccctccacgacctcgcggactgccgcgcggtcaaaagtttggctgagcagacgaggaagtgggaggaggagaggagacaggagcgccgtgagggcaaggccccggcggcccccgccggcaaccggcgaggtgaggccaagcagaaggcccccgccgaggatgtcgacgatggcgacgataacctggggttccaggagcctcaggccacggtcgccaccgttgatgggggagcgtgcgctcacgtttctcgccggagcctcaaggccatgaagcgagagcttctggccgcggcccctacccatgaggcgacgcggcgggcgcgatggtcggaggtggccctcaccttcgaccagacggaccacccgccgtgcgttgcccggggaggacagatcgcgatggtggtttcccccaccatttgcaatgtgaagttggggcgtgccctcattgacgggggtgcagccctcaacatcctttctcccgcagcctttgacgccatcaaggccccggggatggtgctccggccgtcccagccaatcatcggtgtgacgccggggcacacttggccgctaggtcatatcgacctcccggtcacctttggtggttccgccaatttccgcacggagcgggtgaactttgatgtggcggacctcagtctgccctacaacgcggtcctggggagacccgcgttggtgaagttcatggcggcagtccactacgcctatctccagatgaagatgccgggccctggtggccccatcaccgtccatggcgacctccaagtcgcgcttgcttgtatggagcagcgttcggaccagctcgccgcggcgtccaagcccgagggtggcgacgagaggctcagcgcccccgtcccggctgccccgaggcagcggatggtcacgtgcgacgaggtcccggtcaaggaggttgccctgggcgacggcccgtccaagaccacatgaatcggtggtcttctggacgacaaataggaagacgcgctcgtctccttcctgcgggcaaacgccgacgtctttgcctggagaccggcggacatgcccggggtccccagggaggtgattgagcaccgtctcgccgtgcggccgggcgcaaggccggtccggcagaaagtgcggcggcaggccccggaacgtcaagccttcatccgcgaggaggtggcgcgacttctggaggccggattcatctgtgaggtcatccatccggagtggctggcgaacccggtcgtcgtccccaaggcgaacggcaagcttcagatgtgcatcgactacaccgacctcaacaaggcatgtcctaaggacccttaccccttaccacgtatagatcagattgtcgactccaccgcggggtgcgaccttttgtgttttctagatgcatactctggttatcatcagattcgcatggttagggaggatgaggaaaaaactgcattcatcacccccataggaacttattgttatacgacaatgcccttcgggttaaagaatgcaggttctacttttcaacgtactactcgaatttctttgggtagccagttaggacgcaacgttgaggcttatgttgatgacttggttgtgaagacgcgcaaccaagagaccttactcttggatctagcggaaactttcgaaagtctccgctccgcccgcataaagctgaaccccgacaagtgcgtgttcggcgtgcctgcgggcaagcttctcgggtttttggtcactgcccgaggcatcgaggccaaccccgagaagatacgagctatagagcgaatgcgcccccccagcaaacttagggatgtgcaatgcgtcaccgtctgcatggccgccctaagtcggttcatatcgaggctgggagagaaggcgctacccctgtttaagctcctcaaacgttccgggccgtttacctggacggaggaggctgaacgggccctctctcagttgaaggcgtacctcagttctcccccggtcctggtcgccccgaaaccagatgaaccgttgctactttacctggcggcaaccccgcaggtggtcagcgcggcgttggtcgtggagcgcgacgaggacaaccctcgctccgcgcacccccaccctgtgtcggttcgacccgggagagagcagggaggagaggcccccgagccgaacggcggcccgaggcccccgacggccggagctggccctctgcccgcttgtccgacgttgccaggcgcccccgacccacaggatggccccggggccactgcgggaaggccgcgcccgttgccctccgaccccgaggtcgacgacacagaagccgagtgcgccccgcgcggcctctcggacgaaaagcgccctggagatgcggcccctgacgaaggggatcggccccgccgaaaggtgcagcggcccgtctatttcgttagcgaggccctccgggacgccaagacctgataccctcaggcccagaagatgctttacgctattctgatggcttcgaggaagttgcgccattattttcaggcgcatcgggtctcggtggttacgtcttaccccctcggccaaatcttgcataaccgagagggtactggacgggtggtgaaatgggcaatagaactctctgagttcgatttgcactttgaaccacgccacgcgatcaagagccaggccctcgccgactttgtggcagagtggaccccagctcccgagcccgtctccgtccccgaggccagctcgggcccctcgcagctgcctcacaccgcctactgggtgatgcagttcaacgggtccttgtctcttcagggtgccggtgcgggagtcacattgacctcaccgagcggagacgtcctcagatacctggtccgcctcgactttcgggcgaccaacaatatggcacagtacgagggactccttgcgggactcagggtggcagctggactggggatccgccgcctcctggtgttaggcgactcccaactggtcgttaaccaggtctgtaaggggtaccggtgctctgacccgcagatggacgcttacgtgcgtcaggtgcggcgtatggagcgccatttcgacgggatagagcttcggcacgttcccagacgggataacgcggtcgccgacgagctctcaaggctcgcttcctcgcgagcccagaccaccccgggcacttttgaagaaaggcttgcccagccgtcggcgcgacccgactgtcacgcccagaaattctcgaaccagaatttctaagctgaatgtgcattaaatccctgtccaggaccagccagggtacacaaacgacaattgttgacatacagatccacgtcttacaaaaatagaaaagattacaaatgcagcggaaaagataaaagcgagctaaaccgggaagcttgacttcagcagcgggcgactccactccacaggcaatccttgacggcagcgacgaaaccaactttgacaaaacagctccaactaggaagatcttcagctctggtgtgggggaaaagagagcaagactgagtactacccactgtactcagcaagtcataccggaagaggaggtatgatgcaagatataaccaaaggaagctagaggttcttttgcataaagctagcatttaaaaacggtagttgaaggcagtaaaacagttgtagtaattaatcaacattaaccaaacactgtccaacgctacaccacgttgcaacaggcccaaccaaccacctgaactacaccagttcattaagctaaactaggggtgagactaatcacggtgaatctggttgatcgcccataaccgcgggcacggctattcgaatagttttactctggccagaggtgtacaactgtacccacaagacacgattccacacatgtcgccatgccccgaagtatcaccatgatactgcaaagggggaaatcgtgacaagaccctccacataaccctcccctaaccatccacaccacgctaaggtttcacccccactcctcaaaaggcagtgggcggtcccctcttgcgccgcggtgaatccggcagctggacaaccggacaccccggccgacccaactccatcacgcccaccctcgccaccggtgcctaggaaagggtcgagctatacttcagatcaagcagttacccactcccgcttgtggtaagcacggtaagtctcccagggtttcccgtgaaccggtccttaactgccatgggtgcgaccagcaaaaccatgcacccacagcccaccattcagtgtattttaattaactcacaccattgcggtggcaccaatccaaagctatgctcatagtcaaagtctatgtaataatgtgatccccatgtgtgtgctagttgaactaagcatggctaagtatttcctaaaccaacatctagtcattttgatacccaagttatcaatggcataaggtaaacaataaatggctgagtattaggacctatcccacatgacattgtaaaaggatgcaacatttaatagaaatgcgggatatttgtaaattgggtacaatatgatcaaacgtattgcatgacttgccttgctctcgaactgatgagacctcagcaacgtcttcgagaaaccgcggatcgacgaaacggccgaagcctacgcgacaaacaaagcacacaagcaaaacatgctataagactacagaaacaggaaacaaaaccatttttaatggattctttgcatttttcttgatttactgagacttgaatggacttaaacggagctcggatgaattacttatgaattttagaagataaactgtgtttttactaataaagaaaagtccttaatcaatttattgcgcaataaagcccagggctgacgtcagcggaagggggggcggcgccgacaggcggggcccgcatgtcagcggttcaagagagaggaagggggcgccggcaagcgggccccatgggtcagcggcacaaggtggccggtccaccgtggaccgggaccacgcggggggggggggggccaccgccggtccacgggaccgacggtccggatcggccgggaggccgatcggacggcacggcggcggctaggcacggctcggctcggcttcaaaaccggccggccggccatggcaaccggcggcgacgcgcacggtcgccggcgacggcaatcggcggcgcaggaagcgacacggacggggcgaaaagcggcggcagcggctgaaggcgacggcgcacgcgcgaaggacggcggcgcacacgggagagagggaaaaaggggagcggaggggagcctcaccggtgagcacggcgaccaaagcggaggatgaaaggcggcggcgatgaccggcgacgcggaggcacggacagcggcggcgacaccctaggagaagatggagaggcgttaggagaggagacgacgaccacggcggcttgaattgccggccggagatggaggggagggaagaactcaccggctcgcgaggggagaagcgctccggtgggattccggcgacgcgaggcggcggccgggaaagctcttgcggcggcgaagctaacggcggcggcggtttggcgcggcggcgactctagcggcggcggctcgcggccgaaggcggcggcaagcggcggagctcgggtgtgacggcgcgggcgcggtagggggcgtgggagaggacggcaaatgggggaaacgagggaggggactcgggggagtgcttttatgggcgagggaggggaggacgtggccgggaaccctcccgatttggccggcgacgtggggaggagagagagagagaggtggattcaaatcgattcccgcccatttgcgggcgcgcatgcgggccgggagatgcgggggagagggcggcgacgtgggcgcgaggtgcgggcggagtggggcgcggagaatggcgggaaacggcggcggcgacgagggcggtttcgacggcagcagcagttgccggaggaaggagacgaccgacaggtggggcccacctgtcggcgtcccgagagaggagggaggggcggcttgggccggcccaacaaaggggaggccgggcgcgggagggagtgggccgacggcccaacagagaaagaaggaaaagaaaaagaaaaggaagaaaggatttttcctgggattaaaaattgcactttggtgatttttaattggtaaaaattatttccaaggctctgaaaattccactaaaaatcctgttaatatattgtgacatgtggaacccaagaaaaatcccacaatgccaattccaattattaattgcatttattaattagggaattagctctaggttaattaagataatttcttcggacgatttatttagccaatttttaaagcaaggagagggggaaacttcagggcgtgacaaacctaccccccttaaacggaatctcgaccccgagattcggaagggctggcgaagaggtgcgggtgggtggccttcaactcatcttctctttcccaagtggcctcttcctctgagtggtggctccactgaaccttgcagaatcttattactttgtttctggtctttctctcgctggtttcgaggatacgagttggcttctccacatacgtcaagtcttcctgaatttcgatgtgatccggacttgcctgttcctcaggaactctcaaacattttttcaactgagagacgtggaacacattgtggatgccaagcatgttggagggaagttcgagctggtaagcaacttcacctctacgttccaagatcctgtatggtcccacaaagcgtggtgccaactttcctttggtttggaagcgatgtactcccctgagcggagtgacacggagatacacataatcccctgtttcgaaagcgagctcccttcggcggttgtctgcatagcttttctgccgagattgcgcgattctcaatctttccctgacagctctgactttctcttctgcctcatttaaaacttctgtaccaaacaactggcgttcccctgtctgatcccagaagagcggagtacgacaccttcgtccatacagtgcttcaaacggtgccatctgcagactagcttggtaactgttgttgtacgagaactcagcatacggtaagcttttgtcccatgctccaccaaagtcaagcgcacaggctctcaacatatcctctagtatttgattgactcgctcggtctggccatctgtttgtggatggtaagcagtgctgaagtttagacgggttcccaattcttcttgcaatttctgccagaactttgaagtgaattgacttcctcgatcagacacgatcttcttaggtacaccatgtaaacacatgattcttgccagatagagttctgctaatttcttccctgagtaggtagtgtgcaccggaatgaagtgagccattttggtgagtcggtcaacgactacccaaatagaatcatgccccgatgacgtcctgggcaaaccggtgatgaaatccattccgatttcttcccacttccattctggaatctgaagtggctgtagcaaacctgctggcctttggtgttctgcctttactcgttgacagacgtcgcagagtgctacgaattcagctatttcccttctcatgctgacccaccagaacttttctttgaggtcttggtacattttggtactgccgggatgaatggaatattgagtttgatgagcctcggttagtattaggtcttttaattccttgttttcgggtacacacaatctttctcccatccagattgttccttgttcgtcctcaacaaaacctcgggcttttccaaccctcatgttctttttgagctctgctatttcaggatcacttgcttgagctatgcgaacctgctccaccagtgtgggctgtgcctctagggcagccacgaatccgtgctcaactataccaaggttcaaatgtcccaaatcacgttgaacctcacagcatagttcctctacccatgcgacgttgcagtgactcttcctgctcaaggcatctgcaaccacattagccttgccgggatgataatgtattcccatatcataatccttgatcagctccaaccatcttcgctgtctaagattcaaatcaggttgagtaaagatgtactttagacttttgtgatctgtatatacctcacaacggttaccgatgagatagtgccgccaaatctttaaagcatgaacaactgcggctaattccagatcatgcgtcgggtagttgccttcatgaggacgcaactgccgtgaagcataagaaaccactttgccatcctgcatcaacacacatcctagcccctggcgagatgcatcacaatagacctggaaatctttcgtctgatcaggcaggattaagactggtgcagacaccaaccgtcgtttgagttcttcaaaactcctattgcattcagcagaccagataaacttttcttccttcttcaatagctgtgtcattggcttagcaattttagagaagttctcaatgaaccggcggtaatagcccgcaagtcctaagaaactccgaacctgagtgactgtccttggtggggtccatttggtaactgactccacatttgctggatccacagctactccttgagcattcacgatgtgaccgagaaactgaacttccttaagccagaagtcgcacttgctgaacttggcatatagttggtgctcttttaacttttcaagtaccagccgaagatgctgctcatgttcttcctcggacttggagtagataagtatgtcatcgataaaaaccacgacaaacttgtctagaaattccataaacaccttgttcatcaaattcatgaagaaggcaggtgcattagtgagtccgaaagacataactgtgcattcgaacaacccgtaccgagtgatgaatgctgtctttggaatatcctcttcgcggatcctcaactggtgatagcctgaccgaaggtctatcttagagaacacagtagctcctttcagctgatcgaacagatcatcaatccttggcaaaggatacttgttcttgatggtgacctcattgagtgcgcggtagtcaacacacatcctcttggttttgtctttcttctccacaaagataaccggagcaccccaaggcgacgtgctcgggcggatgtatcccttctgtaactgttcatcaacttgcttcttgacttccgccaactcgttggctcccattctgtaaggcctcttgtggatcggtgcagttccaggtaccaagtcaatccggaactcgatatccctttttggtggcattgtggtcagatcgtccggaaaaacctctggatactctctgactatgggaatatcctccagcttcttagtggttttctccactgctacctcttgttcttcaccagcagcctggtttaaactgatccttggcttctgcggcactggggactggaaggttaccacctctccttttgcattggtcaacttgatggtgcggctggcgcaatcaatcactcctctgtgccttgtcaaccaatccattccaagtatgacatctaggtccttggattcgagaagaatgaggttggctggaaaaatcgacccttgaatttcaactgtcacagatgggcagtagtgagttgtggtcatgccacctccaggagtatgaactcgcattggtatcttaagcttcactaaagataacccatgtgcaccagcaaaacgcttggaaatgaaggaatgggttgcaccagaatcaaacaatattactgccggtgtcgagttgacggggaatgtgcccaatataacctctggtgctgactgcgcctcctctgcagatgcatgattaacacgggcctgaacgaacttgggtccagcacgtcttggcttcgggcactttccaaccgtgtgtccgggtttgttacaattgaagcagagttcgggtttttctaccaacctcttgggctgttctggcagagctggctgaactgattgagctggaatctttagtgaactcggagtagggttgagactgtgctgctcactgttgttgtggctgccactatggtggttcttgaagaacctacccgggtggtagggacggtgctgncggataatcatggtggaaggtccaccgtgatgtcccatcgtgaaccgaggcttttgactcttncnctggggagtcctgaactgagctgcctttctcttacggtttattttgttacagtgctcctcctgacggatagccttatccaccaacttctcaaagtcctcataatctctagagatcaactgggtagtcaattcatcatcaagaccagacagaaacttctcctgcctctcggcatcggtacgcacgtcctcaggggcgtagcgcgcgaggcggtgaactcatgcaaatactctataactgttctggttccttgttgcagggaacgggaactactctcttacttttgtggccacaaattcccctcgggtaaccctagtgctttattggaaacctatgacaataactctagtccaagctaagcttctgctcccagcttgggacggtgtcatccatggtcagttgtacccacgcataatagtaagtcgggaactcttcgtagtctgtgtgtgctatgctaaaagctaactctttctctctgcatcgcttgtcatttgcataaagtattcatgcttgcttctacaatggtctatgaatcctagtcgtcgggctctctgattggtgttggtgtgtgcttgagtaaagttggcggtcttgacactgaagaaattctaacagtttggactgatgatgtgtatgactatactgcatgttctgctgctgcagctgtgcttgctgctgcacctgctgtcaacacctgatggaactgttgctgcatctgttgcatcatcattgtcatcatctgagtctgattgtccaacacctgagcaaattgttgggttctcgggcggtgggagacggactgttgtcaaatgcaccgttggcacgtgctccattgatcggctcttcgctgccattggcgttgttcgagtcgcgtgaaccattccttatctccatctgaaggggataggtagaaatatgagaaaaggaagaaaaacagggggctcagaaactaatcttgcttatgaatttaagtgcaattatcttaatcttgattaaaacactgaaaaagaggcacgcaactcctaattgaggcagtcataccactgacacatgatatcgaccgccgactaacccacaagcaacaaacctaaacacgaaaactagcaagcaaacagactaagaaggcgataaagctaagggcggcgactctgaagctcgaggcggcgcttgcaaacgagggataggactgacatctaaagtagacaagggataggaaccaactcatgctcaaatccaaattaaacaaagcaaaagaagactcaaataaataaccgagcatgatgatttttatgcatagaacatttttcatgaactcaaataaagacactaatgcaactaaacaataaattaatgcatagactagttgcatggaaaatgatgcgcataacattgcccccatcgaatatagacacgacctaatgcataacccccaataaattcccgactgactgtcgaataaactccaactaaaatttttctaaagccctagactgagctaatttttttcttttttttaaaaaaaaaatccgatccgaaagaacgaccaagatttttcccgcaaaccaaaaaggcaaaactccaaattttcccgaaacaattccaggtgcaaaagggcatatgcatatgaaaaaggggttcagagggctcttagggtttccagttggcttgtcctacggtcaaggtcggctctgataccaacttgtcacgcccagaaattctcgaaccagaatttctaagctgaatgtgcattaaatccctgtccaggaccagccagggt

SEQ ID NO: 10129 - DNA, 13237 bp, Oryza sativa
aaaagttgtgctcaaagtgctgtagataataaagtaagtctcaaacaaaataataataatttcaaaaaaaattgaataagacgagtggttaaacgttacaagcaaaaactcaaaatcccttgtaacaggggacggagggagtaattaatgtagttacacctacgctgcatcgatgatcactgtagtctgtatcctaacagtgtctaaactctgaagaaaacctcgccatggagctcttttctgcaatcctcggtgacctcactagcaggtccatctcctacgtcatggacagatactgcagcaaccagccggcggcgatcgacgacggcgtacggcagctgcgccggctgcttctacggacacacaccatcgtcgaggaggcagaagggaggcatatcaccaaccaagggatgctcccgcagctcaaggccatgagagacgagctgttcagaggccactacgtcctcgacaccttcagacaccgggctgatctcctccagaaagaggaggagaaagaagatgaacaggtgagaagctcgtttgcaatgtcaaggctcaatcctgccaagcgaatccgtttctctcgtgctagaactagtagctttcaggatttggagtccatgattcgtagcctggaagacgccattgctgacacaaaggagttcatcgtgtttctgatgagctgccctccggttatgtaccggcaacctttcagcacgcatctttatctggacaagtgtatgttcagccgtcagatcgagcgagaacaagtcatcgatttcttgctgcggattgatcctgatcctcatggtagttgtaatgacataggtgttcttccgatcattggtcccgcgttaatcgggaagagcacactgattgagcatgtctgcagagatgagagggtgaagagccacttctctctgatcttgttctacaatggagacgagctgaagcatgagacagtggccactttcagagacagatgtatcatcaagcactaaaacaactgtacctcatcaccgaaaacactgttgctcgtcatcgaaatcttaggcgatgtggatgaagatacatggaaggagctgtattactcctccgaaaaccgcattccccgtggaagcaagatcataatcacaagccgatcagaggtacgacaggtgctcttaggctgaaatgcctgccaactgaagcctactggtactacttcaaggtgtttgtgtttggaagtgcagatcctgatgagcatccaaagttgacatcaatagctatggagattgcagcagagctgagaagatctctattttgtgctcatgttgttggtgccttgctaagggttcatcttgacgcccatttctggcgcagggttcttgaaggcaccagagagtacatgcagaagaatcttatcttggcaagcgaataccctcatgatctgaagacggacaagaaccatcctcgatacgcttggataattagtgaaccaaagcctatcaaatcccttctaatctacgacagttaccagaaaggttctgaaaacgctgaggttccaaatattacaattcaggatctgctgtttggagaagcttcaggtcgggggaaatttgatatcttgctctggaaatctcaaatgccaccatactgtagccacatctgcagctgtgttgtctagaaatttttttttccttcagatggttttgcccagataatatataccatgacaaataataggcaattaggtctttaggtagcaaataattgcagaataaatccattttcagatggttaagctccttgtctgcaaaatccctttgttttgtaccctatagaatctgcatcacagtaaagctttctgttaatcacgtcgggcttctgcagtacatatgaaccagctgtcagctgtcactttattcagaggaacctgaatctgcttgtgccagccaaacagctttacgaacaaggtaagcccaatcaaatcacaaacgaaaccaaagctggcagcacgtaggaaacgctttgctggtaacagaagggagttcaataacagcctacaaaattctgaaacgtaacaagcaactccgatatacaaattcgactgacatatcggggactcttgaccaaatgcgacaccattatttgtttgatcagatcagcacttgcacagtgatttacggatagacaaaattcaaagttgaccgcaaacataacttgatactgcaggcagtacatgcatttcacttccgaccaagagtggggaattgggattggtctttgatttctggagctggtggagctgcagagcgatggccctcaccatatccacccctgaaaccgccacgatccccgcggcccctgccacgaccacggccgccatagtacctctctccttcagctggttttaggaactcgttgatgctcacagactgaaaaaattgacccccaatcagtaaacactgagtacataattaaagcatttcttctaattgaaagcaccaaagcatgaagaatcccaaatgaacagataataggctaacagcagatcagacaaaatgtaaatgaagttgtaacagcagttcagacttcaggagtgtaaaatgaatacaatacaaaaggcaaagtaaatttaccatgaccagataaaacaggctgatggtaacaagtggttgattatgccagaatattaatagtaaaaatccattagcttgttaggggagaggtagagatatctaaggtaagatgggaacatgtaataccttcttagcacgctcatcacgttcagcattttctttcttcttcaaagcatccttgtcagatccctacagcgaaaaattatcagtccatcaatatttccatcggttgaagagaatggaaggattacaaggcgtaaatggcaaaggtaccagtttgatgaaaacttcatcattttctttcttattggaaagtggttgcatagacttcaaatccttgtcaatttcaaccttcctctcttcagtcttcaaagaaagaagtgctttcctcttctcctcccttaatttctcaaactcctcaagagtcatttcctatatcatcaaacatttgaatcataagagaggaggtatggacaaatataatacactcctagacgactgttgtaaaaggaagttataggagtaattcagaaaacaagggcacaattcacctaaaaattagtatgcaccaaaattatttgttcaaaaagtactcacatatgagcacacaagcaatcaaaagaaaacaagtaaccagccagaatggtttcagcttagagtactgttacttcatattgtggccaacctacaaaataattatgacaaacttatggccatatggctatcaaaatcaatacttcattggacagttgtttgtagtcagaaatggagagccctcaaagtctttagaagatctgctactctcatttttagccatttcctcagagaaaaaggaagtcattaagccatctcaactttgtggctgctggaaaactaaaaattgtgcaagtaccctttgggaccacagtgactaacaataaaaggaacattttcacacataaatccaactatgactaatcaggcaaggaaaagtgacatttttgaagccagcaacaagtcatgttcacaaaccttaccaattggcaagttcaaacgaattatattaacgtgtcttactttctataatactaaagatatagtataaatctaaaaatctgcattccatattgatttaagtgatcagaagtataccttatcctcttccttttcttcctcatttggagtgacatctttgttatccttgttctcatctgcctgtggagcaccctccggtgcgccttgcttctcagtaacaggggccttctcatccaatttcagggcttccccagtttccctgaccaatcaaacaacacaataagtacttatatctccatagtatggacatgaacagcttaaatgatgagccacttactgggcgagaatttcatcagtggtagttccccagttcccacgccccgaaccctcacgcttcatctcatacccacggccagtgccgctatggcgctcatatggcctccgagacatcctctcagagtcatcaccatacccacctcgtcgacctcctccctggaagggtggccgagggcccctctccctgtcctgagcgccttcttcacctccagctctgctaccaccgcctccaccatatcctccctggaagccattcatttcttcacctccaaagtctcggttttgaccatagcctcgcccacctctgcctcggccgcgttctccgcgcccataccctccgcgtgagggtgcactgccatctcgagactccctcactgaaacaaaacatgtattaaacataaccatttcactaagtaaaaagaagccttacataccagaaaatggtaaaatgaaatcaaaactcatatctttacaacctacatatccatggaatcaaaattttatgctgtacggaacaatcgttagaagaatcctatataagttgacaagacccatcatttaataatcctagagaataagaacaggaacaaaagcgaacgcgtatcccccagatctagaactccagaacctcaaccacaaaactcaccggcctgtgaagggggagccggcttggtggggaacttggaggcggccggatgcgaggagcccttcccgccgcccggagccgccgccgccgccgcggccttcttcgcctcggccttctgcgccgcgacggccgccttggccagcagctgcgcggggtcgtcgttgtcgtcgccgccgaggaggtcaaaggggttcgcggtcgccataggtgcgagttcgacggcctacaaaaaaaatcacgctacaagctcgctatcttcgtgtgtggggtgggtgactggggaactgacccctcctggctacgaggctcgcctgccggactgcatcgccatggctctccagccgccaagatcgagggcgtgggaaaggcaagagtcggcggcggcggcggcggcggagagagagaggagagagacgtagtgaggggggagagggtgtgtttgtgaggaaaggaataaaaccctagccgcaatcgcgctttcttttttttttttctttttgcccactagccgcgccgagccgagtccatatcctctcgctatcgtttcgcccgcgtgaaattacctcgctgcccctaccttcaacgcgacgtttacgcgagtttaggcgtgggttttgaagggtagttatggaatttgattttcgtgtgggccctacggatgggtgggggtgctgccatcctgggccggacccggggggtacgttggtctattgggccggaacgggatcctctgtggtgtgtccaagctgaggaaattatactccctcctttcctaaggttgttaacgattttgctatatatttgtcgacaaattttctctaacaaatttgacagatataattatagtataattgtagtgtaattacactgtaactatagtataacttgtatgtaactttcaaaaatctctttgtaatatgttatttcgataaaatggaggttgtgggaacaaatccttacatatatatgtgtgctgtgattttttttcttcctcaccaaaataaatcttgtaatagatttaacgattcaaaattacgtgaaacttatatacaagttacactctagttacatgcaagttacagtgtaattacatataagttacagtgtagtgtaattacttctgtcaaatttttaggagaaaaattgtcgtcaaatgtataggtggtcccggttgttaataggctgccttgttaatatgaacgaaagaataatgctcaagtttcacaccatccttgtatttcagtgcaatttttgatgtgccagtcagataagtttgtcaatagtttgtcaggataaaatgtactccctccgtcccataatatctattgtcaatggcaatctaggactgtttcgttatactatgaaatgttccatccggtactatgttgctatattatgggacggaaggagtatcaaataagaaaaactgcagcacgggaaaaaaaatcaggattaattgatagtacaacactgatagacatcttggacactgaaagatattatgaacagtcaaaacaacaaactagaactattggtttggttaattaagagttgaagttgacaacagactttatcttaagtaattagcctcaaacaacaaaggtagtgtccaaaatgtaaacctttaggactaactacataaggcacttgaggagaaaacacgcagacaaacaatatttggtgacctcagagctgttgaagcattttgcaatacaaggtacaaacagagtcccaaacttaccagtcagagagtaaacataaatcccatgattgcatctcacatgtattaaatttctcagacaattcccagattaatcctgtatttcgatagggaacaaaaatccccttcaacatagaactagacacgattgtcctaaaacagcttatcacaaacattaaacagcctacctagtaaacaatgatgaacatgcactatagattataacacagggtaaccacaactgctcgcagttatttctgggcctgatgacagacagtattgcaatccaaataacatcaaactatggccctgtttagttccaaagttttttttccaaacttccaactttccatcacatcaaattttttatacacacacaacttttctatcacatcgtaccaatttcaaccaaacttccaaacttcagtgtgaactaaatacagcttatatatattgttaacatctagctcaatagctagggtctttttttttcaagcgcgcaaaaggattgcacgtcaatatattagaaggaaaagagtttttgttacacagcgtaatcggcacagtagctagggtctttgtttcacccagatgagctcaaagcatccagagataacaaacctagctaaatcaacaacatgcagcaccaaatcatccaaaaaaaactaactttccaccaatcagttactccccagcagaattttttttagaaataatattattttaatgaaaaatcacaaaattagtggccatccggaggaaatcgcgaatttggggaccggtcgaatagctgcacttcgataggccacctatcgaatggcaagcgttcgactagggctagtcgaatgctggggattcaacagggcagcgtattgaacggagggagttcggctggtcccaccacctggcgccgcgcggcttgtcgaaccgggggcgttcgacaggtcctctccaccgcccctgtcgaacaatgggagttcaacaggcccttttaaaggcgcgtccgacccggtcgagctgttgtttcattgttatcaggaccacatcgccatcgccgccgcgagtcaccccttgggtcgccgtgcgtgccggagggagcgatgggagggtgtagcaggccggagagaagcttgagcaggcgtcgcccaggaggaaagggtaggcgacggtctcaaccagcaaagttaaggtataaattactaatccctaagtatgaggcctatgaaattaaaaagggcttgtgatttgttaattgtttctcattgttcaatgttagtgacggagcgtgaggctcctcaccgggagaccgcgcaggcccccctttgccggttcggccgggggcgctgagtgaggttcttcaccctcgatctgtggaatgtacgcgagagagcaaacgcacgagacacaggcgatgtagacaggttcgggccgctgggaagcgtaataccctactcctgtgttctggtgggcatgtgtgagaaaaagttacagagagccggcaagcaagagagttccagctctagaacccctcctttttcctcctccttttcctcctctttttcttctctttccttttttctccccctcttctcgtgggcaaggtcctccttttatatttcaaggggataccacatgcaccacttctaactactcttcctttgggtggagacccaccctatcttgaccaaatcttgacacgcgcctccgccttgaagctgaatcaacgcctgtctttgaatgatgcccagcgccgtcacttgtcagacacaggggatcaccctgtcatttcttcatcttccggcggagatttgcaatggccgctgttcgaatgaccctccgatgggatgggtcatacctgcctccactccgccggaagctgatgcaatatgagagcacggttgtctgctgatgacgtgaccggcgtcggaccagtgacagaccggtcattcttgtccaccacgcgtcagttcggcatgccacacacctgcccttcttcatacagtgccttccttgcaatggttgcgatgaagcctggcatgaatcgagccgggactgacgtgctaatcccaggagttaccatgctggctccagctagggatgagtgccaagaggctctcatcattccgacgggacggggcgaggcgtatgacaggctgcctgctgccatctaacccgcgatctgaccggtctgtgaccggtcacacactgcgaccggtcacggaccggatatgcgtgcgccatgccgcattaaatgcggcgtggcgcgcttgttcatcccgcaataaatgcggttaggtgagcgccgctgtgcccacctaacccacacacgtggcgccaataccacagggggtcggggcgccccagccctcggggccgaaacaggagcggcccgacccctcggggagacagaggagggggtggccaagtctccctcgggcccgacccccccgagggggtcaggccacgtgggtgaccgcggctgcccaagcctctagtcacgatacccccgatcccatgtcaccgacagtagcccccggcgttatgccagggcgatcgcccccctcgagggaagcgctcgggcgtgacgccactccttaggtctggtgaccggtgggaccggcctctacaggcgggcaggaacccagcggtcgcaaatcgcgcgcatcggctagggaaaaatgaccgataataatgagtggcctcttcgagaccgctacatttctcgaaatagcgcgcgaatcgggacgagccggttcatttcgcctggagatatgatgatgacgcttcggtcggcgagcgtagttaacgcgcgcacgatatgtcccatctcgactgccacggccgcacatccgcctcgtgcgccgcaaacgggcgagtgggattagtggaggcgtgggcgcgagaaacgagggggcgagatagtgggcgcgggaaacgaggagccaggaatagcgttggcaagggtataagggtgccaaggaagagattcgtttccttcctctcgccattattccccttgccttcgccgcttgcgccctaactcctcgtttcctgtgccctacctttgccgcactcactcgttctcaatctcctcctccgccggcgtcatggcacggggctccgcaccgctcgacggtagcgtgctgccgccttcccgcatcgtgagcgagaggcaggccgggctgccgcgccgattcatgccggcatctgccgccggccgggaggcggtcgagctgggcgagggacgcccggcaccacactacccggggcggtccgtcttcttcctccctttcgcaatggcagggctggtcccaccattctcttctttcttcatggatgttctggagttttatgatctccagatggtgcaccttacgcccaacgcagtaatgacgttggccatcttcgcgcacctgtgtgagatgtttatcggggtgcgcccatctcttcggctgttccggtggttcttcaccgtacagccagtgtcgccgccgtcggtagttggtggctgctacttctagccgcgggggccggtgctgagccgctacattccctgcgtcctccgcaagaaatgggacgactggaagagcgactggttctacatccccctcgccgacgaagcgcgcctccgacttccgagccagcccccagcgcaggtctccagctggcgggcgccggtagatctgggagacggctacgacgccgttcttgaccgcctggcgggtctgcgatcccaggggctcacgggggccatggtgtacggcgactaccttcgtcgccggattgcgccgctccagcggcgcgcccggggcgcctgggagtataccgggtctgaagactgcatgaggacccaccagggggtcagatgggactgggcccctgatgacttcaagatagtggtccaacgggtgctgaatctcagctccgtggaagcatccctcatcccccaaggagtccttcccctctgcagcgatccagatcgcaccaccatcctgaccatcatgcaggcggtcagggcgtcggaggaacgggttcctcgaggccacgatggcgcgggcgggagccacaggggggaacaatctaccccgggagggggtcgtgcttctgggccccgcgacgggggcccgggaagcagccgccctaccgacgcccgggggaagaggaagcaagaaggaaccccttccccatctcctccccgagggggcggggcggcgcgtgccagcagcaggcgcccagagggtgccgtgccgacgtcgcagtccgagggggaacgaaagaagaagcggctccgcaaggtgggggagaccgaaccacgccggggaaaccttatctcccccccaaggtggtcgtttagccgacctcctcgcaggttcgtccccgcgcccactgcggctgtattcattctcctatctcccaaggcaagttttcactcatccgtttctttttgtcttctggtttttcttctgcctcagcgagattccgtcgccccccccccccccgccattccaagtccggccagtccgaggctgaggagacggcgaccgtggaggcccggaggcgggaggctgaccggcgagaagacgcagaccgcctccgggaaaccgaggaagctgcccaggaggccgtccgggctcgccaggctgaggaagccgctcgggaggaggccaaactccgccgggccgaggagtccgtccgggaggcggaggaggcgcgcgcatgccaagcggcctgccaagcccccgacccgactccacccgaggcgacgacgacttccgaggccacccacgacgaggccacgggcgcaccgctcgggcccgacccctcgggcgacgctcgggacgtgccagcttcgggagacgctcccgagtccggcacgtcgatcggcgggccgtgccacgcggcgcccgcaccgaggcggctctcccctctgccttccgctgcccgactgaacgcggagcccctcctgcaggccttagccgccgcgaacaccacggtgctggacgggctaggtgcccagatggaggtcctgcaggcagagcggaaggagctcgacgcggcgtgggcgcgcgtcgaggaggggcggcgctcggtggaagccatggtggaggcgggccgcaaggcacaccgccggcacgcctcagagctcgaggcccgtcagagggagctggcggagatcgctagggaggtggaggaggagcgggagactgccctcatcgccaccgccgtgctcaacgaggcgcgggatgatctccgcctccaatacgggagccgggcggcggagctagagaagaaactcgacgccgcccggggagtccttgacgccgccgctgcacgggaacggcgggcggcggagaacaaggcggcgtcccagcggcgcgaagaggcccttgaagctcgcgccaaggcgctggaagagcgcgcccgcgcgagggagagggacctggcggaccgcgaggccgccgtcgccatccgggaggcaacgctggcagcgcacgaagccgcctgcgccgaagaggagtccgcactccgcctccgcgaggacgcgctcaccgagcgggagcgagctctcgaggaggccgaggccgcggcgcagcggctggcggacagcctgtccctccgcgaggcagcgcgggaggagcaggcgcgccgtaatctggaaggcgcccgcgccgagagggccgcactggatcagcgggccgctgagctcgaggcgcgggtgaaggagttggacgcgagggcgcgcagcggcggggcggccgcgggcgacggcgacctagccgcccgcctcgcagctgccgaacacaccatcgccgatctgcagggcgcgttggactcgtccgccggggaggtcgaggccctccgcctggcgaacgaggtaggtcccggcatgcttcgggacgccgtctcccgtctagaccgcgccgggcgacaggcgggcctctggggcgggcggaccgtgaagtatgccgccaaccaggggggcctcgcccagcgcctctcagagatggccgggaccctccagcggctccccgaggagcttgaggagacgatcaagtcatcctcgagggacctcgcccggggggtggtggagctcgtactggcaagctaccaggccagggacccggacttctccccgtgggcagcactagacgagtttcctcccgggaccgaggacgacgcgcgtgcgcaggtccgggacgccgccgaccacatcgtccacagcttcgagggtacggccccccggctcgcattcgccctcgattccgacgaagagggcggtgacggcggtgatgaggccggcgacccgggcgtgtcggaatgagcccccaggcccctgccaatctttatatagtttttcctttcttcttccgaggccttcgggcccccttcttgtatagactaacttaatctgcaatcaaataaagaggaaatttctgtgtcaattctatttgttgtgtgtatgagacgaggatggtctgtgccgcggtccttctgtgtcttggcttgaacaagggctcgtgcccaggtcccagcctcaaacggcacgggtcggagccagtgcctggggaaatccacatgtcgagactggccaggccgggagcgtggtgaccgagggttatggatgacccgattgtgggcctttgccgattcccccccggagttcaccacgccccggggcacggctcggttctgggccccttttggcgattttagccggcccgggccaccgtgggcaggatcgagcacgagcgtgctaattcaagccaagagttttcaaaaggaaacgatggcacagacacagtccttaggaaatcgagaatgcttttattgaaatacggaagagaaaaaagataagtatatgcatgtggtagcccccggccaaccctgcacgcccggggg

SEQ ID NO: 10130 - DNA, 10128 bp, Oryza sativa
atcgatgcaaaatgaggaaaatcaaccaagggaggagcaggctatgggcatggcggatgagggggagagagtcggtataattgttgatgaaatggagagggaagattcggataatgaggaagtggacgacgacgcatcatccgatgaggaaggtgatgtaatggccactgattgggcaaatgaggacttctctggacttgttatatcagagggtgatcatgtaccctgggagtataaggagaacgaggtaattgagggtgcaagatatgctcataaggatgagatgaaggaggcggtgaagcattgggcagtttccttgcagagagagtttagggtggtcaagtcaacaaattatgtgtatgaagtgaggtgcatgaaggaagattgtccgtggcgtgtccatgcatataagggtaaatggaatgattattggaaagttagcattgtgaccgagcacaagtgctacttacaaggggtggagaagtatcaccgaaacatcacttcagcttttgtggcaagtgagatgtacagcagtgttgttggtaacattggctttgaaccaaaatcaattattaggcacatcgagaacaaattcaagtacaccataagctatgcaaaggcctggagagccaaacaaaagatcattgagatgaggtatggcacatttgatgcttcttatgataatttgcctcgtttgttagccaccattgcccagaggaataataatacgtactatgacctacatacatttacatcggttgatgatcgaacaaagagtgtgctgcaaagagcctttttctcattgggtgcttgcatcaatgcttttgtgcattgtcgacctgttctatgcatagatggaacttttatgacaggtaaataccgaggtcagatattgacagcaattgggtgtgatgggaacaaccaggttctacctatggcttttgcatttgtagagagtgagaacactgaaagctggtactggttcctagagagagtgcacattgcagtggtgcgtatgaggcccaacgtttgccttatacatgatcgtcatgcgggtatgttgcgggctattgactacttgcagaacggttgggatgagaagggacttccagctaagtggcctgatgttcggagtcggtggtgcatgcgtcacatgggtgcaaatttctacaagcaattcaagaacaagcatcttatggagctctttaagaggctctgtgcacagaaccaagagaagaaatttaatgagttgtgggacaagttggatgagttgacaacgaagcaaacagatgagcaatctcgcagaccactagttgaaggtgacgagcctcccatacctcttggtgcattacatgatgacccaccaacaatgagaaggaggttagggtcgtccatcagaaatttcactcagtggaatgagaatgagcctaaggagaagtggtctctattgttcgacaccgatggatctcggtatggcataatgacaaccaatttggcagaggtgtacaactgggtaatgcgaggagttcgggtacttccattggttgctattgttgaattcatccttcacggcacgcaagcgtactttagggatcaatacaagaaaattggtccgtccatggccgatgacaacatagtgtttggcaacgtagtgacaaagtacatggaagataaaatcaaaaaggcacggagacatcgagttgttgctcaaggcacacaagtgcatcggtatgaaataatgtgtgttgataggagcaggcgtggtatctatcgcaagcaagccgtgcaggaatgtgtcttgaaggcggatggtggatgtacctgcagttgtatgaagccgaagcttcatcaccttccttgctcacacgttcttgctgctgccggtgattgtggcatatctcccaatgtgtacgtctcaaattatttcaggaaagaagcaatctttcatacatggagtgaggagatatatgggttcgggatctcaggatcttacacaacgctgagtgcccaagttttttatattccagatccatctaaggtaagggtgaaaaagggtcgacgccaaactagacgcatcagaaatgatatggatgagtcagaagcaggtgggaggactttacgctgcagcaagtgtgatctgcgcggccatacttacaagaaatgcccgaagaatgcagaagttccaagcggcgcagatgctagtccatctggacaggcaagtgatggtaggcgaccacctggtgaaggaacaacaagcaggcgcgcaaggccaaggcgtcgtcgcgcagcaggcgattctatggtgtaacaatgctttcgatttaggaaataaaatgctgttgtgatgtaatgagtgttcggactaaatacttctatcgtgtaatttcaattcaatgttgttgtaatgagtacctccgactattgttgtactagtagtattgcgaattattcggtgttgtatcataatgttatcgtgatgagtgttcggactaaacacttttgtttgtttgtactcttgtttaatatgtgttagtaattcgcttagttcaacatttattacttatgttgaactaattatttatatgtttctgatcaacctatttgatgcaggtatggcgtacgacacaccggcgctgttgaaccgtgggattgacaggaaccaccgctcgttcctgtcggcagtcgagggtgcacagctcggcaccttccgtccacgcacgtcgcgcgagtggttgcgtgtcgacccccgtcacgttccttggtacgcgtatgttcacatttcaactcaactttgatttgtgttgtacttatgtttgaagtttgctctatacaggttgcgtgcggcaggccttctaccactttgtaggcttgttgaggcggcggcggacgaccgtgacccagcgaagcggtgggatgcagatcggtcactccttgccgctcttgtagaccgctggagacctgagacgcacacgttccaccttccctgtggggagatggctccgacactgcaggacgtgtcgtacctgctcgggctaccgctggcgggagcagcagttggtcccgtggacggtgtttttgggtggaaggaggatatcactgcgcgcttcgagcaggtgatgcgccttccacacctaggaccgaccaccacccttcctccgtactctacagtcgggcctagcaaggcttggttgctccagttcactgtaagtaaataagttgttattatcatacgtgcttatttgcgaccgaatgagtgttttgtactaacatttcattcttaattgtaggcggaccttctgcaccctgacgctgatgattactcggtccgacgctcccttgaggcgtacctgttgtggttgttcgggtgggtgatgttcactagcacccacgggcacgctgtggacttccggctggtccactacgcacggtccatcgcggatgctcagccacaggacgtgccgcagtggagctggggttctgccgtgctagcagccacgtaccgtgccctctgtgaggcgtgcacgaagactgacgcgggagcgatcatcgctggctgccctatgttgcttcagctttgggcagccgagaggtttgccataggtcgaccagtggtggacagcgcaccctacggggttggtcgcagcgcgcagtggccagaggacggtcccacgatggggacttactggtgtcgacgtggggttagtgcaacttcgctgcgttataagtttatcagtcgtctttttttttcttcacataacatgtctaattccgatcatgtttattgcagcgtcgttacgctcacgtccaggtgagacgtggttacccggacttcgtgttcgagtttgaccgtctccagccgagcgacgtcatctgggagccgtacacagaagaggtcgtcgctgcgagagcaccgctaggactttcgtccttgtgcacacgcgaccaggcttactggctcaccatcctgccgatggtgttcgacattttcgttgagcctcactgcccgcagcgtgtgatgagacagttcggatttaggcaggtgtttccgggcaacgtgcagccgaccgtcctccctgccgaccactcgtgagttcggattgttcatttctaaatttttatgataattacttcatcgagccatataatttacctctcttaacaggttgactcgacggggacagctagcaggcgcactttgggctccacgtgtacagcagtacgttgacgactgggtgttagctacagaggaggtgatcaacgagctcttcccacacacggaggagaactaccgtgactacctttgttggtaccttcctcgcactcgtgcgcgtgtgaccttcactccagacgccccagagccgcacgttgccgctgtcacggacgcgtatcccacgcaccgtgaccgagactacttcgtggcggtacatccaatttgtattacttcttacaattatttcatttatcttgcataatataggacaactactgaatttgttatttccatcttgcataggctgatgccgcacgggatatcagtgccgatatcaccgcagtccaagtgaggttgaacagaggtttgcacttgactgacgttgagcagagggtgaccttcgaccggatgcaggagaagatgtgtgcggtcatgcgcgtcttctcctgtcgcagcgccgtggacgtcgtacctccagctggtccggtacaaccacggcctcgcgcgcctaccgtcggagcaggacctcgacctacggcacctatttcgcacggtactgctcagcccagaggtttcttaagttttgtttctgtttttgtacgaaaacatcaccccgtcataacttgatgatccatcctcgcaggacctcgtttgccttcgagcgcccctagcttcggatcagtgcgacctacagcaccggtttcgcacggtacagttcagcccagatattagttcatttttgtttcagcttttgcacgattatgtcaccatgttttaactgcacgtttcctcatcgcaggacctcgtctgccttcgagcgcgttcgcaggcacgaccggcgcttccacgagctccgcaggggcgttcgccacctcttcgggcgcgttcgccagctcttcctctcacggagcgtcgatccctcgcccacacggtactttactttttattaatactgttaaatacctgtacgaaactgatggtccttgtccagcaggatttgcagctgggatcttcggtactggggcctcttcgtctcacgccggtaggactggtcctactagccagttctacgacgacgacttgcacggtgcagaccaccacgacgtactaggctcctctcagcttggaggagctccagaggcgcacactcaggagcagccagaggtcacacctgtacaggcaggacgggttggccgtgccgtacccccggaccgactcacgtactcccacgggcacattagggcgcagggtaggagggacaggggtaagaggcctcgtcagtagtgttctacctcttcagtccttatgtgaccgtttcttttggcttacaaacttgtaaagcagtactacttttgctattactactgcagtactacttgtgtttgtctcgtctacatagttcttttcattcatatggtgctagaacaacttatgctcacgacaacacactttcggcgctgcacggtagtgtcagatccagtagcgcgcacagtctacaacagcacacatgaaaagcggcagctcgagttatcactatcaactttcggcgctgcctgtttacataaagtgaatcacgcccacgcgtgatcgtcttgtcacatctaatgaataatgtatctcattgagttcacatatattgcagtgaaaacgacgctatataattgacaatctgaaggcaacctcttcatatcttctttcccactagcacacaacacacgaaaatggaagcctattcattggtaatacgtaatctagatttaagattatgtagaacattcttcactacaattttacattttggcagcaaaccaaatatgatcaaatgcaattttaccttaccaaatatttggtcgtgaagaaaaatttggcactaacaatccaaatatgccctaaaaattaataaaatatttgtacggtaacaaaatatttgtacggtaacaatccaaatatgccctaaaaaataataaaattgtattttaccagtcttggagattttaatcttgtatagttttcaatataaaaagatttgataactattgatatttatacaaaaaatatagagcacagtacaaaatcgcccttgcggagggcggcaagggggccgcctgcaaaattcgttgacggccgtcgcccgagagcgaacggccgtctgccacgtcattttcgccgccctctgggagggcgatttttaaaaatcgccttcccagagggcggtaggcgactacttccgtcaatttttaaaatggaaaattatttttgtaaaacttttaataaaaaaattaaaaataaaaaaaattccgggattcacttcccctcctcctcgccgatcacatcatcggatcatcatcatatcagcccacctcttctcgcctccataaatcgaggacacccacgctgccgctgccactgcacacgcacgcagcgagtcgcgacacgagaccgtaccgtggaaagaagagagcgaggcgaggacaccactccgctccgctccaccgccgggtcgccgcgccgcgcgcggcccgagctcgccgatcgagagccatgagcctcatcctttcccggcggcgcctcgccgccgccgtccggcggtcaggccccgccgcgctcgcctccaggtgatctgtctgaaaccccctcccctgatctgctcgcgtggagggttgtcgggaatgggcgtgcgtgcgtgcgtgcgtgcgtggatcgtgctgcggcggtttgggcgccgttggcgtttgggtgatctgatgcgagtttccggtcgagccgctcgttgcggcgctcgctttttccaccgttttttttgggagcgatccggcatcgtggttttggttgcgggcaataaatatgttcgattcttcgtttgggtgattgattggcaggtggatgcacacgccgccattcgcgacggtgtctcctcaggaaatttcaggttcgagcccggcggaagtgcagaattttggtaagagagctcccatttggggttctgcttattgtttttgtacacattgaatctggagggatattattagttagtgcttgtgatgttgcaaaaccaattcataggaatgctgtggcagtgcacaaactagttcatatggttatggtgggaagtaattttacttgagaagagtttgacattgtgtcttatttgaacgataaaatgccatgcctattatattttgaagaggaaatacgtgtttggtaattctcatactttccacaggttatgttatgactgcttatgcagttttgccgcacattactgttgatttttcaaagcaatgacatgtgcttgatctctttgcttcataaacattcagttctaacttctactgagctaataagagttaaggtgtagtttatttccgaatggttgttccagtcaaacatgtcactgtcatgtagcctttcacctatatggaagaaagaagttattttggcatggacgtagagatgcttgataaataaagttctgatcagactgctgatagggttaagttcagtgcagggcagttggacaacatctggtaactggaattggctagttgatcctttaaatggtgaaaaatttatcaaagttgctgaggttcaggaagcagaaataaaggtacgttagttactttcagatgtttcttttattatttccgtgttgcggtgatattaattgttattaaccttcctcagcttactccactaaaaaaacccacagattgatccgttaaagaaacaaactctcttacattaaaatgactgactacggttatatttagacttagttgatattactgtgaatctgttatctgctctgaagcgtatcctcaggcaacgtgcattttttttttccggtgcagccatttgtagagagtttatctaattgcccaaagcatggacttcacaacccacttaaagctccagagaggtcagtgtagttttcttgtactactaatgcattgcatggttttccaatgtttgacttttttcttttggctgtctgttgtgtttgaaccccaactttggatgcattacaaaaggcatctaacacaacagagtttattttacctgatagctaatccacttactggctcttctttctcattgataaatttttgcagctttatcaaactcctggtcactgaagtatttgtgctatgctacatgaatagttagctacagtatccttgttcttgcacagttgactccaactcccccgaaaagccaagctatacacataggggatttggtatcaaatggatgatttacccccctgtgtgtctatcacatgtgatcctagggtcacatggagttggaaaatgatgtaccactctaaggagtgacaaattatcaattttcccaaaaatatattgctgataacaacatgctttacacacagtaaacaaactttgtggagtaggaaaaattcaatacgataaaaaactgtgtactatatttaaacttgtactgtataactgacactgacagtggcagttaacaacaatgctcatgtatgctttgacgaacttcggtatctttaatatgcaggtatctcatgtatggagatatatctgccaaagctgcaaacatgcttggtcaacctgtggtatgttatcttaaaattaaatggtttgacttcctattactttcagtgagattttagatgactctagctgtgcatccattggcctgcattatgacactcctataaatgccaaattaggtcatgttgagaaggagagaataaaggatatgcttttctatctattgcttttagtttctgattgtgtcattggtgattgacaggtttcagatttctttgctaaacttatccagagggtatctccaaagagctatcagcaagctcttgcagaagttcaagtctctcaaaaattcttggagaacttttgtggagatcaggtataaaaaaagagaggaccatttcatagtatcagtgtaatctacatatcagatcagttccttcattgacatgttcacaagtactatgatataattgatactttcattagcgctgcagtttgtagtggtagacttgtaatttgttgaaagagcacatcatttccaaggaacttgcaaaatgctgcattctgcagattgaaaaaacttctccgatatattctcatcattcacatcaactatttctctggtatggtaggtacgctttctggctcgatcatttgctgtacctggcaaccatcttggacaaagcagtaatggttaccgttggccatatggtccggtgagtactctaacaatgtagttgaatgtttagccatttatttaggcaataccaggttttttttgggtatcatgttagctctaatgttatatatataattctgaacaggttgcaattatcacaccgttcaatttcccattggagattccattactgcaactaatgggagcactgtatatgggaaataaacctgtcctcaaagttgacagcaaagttagcattgtgatggaccagatgcttaggttgcttcacgcatgtgggatgccagcagaggatgtggacttcataaattctgatggtatcacgatgaacaagctgctgttagaggtttgaatagctaccctctcactcactgtaaagtaaagagattacatgctgtatcagatagcataacaaattagcacacattatcactaacaccaccttttagaagatgagagttttacagtttccccttgataattgcttttgaataatgcatttgaccatgtcaatactttgtaattactggattgaaatacctacatttctcaatatctgatcaactgagttccatattgtaacattatatgctgctcatcatgttaatataggaccaccggaccagtgtgctgcaattcatctgatctttcctttgttggggtgatacatcatttccaatggattg

SEQ ID NO: 10131 - DNA, 37621 bp, Oryza sativa
acatgtgtgagcaaatattattaatgcaaaaaaaaagaagaacaaaatggatttttggttccacaggtttttttttctccgtgagagagggggggggggggacgtaggataagcagctttgtttcttgcttaggaatagtaatatgctgtacttaataaattgtgaattaattatcttccaagattccaactgagagtgtaaaacaaacaccttgaattattgttccgaacagtctttgcattgccaaaagcttcaaggactggattagactacatcaaagcacaattaagtatgaaggattagtccaggcaaaagtaacacatcacttttaaaagccttcacttccatttggaaggacagatatattgttcttaacaatgtgaaggactgaaaaatattaatgatccctaacttacttctaaaacttgttgttcaactgtcctccctcctgttctagaccgtccacccaaaaatgcaagatatctcataagcatctttgtggtttcagtcttgccagcaccactttcaccactcaccaatatggagttgctctttctctcattcatcatttgcctgtttccttattcaaaagaatgccagaaaagatgccatcattattggtacctccacctgttattttaaagaaatatacatcgatagcattctagggaattacctgtaagaaatgtcagcaattgcaaatacatgagggtctagctcaccgaaatttgcacctttgtacttctccatagtatggggttcagcaagatgaggcaacctttggaatggattgattgcaatcaatatattaccagtataggtctggaattcaaaaaaaaaaaagtagaatcagaaaagaaaggagagggttgcacaaagccacaaacttgtttttctttggctacttatgatgatatgtttgagtatgcaaatactcacgtaaattatattttttgcatatcgaacagatagattgtttaaaacaccaggctcatgcaagtatgatagtcttatcatatcatcaattccatcagaatgcacttctgtgtcctttggatgaatgtctgatatgctcgcaacaacctggtttcacagaattgaagtaacaaagcaagtttcatgacatgaaatatatcaatatagatcatgcgatatatgtgaataacagtagtacggatcatattattaaactatatataaacaggaacggctttgcatccttgatgcagttcaaagttcaaaccaaaagaaagaaaaaacttgaaagcgtgttcagtctgttctgataattgttatttctcaaacgattagattttattcgatgttgaaaatggatagtttataggtgtttttatggctaattagttacactcttaattgaaatagtttccagtgatttcagcactaaaatataaaggctgttactttatggatttattgacaactgtgccaattttaatttgcaataagagcataaccatgcacacactactttttcatcaatgatgatggtaataataattaatgatgaagaagttaaggtgcaaaagaaaacaaatagtatctgatatcagctacaaataccatatttccgttggtagtgcggatatgggccttttgaccctcaattcggaagacctcaccatcaatccaagctaaatctttatcttccagccatatatgggagccaagaacaatttttaatgtggcagcctgcacaagccacaagtcacaaaaatccaacatgccagggaaaaaatcaaggttaataggtaaatggatgcatagatttatatctaaagtttgtgttccaaaagatgccaaaaggaattgtaaaaacactactagaagtatactataaataactagcctcaccttgcacacttacatacaatggtatgtttgtatttgccatagaactcatgtgcttgttgatgaaatgcattgtatttcttatctacgttgttatatttaggacccactaaaatgaatattatgctggtgtaggatccttttctttttttcatcaaattaattccataatttataactactgttttaaacttttaatgatacaatagatatataacatggagtacaaagcagaatgaggcatggatcactgttgaaatggacatgcatagtttaataaatctaagaatgccgtgtcaaaccatgaaaggatacatgatcataccgacccaaaaagcatagaatcagaaaacaaattcatgagacatatgctttaaggcgtaaattctagagcaaagatattagataaactaaattcttagcaccagtgctgtactaccatgaattgaaataagagcacctagttcatcacatatttggtcacgattatacagaatctgatttcaagacaaatgtaggaagttatggactcatcaccaaactagatatgagtgaaaactaattgcagcatacacttctctaatctctattccaatatggtggcacatagaagaaagagtgtgtcctgacaaagtgggctagtgaagcaatacttatattgagcaaattcagagaacacttgaacttaaaaaaaaaaaaggcttattctcatattcatatctaaaatgagtagacggaactggcttttttaaaatttttaaaaaaatcctttccggcgtacagctttgcttcctggtcgccacaaatcaaacgcttcagctatcctacacacacgagattaaaaatggaaaacatgtccgttcatcgggagcaatgaacaactcacactaatcgagtcacccgtcgtccatcggttcctctagagccaaagtggtcattcacaaaaaattccccccaactacgcgaacacagaaacctcacatttctctccaaacccaatgctaacagagaaactaacaaaccagcatggcaaccccaatgcccgcgcaacacaccgcggccgcacggcgcgtagcgacatcggaccgaacgaaaaaacaatgaaacattagcatcacccctcatctcatcatctagcagccagacagccagtagccccagcacagacaactcaccatgggtgtcgcgcgcgatcaccgcgggaggggggaagcaacgatcgccgaccagtgcaggggtggggggtagaatcgggccgccggcgcctccgtcgtcggtatcggcggccgtggggggggggggaggcggaaggcgcggccaggccttcgatcgatccagcgcgtgcggtggcgcgcgatgccagcaccgaggtcgcgtgggggaaagggaaggggagggggaggaggaggaggaagaaaggggcgatcgaaaggtggggcgcggaaacagagaggcgaggcgcgagtgccatctatttttggcgctgcggggggtgggatggggaagagagggatgctgctcgccgcgacggcgccaccggtccagcgccgccgtggcattttcgccagaaaagcccaaaatgacgcggagagagagggaggagggtttggcgccggatggtgcggccgcgcgagcatgtagggaggaggaggggagccggagcccggggcggcgtgctctgccactgccaccagtctgcctctgtggctctgtgccgtagtaacttgtaacttgtgtcctggctcctggtcccctggacggggggactacgggtgcgtctgcgagcgtggctgctgtcctgtgtggtgtggactgtagaggacgccacggcccacggccacacacgagacaagggaaacgcagggagattatgggcatgtttggtgaagctttgtagcggtagcttctcctaaaattttcagaagctaacttccaaacagtttatattttcatctatattctgaaaagttacagttatagaatccagaaaatgaattagaagccaaaagttgggtttgtcagcttttctaaattctcaactagcttcttacccgctgcttctcaaaattttacactcaaacaagacctatatactcccttcggccagaaaattaatttaacgtttaaaactttataatcactaatgctaaattaattaaaaaaggtatatgtatcactaaagcctctcatgtagtgtattcttctagcattaagttagattattgcaatcttgtttagcaacagtattagacttttgatgtttactatagctaactaaatgaaaccccgcgcgttacagcaggaattatgtataatagtattaaaaaaatataagacaacatataaataactttatatgttttatataattttcatctttaatcgatcatcaaaaagttgtaaacgattaagatgaattggtttataacaacttaagtcatatataggtttatcattcaaaagtaaactaagatgatgtgtctcaatgatagaaggaaaacaagggagataattaatatagattaatcatccaaagacaaatctaaggtagtatgactttataggggaagaaatgaatggagataatttgaaccatggatcaatcatccaagtgctaggaacaattgaggtgatgtgatttaatgagatataagagaaatattattaactacacttagcgtggatgagctttatagatatataggattactctttttatctaagttgtattagtttataatattactgaatgaaaaaatatggaacaatggtgaacggcgtagccatagacgacacaatgtttgcataactttaattaaaatggtttgtgatatataatacaatgtttatgtattatattcattctaaaaaggtataaatcaccacattaatctgattaaacaaagttatgcagcgttttgatttgtggttgtatttgtctagatagaatggtgcaaattgatagatataatttgtatataaaatataagtgtgagtatataggaacataaagcaagagttgtatattaaatccaattatacttttaaaatatagcttcatgtaaaattgtacgtgaaaacggtcgggaaccatttaactatttagtgtcaacaagcaatacgatgctaaaatatttcttttaagaaaaacatattttatattggctaagataaaaaacggtatcacttaattgtatggaaataacgttcaatcagtcgggaatttccaataacgttttcatccctgccactagttgatttatgttacctaaaattatttttcttttaatatattgacgtgcaatccttctgcgtgttcgcaaaaaactagttgatttatgtttggacataaagagaaataacattagagaaaatcttgagaagaaagacagatagaaatccaggtgtaggtaaatgtttcagatggtggttattgagggaatcaattaaacatgcaatgcaacaacaaattcaagtctgagtagaatatttaaaagtccttcataacatacaaccaaaatttcaagctctgtacatttttattgcacggttaaacagtatatatatgttacatttcccatggctatattacctaggctcaagggggatagttgggaggatcctcaagagcacagaaacacagcagcacagcatttgatcactatcgctgcaaaccagccaggccggcccggccttccaatgatcgaaacaggcaaaaaggacgggacagagatcgagagaagaaaaggggaaaaaaagatccagctacatccaaaatgacccatctgggcatctcaatcaagaggctgctatctcgatcaagaatccggcccagaacacctacactattagctagctagcattggaaaagtcccatggctgacccgatcgatcaaattaaccgtacgcgcgcggttaattgagagaacctggcggctgcgtgccggcgacgaagaagcggccggaggcggcgtcctggctggcgtagtacaccgtgctggggctcacgtggttgtgcgtcccctcgtacgtcgtcaccacgtagctcgggtcgtccttgtcccgctccaccctcttcttcacgttgcacccttccgtcgagcaccggtagtagttcctgcaacgcacaatcgatcgatcgctgttagttagcgatgtccattcattcattgccaggaaagagacttgcacttgcacatatagtatatgacgatggaattcgcgtgattaattgcatcatcggtgtatttgatgatcgaagtgatggcgacgacgacgacgacgggatgatttatgatgatgatatgatcatcttgaattttgtgaaggggatatgattttggtttagttggttagttagtaccttgggttggggctgttcttgacggacttcttgccgtacttgcgccacttgtagccgtcgtcaagaatctcgatctctgacttcgtccggaacgcgatccgctccgtccgcggcctctccacggccgccggcgccggcgccggcaccgcctccgccgcgctcctgaattttcccgatcaaatgcccccaattcagaccaaatgaacaggtgattgcacacttgagagtagtactctacttgacaagtgacacacgccactagccactcaccttgttgcgtttgcggcggcgccatccggcagcgcggcggtgggcgcgccattgaacacggcggccggaggcgcgtcgtcgaagaagaactcggagatgtcgaactgcgaccccgacgggtcgggaagcggcggcgtcgttgcggcggcgagggcggcggagaagctggacgcggagctggaggtcgagcttcccccgtgggagaagtacgatgacatcgagtaggcggcgtcgcccgccggcgccgagaggcccgagaccgggtggtggtagaccgctgcgtgcgcgccgactgccgccatggccgagtacgaggccggcgcgaaagctccgtatttataaggattggcgctaaatctgcatggatatgaggggatgatgtagtggtggcggggtggatttgtactggtagtagtaggcgatcgagagggatgagatcgatcgtgatcgatcgcacgcggggcgcgggggagctggttgtgttgtgtttgtgtctctctctccgggaggattttgccggcttcgcggtgagcttcgtgaggagggagaaggttcggagcgggtgcgggagttgccgcgcgcgcgccgccgctcgaacgcacgcacgcgcgcacggcgtgcccacttattttagcagcatggcggaaatgtctccgggggaaagacttcgacggggtgcggtcttcgcctcttcgccacgtagttgccgtgggggccttctcacacacccacggtccatccggttcaagccgctttctttgtttgggttccctgcgagttggttggtgtggctaaaccaagaaattttgggagggggtgaagctaggagataggatagtcaagaaccggttaagaaaattttttagatatagtttatttattttcattaaatatgcactcacttaatttaaactcagacgcttatatcagtttaaattcgatctaaaataaaacaaattaaatgagtggcatctctctttattttattttagctccgtctactttggactgagcagcgatagcgattttacccacggatactgtgttcgataggcacgggcatgtgttcgacatgtctgacatgatgctcccaaatcatatgtgctgattcataatctctgtttagttatctagccatgcatatattatcgatgtttttaaatacgcacccgacaccgacgtgggcgttgatttttgcctgctaatactatcgtgctccgattgtccaagaggtatcgggtcttggatcaggtgtgttcctgctttgcccgagtctaatcaaacctattgacaggaaagttagagatattgtagctaccacagttaaatctggtgtatttatcctttttcgcttcagccattattagtcatgtattttatgcctgtaagatcctttttatcccttagcaaaatttcacaccctatcacattaaatgtttaacacatgcatggagtattaaatatagacgaaaaaataactaattacatagattgcatgtaaattacgagacgaatcttttaaacctaattgcgctatgatttgacaatgtggtgctacagtaaacatttgctaatgatggattaattaggcttaataaattcatctcgcggtttacaggtggatcctgtaatttattttgttattagactatatttaatacttcaaatatgtattcgtatatccgatgtgacacgtcaaaactttacatctggatttaacacaacctaagttgtttatgaaagttcaccggtcggaacatggctcattgaataattagctcaaaactcatgaatttcgtcaaattccacataatctcacatatatatatatatatatatatatatatatatatatatatatatatatatatatatatatatatatataacttcgctagaatttcatctaaagaatttttctcatgagacactacccacttaggtagtgttcgtttctacttaagatggagatgaagttatggaaaaaaacaacaatgtcattagctcatagttaattacattttaattattactactatagataaactttaaaaatattttatataatacattaaagcagctattatatactcactccgtcgaaaaaaaacttaacctaagaggggaatctcgacaaaggaggttgtccaaattctttatccaggatggtcccatcctcttcaaggttaagtttattttagacggaggaagtagaaagttttagtgcaaatgcaccattcaacaatttaaaaaatatgataacgaaaatttcatgcctatgcggctatgcctaccaaaactgtttcatttgatactaacaatcactgtcaataatcaatatttacttctattcgcccatgttcggccagcaggcgggcacggccaggccacggtcacgctcttaccgccgatcgccatcacccccaccgccccacagtacaaaccatccaaccccagccgccatccgatggcgtcatcagcaatacgccgagacggaagttcaagttcaatcattcgagcttttcgttgggggctcggctggtacggtcccaaaaatgacggtattctccggaaaaacatataacaggttcgtagcactacaaacgtacactatcgagcactgtggtcactttattagtattttcgctttgctgtcgctttcgtactcccgaaaaatttagagccgaacaccgtgcagaactgcaggaattaagcatttaagcgttacccgtgggctcggattcctcattcctcgcagcttcctgcctgcccgggctgcaggatgaacaagctgattattattggtcgtgtaacgacgaagcgcccggtccttgtcgccggccgctgccgaatccatctgcgtacgtggttcggcgggcacggttgacctccgctgatcgatcgctcgcttcgcggcttttgcgtggtgaccggccacgcataccacacctagtagtagtaatagtacgaagtactactccctacttcctctgtccaaaaataaaaagacaaacctgatttccgtgctcaacgtttgaccgttcgtcttatttaaaaaaatataaaaaaaataaaaagacaagttatgcataaaatattaatcatgttttatcatttaacaataataaaaatacgaattataaaaaaatttcatataagacggacagttaaagttggacacggaaactcagtgtttgccttttttttagacgtagggagtacgtatcacgcatccaatccggtgtccgatgggcgacgctgatggctcgcgcgatggtgggtggcggcgaacacatgcgtattatcggggtgcgcgtggcggggaatggatgcgtatgtgcgtgcttgtgagcgtgtccacgtcgcgcgcgggcgctggttggaatcggatagggcgtcgttgtgtcacttttttgcgtcgtccatccgtcatttttttgggggggaagggtgagccggcggacgcaaccgatcgacgggtgcgagacggtgtagtgtgtaaccgtgcgatgggagaaagtcagaaagagatagcacgtgacctcatgaagagtagcaatcggattggttttctaacgcacggagcaatcgaacgatatatgcaaacatgattcgtccgaggagaaaagaaaaaaaaaggaaaatgatgcaagcatgattgaaaatgggatattggtacaatattttcagcttctttttgtttctttgaacgagaaggcaaagagccctgccgatcaattaagaaggaaaaaaaagacaacccatttgtggaaccttaaaatgaactactcttgtttctaaatatttgacaccgttaactttttagcacatgtttgatcattcgtcttatttaaaaacttttgtaaaatatataaaactatatatatacatataagtatatttaacaatgaatcaaataataggaaaataaataattatttaattttttaataagacgaacagtcaaacatatttagaaaagtcaacggcgtcaaatatttagaaatggatggagtaattaactgtcaactattttaatgatctaatctacatgagttgatttgcgttttaaatattgttcttttattatattgttttatttaaagttagaacaatagctccgtgaatcaatcaagggaataataagggctggttaatcaaacctattaaaaatatcaaaccacgaaggctacagtaacattgagagagtagtagtagtacattatatactgcactcattagaaatgctcttctcctctcatccttgttgagagtatattatatttaccttcttaattataaatttgtcattatgtctcccatcccagtagcgcctcaacgagttagataatgatattgatgttattttaatattatttatgtatagttttcttcctgattctagttttttattaccacttttccttcttcgctagttaattaacgacgctagcgaacctagaaagaaaatgactgaaatctttcatgctcatctagctcgtgcaacgtcttttctcgggtggctagtgtaatttggtcggggtgtcccacatagatacatactcgcaccatctcataatataaatgatcttagagggatataacacttgtctagattcgtagccttaaaaagtgtcacatatctatttaaaatctcttatattatgagacggagcgagtatattataactgtaaaaaggtttaacgatatttaaggatctatgttaggccttaattagtaggtacgccctggcagcgacagcccctttttcctaatttagtttcttgtggttttcttgcgaatgtgtacggttgctacgacaccaaggcacgcctaaggttaagagatcaacgggaccactgtctggacaattgtgattgatgagatcgattatgagaaccaaaagctagcgaccaggcatgttataggaatcagcactgcaatacgtccgactcccatcttacccaacctcacctgccaatcgtttcgctccacgcagaccagcttctctccatgtggaccagggcaattagcagctaagagctggtcggataagagtcgtatgtcacagtcgtgtgtatagcattttcgtataggaatcattttttttcttttcgaaatgtaggcaatgctctaggaataatcgtacggataagcgccgtggtggctggctagtagggatggcaatgggccgggtcgggtatgggtagaggaaaaccatgcccgacccgatgcatgacattgcccacccgaacactacccattagagttagcggacaaaactccattcccgtacctatgcctagtgggccgggtacccaatggatctcatatgaataacaacttgaaagatatgtaatttatcaaagagtaataaaatcaataatttaccaaattatcggttatcaacaataatttgaattacatcacaagttgatcacaacttagtatcagttagtatcacaaatgaaccaagagaaatggtataagaattaagaaatgagttgaaattagctaatacatatgtatcgggtcgaacataggttacccacaggtaaaaaatgaaacccgtctattgcccatgacgtcttcaggtctcgggcgggcatgtccatgggtaaaaagtcacacacacgcccgtgtccattgggttgggtatccacggatacccggacccatggataaaattgccatccctactggctagcagccacttgatagcaaaatatgcgcataatacaggaacatagcatagttaggacaaaattatgcgcctcttgtttccattcccaggcgactgaaactatcaaatacttcaatactatttactccgtcccacaaaacctgacgtttaaagatttactagtgtcccacaaaacatgtcgtttaattgtcatctgttttgaatttttgaatatgctcatgattgctttgctacgtgtaatttttgtggccataggttcatagacatataggtactcttgttgaatgcactgcactcagtgaaatgacagctgattattaataagtgagagcaacatgatcatcttttcttcaagctactaatttgctttttaaaccttaaagcataatgttttatgagacagagaaaatactctggagtcgagatactaaaagagagccatatcccacatgagcactagcaacaaaaaaagctggcacaaacaccacatcccacatgtgctcccaaacgaccaaccatcctcaccctttcctgatttaagaagcttccacgcgcacccgaaccaaacacaactccatcaaaaccatcaaagccaggtgccccctcgtgatcgcgatccgatgccgatcgtctgtgacttgcccgcccgatatatatttcctctcttcttggaaggctccacaccgctcgcccgctggattggcacgcagcgcctggttggctgattcggtgccccctcgcgctcgcgcacgcctatcaattccgttgctttctgcagcgacgagccggcgcgaataggcaggtgtgtttgcttgcgtgatctgatagcggcgttcccggccgaagtggccgcgcgcgcccgccgatccgcgacaccacgagcaattagcgcctagctcgcgagagatgcatatgagagcaggtacaatagtacaatagtaggctataagccagctacaaacatattttaaagagataaaggaaaagagagaaaagcagtgggctacagatctgtagccagctacagcacgggcttcaagacgtaatgtgtgtatgacaggtaggaccagatattaatagtatagtaagcagctattatatgagttggttattatattgactataaatgatttaaagttagtagtgggctatagtattaaacttgctctgaggcgcatcaagtcagcgtcgcgatcgcgggcgccgcggaacctgccacgaacgtcgggccgtttcagttagctgttggcacagaagcggagccttttcgccggacgggcacgtggcgggatctgtgcttttttgtgagagctttggtgctcatcatcttggttacgtgtacttcgctctcgtcgtcgaaaacaatcagcaataacgacggtcgagaggtgacgttaaattcgcacgatatgtcgtagtacgtcatcagatgctagcgacgctagcttccggttaatcagaatgaaggaattttatgaggccagtataattctaccgggcatcacagaaattaatgaaatggaaaaaaaacaaaaacacatttccctgtacaatagtaatacgtagttggccatgttatatttcaacttttttcctcaaactttcaactttttcatcacatcgaactttccgaggcacacaaacttccaactttaagcaaccaaaactaattaaataacacactgcacgttttatttaattactaaagcaggacaagtacatactcactcaacttgtactaaattacacaaaataaattcccaaagttgccaaagaaacagcaaggttgcatgcccttgcgaccgtaaaagaagaaccagtcgatcatactactaccagtattatactgtacaatactagccacaaaagacgggtcgtgctttcccatgattacagttaatatagtagtattgaattattgattcttggtagtcatttatagtatagattctagaaggtctttgtctgaggtcgatgagttggcagtcagtgattgtcataaacaaaaacaatagggagtttatcttgaacttttcggaaagtaaccaagcaaatccaagctaatagtgcagggtgcctctcttttgtcttcgtctagagcctgtctgtttttgtctcgttgtttggggaattttttagtttttagtttttttttaatatttacagaaataatctatcgacaaaaaaaattgcagaaatagctcctgccgcccaaatggtgggcggcaagctgacgtggcagacggtgggtcgaccgcgccgtctgccgccgtcggccaaaattgcgattaggcccttgccgcccaggggctaattgcaattttggccgcccataaagagcttgcggccgtactttttcatctgggtcccttgccgccccagggacccagatgaaaaaagtacggccaaaagatttttctatgttatgttaataataaataaagaagtatttattggtaaaacttgttaatattgttataaaaatgtattgaagttggttgttgcgcaatttcatatgttaagtgaggtattattttgtaccttattcgacgtattagtactcggataatttatataggcctatcgcagtctgggtcgtagaaacattatatggacttaaacaaggagaattatgtaacatgaagaaatagtagtacaatttgaacatgatacaactatttgcattgcggttacatagatgatattagattcgaactaggagggaggtagtgcaatagttgaacacaacgacgatgtagtaatgggacaaggaagcatgacagtagaaatttcaatatgctaagttgtccgataatagctaacccctacgtgaggatccctctcctctttcaaaccgcgctttagtaaccctgtattgctctagtagttcaagctgcacaacacggctaggtggagttagaacccttctggtatctatccattctctgtattgacatctccttggtggttcctgggaggaaagaatagatgtaaagcaagcaaagttagtaaatgttgtgagaaaataaggattcatgtaatcaaaatattcttaccatgaaatcgtcgtcaagaatatttggacaaacaaagaacctttgacccaatgttgtaggatttatggaacgaagaacctgacaacgatcaccacacctgcatcttggacgggcttcccatggagggagtgccgtagttagcacccgccagtcgctctgttgttcacgacattgtcgttcataagccgcttttctatgtaagtattgctcaatactttcggatgcgaaataccagcgaccttgtaaacggtggttaggtcgagaacgggattttctgtatcgacccactcgatgtatgcgcaagccgtagtgcgggtctaccgaatagagtagtgttacgaagaataaagcgattgcccatacggaatgaataagcatgtgcagataataaaatacctcacggtcatagttagggcacctaaaaaagcgccttcctcgaatatcaggattcctcgaagccattagttggcatcgatcaccgcataggcagagaggacgctggcaccaaggtggtagtaggtatacacaaggatcgctacgccagtttggatcctcaacaccccggcgtctagccattgacgaaagccggtcggatttgtaatgaagcaagtggggaagagagtactgaatgtgactgagttctgaaagattgtgaggcctcactcattaaggcgacttatataggcgcaaaaaatcgagtgatacccctgacatgtgaacatggtggggtatggtgggtacgcctgattggcgccgaaagatacatgcatgatcggcgccgaatgttacattggtcgtatgcgccaaatggcgggcaaatactcgtatcacacgcgaataaaggaggctgcatcggtgcggcagaaagtagtcgtgcatgcgccgaaaggtatcgtgcacatataacaacaacgtagtcattacacaagcatacagtactggaaagtgaagcaagtaaacaaagagaagactgctcaactggccctgccccgcgccgcgaccacgcttggtcctccgggcctgtgctcgcacatggtcctgggagtaggtgaaacgatccggtggcacagtacgggtagacgagtgtcccgcggaggagtggcctgcgcctggtcctgcgtctgcaccggcggtgcgcctcccagctgtgaggggccgatgacgtcctctgtcgagcctgaagcgaagtcgaagtcagtgatgtcgaagagcacggtggaagacaggaagcggtccgacgaggtcccagcatggtccaatggtggaccctgactcgacgtgccggctgcctgtgatgctgaccctgcagcctgggagaagtgggcggcctgcgtcatagcgaactgggcgaaacctacacatcgacaacgggacccttgtaagctaagacataaaatgtatgtaaattgattgtggaagtaatgttgtttttttaagtacctgtggggggcacaacagaaggcctagccgaggaaggcggggtgctgaacggtgcacgaaaccctgaagcaatcggcaagtgaaacggctcacttatatgtgcgaggcatgtatagaaatagtaataaaaatacttacctccgtgcggagggggagtcggcctaggaacgtgcgcagctggacgggaaccagacggtacgggtggccgctgtacagctgcgtctgcccgagcaacgtcgtctgcacgacaggtgagcactcggagaatcgagcgcatcgactccaccatccgcgtgtacgtcgtcaggtgctcctctacgggtaccagaatccccgcgcctaaacgttggatcgtcattgaaccgtcaacgacgacccggttgatgtcgtcgacctgcatggttaatttgttcgtaaatattcgtaaaatttgacgaagagaaagacatgaaaacataaaggaatggtgcgatgcagggtactcacaacacgagcgaagtcctggtcgtggtgcctggcgtagaggtctctagtgctcgcaacgtggggctgctgctccaagggagcgaaggtgaccctagtacgggtgcgtggctggtaccagcgtaggtaggcctggtacgactcctcagcgtgtggctctccctcgtggtccacgacctcctcggttgcgagcaaccagtcctgaacaaaagtcgccaacttggcgggccagtcgccagctgactgctgacccttgcgcgagtacctgcgaattaatgtgtaatattagtgtgaaacgacagatgttacaaattattgtgaacaagcagattttaatgcaacaacggaaagcgtagtgcaagatcttactggtgaacagcagctgggacggtggtcggaaacggtactggaaagagctgacggaagccgaactgccgcatcacgcggaaagaggcgtgaggctcaacgcagatgtcgaagaccatcggaaccgtagtcatctagtacgcctggtccctggtgcagagtgtggacagacccaacggcgcacgagcctgggtagccgcggcactgtagggctcccacacgacgtcagtcatcagaaggcggtcgaactccatagcaaactcaggatacgaccgcctaacctggacgtgagcccatcggcgctgcaatatgagacgatcgatgtgatgtacaatgaacttagcaattaacttaacaatacgataagatcgatgcaacgtacctgacgacggcaccacagagtacccatcgtagggtagtcgacctctggtcgctcctcgtacagtgactcctcgtacgcgtgctggtccacctcagggcggccgatcgcaatcctctcagctgcccagatagaaagaaagagagggcacccaccaaaggtcgcgctgggatccgtcttcgtgcaagactcacaaagtgcacggtacagagccgccaacaacgcggaaccccagctccactgaggcacctcgcctactgcagcatcggcgatgctcctggcgtagtgcacgagtcccttgtcgatggcgtgcccgtgaccgccacagaacatcacccagccaaaaagccagagcaagtacgcctccaaacatcggctgtacgagtactcgtcggccttcgcctgtagctgctcaacctgcaagcagtcgataaaatgttagacaccttaactgcggactaaatatgtaatacgattgtcatttcggtacaaaaacactcacggtgaactgaagcagccacctcttcgtaggtccggtgttgcggtggtgtgccaacggctcgagcgggaggtgcggtgcgcgctgtactagtgcgaaacgtgccgtcagatcgtcctcccagtccacagccgtggtcactggcccaacagcgtctcccgcgagcggtagccccaacaagtacgatacgtcctgtagggtaggggctacctcaccgcacggcaagtgaaaagtgtgcgtctctggcctccatcgatcgaccaaagctgctaggagggacctgtccacagtccatcgtctggccgggtccgcgtcgccggctgcagcctccaccagccgacacatcggtaggaggccggcctcacgtagcctgcaataacaaattaatatgtcattataaaaaatattacagtgcaactaacttatagtaaaacactgttcgtacctctcgacaaaggagtcgtgaaccgtgagtagctcaccgcacgtacgtgcccggaacgtcccaagctgagccccctgcaccgcagtaaggtgagaccggtgtcagtgatctatcgccgggtccaacaactgaggtgtatcctgacgtgccatctttgaaaaatatagtgtttcgtgttagaacaattcaaaaatagtaatgtaaaacaaaagataacttgcaaaattatgaaatagtaataaaatcatgagattaattatgtacaacaagttgctatttaaatatagcaaacattactaatggtacataacgatgacgtgcaatttaacatatatgtagagttcaataatataacataacattaccaggtagaaaacatgtatgcttggtaacgactaacactgtccaataatccttccatttccccttatacgcgtgcactctccagggacaaccatctttttccttaacacaccgaacttcatattgcgaccggttcgacttggcaaccctaaactctctatgaagtgacactgcaaaatgttttaccgcctccttcatatcttctgctctactataaatcgctccctgaataacctcattttctttgtactcccatctcacactatcctcttcagagacgatcagcccagaaaaatcctcactagcccattctgctggattaatatccgtctcatcatctgacgaatcaccttcctctacacgctcgttgtcagaatcctccctctccatttcatccacaatggcaccgacagtctccccctcgtcggccactccacctagttgaatgcccactggagctactacgtccccgtcctctcgtgcgttgacctcctccacagaagtctcgtttactttagcacttggtccctcgccatcatccatgttcatctgcacacctggatccttcgggtgaacaaacggaaccaaagctagaggccacccgcgttgcaatgcattttccaaataccatctccacactcgagagttttgaactggcattagttcccaataaaaaccctcagttgcccgacttactataacattgattgttatgtcacttgtctgtggatcaactctcaagcccctcattaaccatccttttatagaaggtacactcctctcagccggtctatcaattcccctttctgatacaataaaatctgacagatctaccccagttggcccgtaacggacgtttcctggtccatggtaaacttggaatatttgtttgttcgacatatctgtcaacgaaataactagatcatattactctttcatgcaataaacatctacaacgtaatatcttgtgtaagccaatgcaacggtaatgtattgattccaaactagcaaatctacgtagttaccgatatctacaatacgcacttctagattagtacaactaaaaccctaaaaatataatgcatttattcaaacaaatttttaaagaatacacactatttaactcaatagtcacatataggatctatgaatattacctgaaatcggcgtctgaatccggcaaggcttcgccccttcttctcttctcctcccctctcttctttttttttcactggaattgaggagagaagaatgagggctaggggctgggcagcaggccttttataggcagtgaggcctgccgcccggccagagggcggcaaggggccgcctgcaaaatagccggccccgactgacttttttttgcattcgggccacttgccgccccaccagagggcggcaagggttttcctgcaaaaaaaccctccctccgtcaccgcccgttcctcccccgtttgccacgtcagcttgccgccccagaggtgggcggcagggtctatttttgtaatttttttggccgatagattatttctataaatattaaaaaaaaaatctaaaaccgaaaaaaattcgttgtttgggtaatcaagcacgtggggattaagaagggcccaggaagctctttttagcgtaagatattgcgattgacgtccactttgttcggcccattcggataacgaaaccggacatgcatgcatgtatctaagtgcagaatatctgccggctgaaagcctgaaactaatttaaaatatattaataccatttttttcctccaaaatccttgtggataatccggatatggtgtacgtggtcgggatggatctatcgtggggaccctcgctattttttttttttgctttacatacgtgtgagaagagctctaactttagctagtttgtttaatccctttactatttctttctggattcaccacttggtgtggtaaggtctaatcttactattctttcaacaactaccatctggtgctcgttagtgtaataggtagatgttcacggtggcttagacataagaagaatacgttttggtccaccatcagaaatatccaaaatatttatacatataagtaaatatacgtagaaaagtttaatatagaaacactatatataaaaacatttgaatccaaatcagaattcaaatacaaataggaagtagacatataaatattcggcctataaatttattagaaaaggaaaccataccaaaattgaaagaaaaaaaaacataggtgttcgtgtgagttcgcggtgcacaccgttccatcaaccgataggtttgacaaaaattcaacggacacatataaaatgccaaccaattgtccacgaggccacgggaatgttaatgaagagtttgttcataggcacagtcgcgtgtttttggactctgttttagttaaaacactctacgaattaaccccttttcgcatgtcgcattcattagtggattctaacaattctaaacaacgaagctatgttcaactctgtgtgctgctatcactagtatccaactatccattattcaatcagcaacacacagtcacaaattgaacacgagaattggacctcatctcatgtacacacatacacatggcatgctgcataaactagtactccctttattcctaaatataagaatttttggttggatatgatacattacagtacaacgaatttagacagtaaacttgtctagatttgctgtgctaggatgtcacatcaatctcttgtattcaaggacgaaaggagtactagctactactctacttttattagtatgaagtatgaacccacgcgatcgttcagtgagctagctgaagaatcacaccagagatactagctctgagagaagcttttatttcctttttccggaaactgaaaagcaggtggaaggagagcgacggctgagagtcgcattcaacgagtcctctgaccttgatctcctcctgccatttttttctgaagcttctcgcctgcaacccggcaggatccgagaaggaggtcagcaaggtcccggaaccggggtcaaggttgtccggccgtcgtcgccttggtggcctatccagcccgacgacctgggggtagcgtcgttgcatggacggacggacagcaacgtctcggctcgatcggccaccaccggcagcgtacgctcgctacctgtatgtcctcatcggcgcggacagagtgacagatccctccctgcttctgctgctgcatggtttcccaacacgccgtcgtcaagtttcaggatcgccatcagggcagggtcgaaatctgaatctctgaatcagccttgtgcaatcgttagaaaagtactagtactacaacttttgaagagcctgaagtctgaacatttcggtcagcgtcactgggcacccccatctctgaacagtgtgagccatcaaatgaactatatagcacatgcgatcgcactgtttggggagaaagatgaattcataactactactgtaaactggaaagcaactgtatgttttgttacagctgacaatgaagaggtcaactgctatacaagtacttctacacagaataccgacaccgacagaacagtcagaactgctattccagttagtcttttcctacctgggctgctgggcagatgcaagcagaagctgcttattactagtatagtattctactagtagggctgtgtttagttcagcgtaaagtttagattttggttgaaattggagataatgtgactgaaaagttgtggatgtatgacaggttgatgtgatggaaaaggactgaagtttggatccaaactttggatctaaacacagcctaggttaaaaaaatggatacacaagcgagtaacagtttcttatgcgagcttattgtacactgtgagtccataacaacttataattgtataatttcattctcagccaatgaacaaaagcatccaaagtgctagcaagcacatccgctggtatgttcagtatcaggggctggttgtgcaacagtcttgaagtagctggggatagagaagaaacaggtgtaagatgactagtaaacagctaatgctagatttgtttaggcttgaagcacttcagatgcaaacaagaaactgaaggtgtttcacttacatgtcctgatcatgctcatgctccagagcaagcttggcaatgcacagaaaagcactgtcaacattgtagtcgtctttcgcagaggtttcgaaatacggaatgttgcctttggagacgcaccactcttttgctttcttctcagggatctgtggccgggaagacagtacagaaatgtcaaattgtcaatgtctgtgcactggatttcgttcagaaaaagaaaaaaaaaggaagtgtactggactgttgtacagaagtttgaatgttcaagtaacttacggcacgtctgtttccggcatctatgtcaatcttgttgccgagtaatatgaagggaaaatgtttgggatctgatgggctagcctaaaaaaggagccgaaatttttcagttgcagtcttccagtactgttaaaataggacaaaaatgctgtactacttttctttttcctctgaaatgtaaaatggacttgtcaggttcttcataactagttcaaattgattgatattaaccaagcaacattaaattttcagcctgcagcagccattttggcattttgctgtatgccttcagtttgcatatgactaacagatgatgcagacattgcttctctgaactagtacaggcatcaggcatggccacaatggaagaggtaattgcagatgctaaaaacttttaaggaaaatatcctgataaaaatgacttacttgggtgaggaactcatcatgccaggtgttgagtgcattgaaagatcttttagcattgacatcgtagactagcatacagcaatctgcacctctgtagaacgccacaccgagactctgaaacctctcctgtcctgccgtgtcccagatctacatccaagaaaactcaatactgatgacagccagatggcaactttcatgtgaaagcatccaaatttttttgagaatagaaagcatccaaattgaatgggtgtatgaggctgacctgcaaggtgacaagcctgtcttcaatgagaacctccttggtgacgaaatcggcgccgatcgtcgccttgtactgctggctaaacttcttgttcacgtatctaatcaagagttcaagaaaatccaagcaccgatatttgtggtgtgctgaagattgtttctagttaaaaatatctcttctttttttctgaatgtaattccggttaaatgaatgaaaggtagtagtagaaaatattgagatttatcttctgaggatttcactataatctacagctaactgagcaaaattgatactactaaaaagctcgatgatatgcagctatggaggagaaggatactggttcatcagggacgtcttccccaccctgcaccaaaaccaaaaccaaataaccgatccaagtcaggagtcagggaaaaaatcaaacaagcaccatgaaatcaagctgacagaagcagggctagagcgattcgaaatcaagctaggaagaaatggccgggtctgtagccaaggatgagctagcgtagcgtgctgacccgctgtcgccgaggacgatgaccttgagcagcgtccgcctccgcgacgacgccatggccagcaacaaccgatcgatcaatccgatggacgcggtgatctctctatttagtcgatctcctccttatcttgaatcacggggcgcacggggagcgagggaaaagcatagtagctgcggaaaacgggggttcgtggaagaaaattccgaacccctactcaaccagaaaattgaaaaaacaaaaagatagaaaagaaacgggcccattctgtcaaatcttaccggcccggcccatctattagcgtcggcctcggcgttgctcgaagaagagaactccgaagtccgaacccataaaaacgattttttttaaaagaaaaagagagtcgtggatagaacagaataaacgggccaattgtgtcaagcactcatatctctccgttgccgtttttaatgatctcatcgttcagcgttcacgttttcaccgttcgatctgcaggagcgatcaagttcgtggtttctctgatcgtgatgtcatagagcaagtttaaaagtacaactaattattgctctaaattatctatagtcaatttaatagctaattcatataataattacctataaacatgtactatataattaattaatgtttgatcccacctgtcgtacacacatgtattttgaagtctatgctgtagctggctaaatttatagtccgctgctcttatctttcttttatcttcttaaaatatatttatagctgatttattttctagaggcgtgcagatgtgccatgcgatcgatttgagttgatactgcttaaagctgcacgggctggggctgtagatgtcatgagcgcggtcgctttggtctactcatcgtttgagcgatcgaatcgcagatcgttggtcatttgcgaattgcggcagtggctgtgtgtttatttccctccaaacttctaatctttttatcatatcaaatatttagacatacgtatgaagcactaaatatgaacgaaaaaaaaacaaattacgcaatttacatataaattgcgagacaaatcttttaagcctaattatgtcatgatttgacaatgtggtgtactggtgctacagtaaacatttgctaatgacgaattaattaggcttaagagattcgtctcgcagtttaccggcgaaatttataatttgttttgttattagtctacgtttaatactttaaatatgtgttagtatacgttattttttttttgccaaaacaaccaaacacggccggtgtttgttttctcagaagatttccgtttcgagcctgacctgcaaggtgacaagctcacaagccttgccgacgaaatcgttgccttgtactgctggctaaacttcgtgttcactatctaatcaagagtggaagaaaatccaagcaatgatctttctttttggtgtcctgaagattgtttctgcttaaaaattttctcttttttctgaaagaaattatggttacttaagtgaatgcaagtttctaattgtaaaaaaaaaggaagataagagtctatttgtttttggaggaattttaacacatggaaataggaaaaatggaggaatgagaatgcatgcacaactcaatccataggaatttttccataaggttttgagtggatggaaaatttcctgtgctttctctctacaacttgtagaaaaggaaaattctctttggtttttctatatctacatttggcattcataagaattaattcttaggaatccaaatccatccaaatcctttgaaatttctccaaaacaaatagaccttatatgctgaaagattgcactaggatatctaaagatctctacgcaacaaactatcagtctgacacaaaggttgatgctatggatgtgaataggatactagggttttcgactttgttctctcttcggtctctgtggtcttagagtccatattttctgagggccatctctggtcgttagctggtgtcacttttttttggggtttttttagaagggtagtgtggccttgccccctcctgctaattggagttgcgtctagcagtcgtttctctcttccttttctttggtttttctgatttgtcttttttccttggcataagccgatctgtctgattgcagtgtgtaaataaactctcttttcttctaatatattgacatgtatttttttttgcgtgtttgtgaaaaaaaagatgaagaggatactagttcatcagctcttccccaccctgcaaacaccaaaaccaaacgaccaatccaattcaggaatcgctaagggcgaaattaaacaagcaccatgaagtagagctagagctatgagaatcaggctaagataaaccaggactagcgtagcgtgcgctgacccactgtcaccgaggacgatgacctttagcagcgtcctcctccatccgcgacgacgccatggccagcaacaaccgatcgaccaatcgatggacgcggtgatatctctattcagtcgatctccttcttatcttgaatcacggggtactaacaaatatcatataaaattttagtactctgaatagtattacatatatctacaaatcttaattcaaatccattatattctagctgtaacaaaaaaaaagaaaattctaagttttaagagtgaaaagtacgtcagaatttttgtctttttacaactaaaatataatgaatttgaccataaaatttcacgaatatgtgtaataaagtacatgtctaattttttaaaaatatttattagttggcgtgtatgtaaaacttgtgtgtttcttgtctaaatcgatacagagagtgtttatatctaggggtgtaaagttttggcgtatcatattgggtattatgtatggtgttacatagggtgtttgggcactaataaaaaactaatttaacctatatttattactttatgcattgttcaaacgttcgatatgatagagcgtaaaacttttatgtgaaactaaacatgcccatatttacaacggcatgaattcagttatcccttttaatcgcgtcaaaagtttatcccttttaattataccgcctgaaaacccaacccccaattccccaatcctatgctcgccggcgataggattgaagtttcctgattcacaaatttccctagccttttaattcctctgccaatccgactcgaattcctccggcggcgggcatcgtgaatccgaacccgaggaggtcgatgcggacgcctctatttaatcgccaccgcagccgcaaggccatctctactggttgcttgatccccccagcaataggaggtagatctaccatggccaggatgagcttgagaccgagaggccggcggccgcgggaggcctgcggcgacgaccgcctcagcgcactccccgacgacctgctcctcctcgtcctccgccgcctcgacacccgcgcggcgctcgccaccggcatgctctccaggcgctggacgaatctgccccacgagctcgacgccctcgatttcagggtcagcgacatactcccgccgcgctaccaccggtgcatcctccgccaccgcggcgtgatgaactggatagcgtaccggcacgccatccccaatagcctgatgcccgccatccggaggcacgagcggcgagccgcgcgcgccttggtccgctccgtcgagagcttcatcgacgccgacgacggccgacctagccggcggaaggtcagtaggctgaggctcgagttcttcggcacgcacaacaccgctggcatcaaccggttgatctccaaggccatagacgattggggcgtcgaggagctcgaggccgtcgggaagccaatgtactggcgccaacctcccacccacgaattccctagccatggcctctgcaaggatccccgcgcgtcacgcctgcgaaccctcacgctcggcggctgcgtgctcccgccgctgcacgagtacggcggcgtcaccaagctcgtcttgcacggcatggcggcctcgacgccggcggaagcctacgagggcgtcttcacctcgtgcccgcagctgcaagtgctgcacctcgaatcatgcttcctcgaccggaggaagtccttggtggtggacgctcccatatcggagatcagggagctcgtcgtcgatgcctgcgatatcatttcggtgaagctgcggtctcttccgagactccagaacctagcctccatgggcacccaggtgctgttcgaccgccgcacctcctcctcctccttcccctgcctccggcaatggcacctcgcctgcctttacggcttggcccgcaagttcagccgttggctcgaacccgacctgacgctcgacagattcttccactacaccctggacatcaccgacctgatcgtccggttcaccggaccggagagatggatcgtgccgtcgtcttgctcgccgtcgccgccgttgctgcgcagcttgaggcggctgctggtcgccgacgtgccttcctcctgggacgcgtcgtggcctcgcatcctcctcgacgcggcgccttcgctcaagacccttcacattcacatcgccccgcgcgacgcgaagaagcccaccggcggcgagttctcatggcatcatcccaccgttcctctgcacaactatcgcttggaggagttcgccatggctggctttggagggacagtgagtcaggtatactttgtgaagctcgtcgtcggagcgtgcaccgcgctgcgccatgtctccattttcaagggaggggatctgaagtacaagggaaattgggactgggagatgccgaggttgcaggagaattcgtggaatgacaaggagaaagaaaccatggagaagcagatcatggatgcggtctcttgctcaacggatcatctccaaatagttctaggttgattcacccatgtagtagttataatcagcattagccattaggccaaccgatggcagcaataatttatcatgttcacttaattttatttagagtaagtggcccggtgaaaaatttaatttgtaatctcttttactcgaataatgtatttgctgaacctcgtgttcagcagtgtgtgaagtgtgaactcggttcttatttgttttctgtaatgtgtaataatttgaaatttgtcttactaattgctgaacaactatatctatatgtgcattcctggctgcatttcttttgtaacggagggtatacatgtgtgtgagtgaacagtattttttttgtgagaactttacgtttgtggtgatatcatgctaactgaagagctcaggttgctctgcaaaatttgtttcagctcttcagtatttgttgaagttggactgttggagcaagtaagcaaggttggatagaaagaagtgatcatatatgagtaattttacagtgttgaggatgtaccataagataccaaataagtgtcactgctattcgtctatttgtatgcataatgtcaacgagcaaaattaaaaccataatgttttccagcttctttcccaatttcttctcctcctcctctctttctctccttccccttctactagctggccatctccattgcctcgatgctagagctgccctatgcgcaagatgaccaccatcagggagccaccgccgtcggagtcgtacggactgacctactgccactgacaccggcgcggcggcgtggccgcaggggtgaggaggatgggggagaaggtttcggcgaacgagggaaggataggcagggggacgacatggcggcagcacgcaacaacacgcgacgagggtcaactcgaagatacagacctcgtaggcagagagaagaggggaggatggagcaagaagatagaactgacactatgtttaggtgtattttgatctatacgataatgaaaagcatgacaatgatggtatggttttaattttgtgcaaattcgaagagcatggataccaacagataaattgtaatagcatttatctgaatcaacgtatttgcaatgacatggatccaattaacccacttaaaatgcttatgagtttgcagatatcatatgtttttgccatccagcagactagcgctaatgcgttattgcaaagtttaggctgagttctatactctccttttgccaacttccactaactcatcttttgtgcgcacacttcccaaacgactaaatagtgtgttttttgaaaaaagaaactatataggaatatgctttaaaaatcatattaatctgtttttcaagttttcttagttattacttagtcaattatatactaattagccgttgcgttttacgtgcgtgaaattggttcagtaacaaaacatcctcaatctttagatcctgtgaggctaaaattggtttgatttaatatggtccatcaaagtttcgatatggcaaattttagtagggtagtcaattaaaacggcccttacatctcatctagggatggcaatgggtcaggttgggcatgggtagagcaaaaccatgcccgacccgatgcccgacattgcccgcccaaaccctacccactagagttagcgggcaaaactccatgtccgtacccatgcccggcgggtacccaatggatctcacatgaataataacttgaaaaatatataatttaacaaagagaaataaaatcaataatttaccaaattattggttatcaacaataatttgaatgacatcacaacttagtatcaattagcatcacaaatgaaccgagagaaatggtataagaattaagaaatgagtcaaaattagctaatacatatgtatcgggtcgggcatgggttacccacgggtaaaaaataaaacccgcctattgcccctaacgtcttcgggtctcggcaggcgtgcccatgggtaaaaagtcacacccacacccgtgcccatcgggtcgggtatccacgaatacccggacccatgggtaaaattgtcatccctaagtctcatccatctagctccaatgaaatgcaggattgaattttttttatataatgtatgagcatcttttccatccttgaggaggtaccatgaggtatcaatctaatctagccgttgatttagcagggtatgatcagacaaaaaaaacatgtgtcctctcttcgtcgttcgtgccggcagggacgtcacgcatcgagcccgcgcatccagctcgtcgccaatcgaggccgccgccgccgccgtcgtgcatccagccggccgccaccgtcgcccatccagccggccgccgccgtcatcgtcgccaatcgaggctgacgtagccggccgccgccgccgcgcgtcagtctgcctgccgccgtccccctcgagcccgccgcatctagcccccttcagccgccgcacgtccagccgccgccgccgccacgcgtccgtccgcccgccgccagccccctcgagcctgtcgcgtccagccccccccagccgtcgccaccgccatgcgtctgtccgcccaccgccgtccccctcgagcgcgcgtccagtcgccgccgccgcacgtccgtccgcccgccgccgtccccctcgagcgccggtccaggcgccgatgcttacccgacgatttttttcctctcgtgaaacaggaaaggacagaaataccctcccacccatggtaccacttcaatgaggaggtgcggtaccatgaggtgcggacgatttctgaccgttggatgatgccagatcaacgatcaggatttgatactgcacaacctcaaggacaataaaaaaccttataatgtatagaaatccagtatctatatccactagcagatatacaaaatcaaagttatacaagcgtatacactccaaatctcataactgagatataaaaaaaaaacaaacaactaaaaagaaaatactagaaggctgagctttcagcttttccccaacacttcaaacttcagagcaatgcgaaactagagcccgcactttcaccgcctcactctgtcattgtcgttgcagccaccccgaaagcttatgctctcaatcataagtggaggaagggacggaactaatcctttcatccgcctatcatcgctaaacattggtcttacgttgcccgaaccatggcatcatagcgtcaacgtcatagagcactgtctctgttgagctgccgtagcttatatcgccaaaagtcatcgctgctacattttcatcgctacaaagcacaacggccggccatcttcctgcaacgcaaaccaggctgctgttgtcccaccgtcgttgttgccgcaaatgcccacctccgtcgagctgccaaaggttatctccccgaaagaccattgccaccaagttgtcattgcgcaaatcgtgacctccaccaagccgttatagcttatctcactcaagagccaccgccaccatgtcgacctccacaactgtcgttggcgtggctgctgtacccggcgtcgctcctagtgcaccatcgagctgaccagccaatgccatcaccgagctggccacctgacaccaccgttaccaccaccatcactgccagcgcctcctaagacccttggtgccgttgccgccactataggacaaatacaaataggaatacataggattgaacataggaatagaaaaacataaaattttaatagaaatataagtgaaaaatagaggattgtaatacatggatgatcatttagaaacaaacacataattttgataggggaatgcaatacaagaaaagatggtttgattggaccgcatgaaaaacacatgaatcagatgggagatagatttgtaaaggaaattttgaagaggttggagctcttgctaactttcatctaaaatctccataggattgttcattccataaaaaattgagagataagattaaatcttttatttcacatgtcttcatagaaaattttcttataggtttggaatcttccaaaagtgccatgtaattcctacaaatcaaacggagaattgggtaaatatgtgaaagttttttccccttgattttaactaatacctctgtcccaaaataattttatttctatcattcaaatcttataaaaaaggattgttttataataaagtgggctcatccaattctaccctcccatcttaccatcgccatatgattcaaccttccttttattccatacatgatgtttattgaatatactatgaaatagcaaatcatccacattaaatttgtgcatgaagtgatggattaagagtgaatttctatcattacaaacaacattaaatagggttatttgagtgtactgctaatatctttgaaattttctataaatacaaatacgattattcctctataactaatttcatccaaataatattggtactctaaaattgcacgtggtttttgagtggtgcgattggcattatcgtttttcctacgcatcatctagtttacgtagtgcgtactcgttccggcatcatcttttttgtcatgtctacacaccatctatccatgcgcttactcgtttaaacaaatgacgtgaaacaagatcaagttcatatgcgttttattttatttttttttcttctttgccatagagacaacctactactagatccggttataaatatttaacacttgcagtaaattttagtccaacttttaaaattctgaccataaattttgtattcaaatatgtttgtaaaatcttattaactttataatattatgttagtattttcatgccgaatttacctatacattttaaatttaaactattaaatgatcaaacttttcaaattttagccaaatcttgttctaagcataaaatatgtatgaccgaggattaagagtatcacctcggataattttgccaacaaccaatatatgtatgcatcgataacatgccgttggtctcgacaatcaagaaggacttctatatatatatggtatcgaaattgagtggccaagaaaacttatgtataagcaaggttccgatatcggttgctaatcagcacttaagcccaaaaaacagacttgcgaatttcttggttctggcgtcaaaggcaacaaagtacaccagaacctttagttctacatgtatactggatcgagtctgtttaaggaaggtactgatcactgtcgtcactcaaggtaggtagtcactgtcatcgctatcatcattgtcacttgaaacgttgatagagccggtctcttcatcacctggagagccttcagcattgtagaagtcagcagactttgccggctcctgttgaactggctgatcatggtcggtggcgaaccagcctgcactggtacatctggaagaggtagtggagcaggcagctcctgaactgcttgggctgcttgggccattggaggtggtgcaccagcgggtggtactagaagcagaggcgcaactacatgtagctgaagagggacatgttcttcaagtggcacaggcacccttggcgtgcgacggagctttgggtgaggcgtaagcagtgacttgagatcctgtgctggtacttggcctgaaaaagaaatttcagtttacgagtaaattatatctagaactaccgatcaagagcccgatcaaacattgaagtatgaatgctaaatttttcattcctttctattcaaataaacagagaagttatataaaagcgatgtgcttaaaagacacatctcaacttaaaactaccggatattcaatcccctcaattattaaaaccatttttactttacccattcaaacaaaactggagtggttttcgcttaacgcttactacttgacaatacaagttaacaaaaacaaatcgtaggagactcatatatcagctctgtgtgcatcttccctaaactcaagactgtttctgatcaagagataatttgaacggtttaagagtgaggggtttaatacaacaatacgcaattagatgttgatgaatcataccttcagccttttgtttttgcataccttcagcttcacttgaactaggtttagcatcagcatttaatattgtgaggagatggtcctgtaaacatacagagaatggatattactgtaaaaaaaatgattaaacaaaaatattgtagtttaaagaggaaatataccccgtcataagaaaatggagagtcatatttttcctcccaagtttgcaccatttctaccaggatatttttgatacctaatagccaaaacatacagagttttattaaacatacatatattttgcttgaaaataaacttagattctagttttaccttcagtcctctttgctagtaactcacacctcatcagctccattttgtttgtatttttgctacctttttgtagggcctcaagttgatcaactgattttctccatatttcagccctgataacaatatccgatctcctctctacttcaacttttaacatctccttttgcatctttaattcttccagaactgagagcgcattaagaggaaagcagaattagtgagtagatcacagtaagggtattaaaggggtaaaactcctcattttatggagaaaaggtagataggtggatggaaatgaacttattattggacatatgttaggctagaaataaacttattttttcgccgggccggcttgaaaaggcagccgaagtttattaagattgtaagagaagaaagtgtcggatgtacaacagccccgaaaaacagacttgctacagtatttgcaacaaataaaaaaataaatttattttaggagggagtatgtttcaagaacaagtttctggactgaaattagtccagatgttgtggttactaacagcttaactcctaaaaaacttactccctctggtctaaaaacaaattgtttggaatgcttgtagttaacatgtttttgttatatgaaaatggtatgttcaagtttgtgtcataaaagggctttcataatattattcttatgtaactgtttttaacttatgttaactagaaggtagttaaagttgtatgacattgactttgaaaagtctaaaacgacttctttttttaccggagggagtactaagattttgaaatatttgtgaaataactaaacagggcatcccaaactcatctattttacaccacaaggatgttacagtaacagattggctcacaaaggatctacaggctcgagataccaattcatcatgggtaaaaaaacttgctctgatcttattatcttacagaataacagaagcaccaaacagagtggaaacaaatacaagttcaaatacataccttccttctcaagatcaatttctacttcattccctgtcaaatgagtacacttgagaagttctcttatcttcgtctttatcctcagattcttttctttcaagcgatttgcgctgagttgttcgagttgggaaacctcgcattttatctacatttcagaacaccgtttaaatggcattgctactgataatcaatgtgacaagcgtcataaatatatagaattaccttgttaaggaatcttgatgataatgctttctcttgagttatcaaatcctctgatgcagcatcgataaaacacacaacattagcaaaatcgatttcctgatcaatcataacagaccgcagctcaatgagcctcaaccctagctccttaatctgtaaagggcacaagtagttcaggaagaagaatcaaacagacaacacaaaacaagatctagaaaagaaaatacaaaaaacacacaactataatctccctactacccagcagtcaactgttagtgttagtttagcctgggattacagcaggcaacctctttgcgctggcttgctgctgcaaactacactcatgaaaaagaatgcatcaacatttagcaagtccatctgtt

SEQ ID NO: 10132 - DNA, 51724 bp, Oryza sativa
  unsure (1)..(51724): unsure at all n locations
ttttagggcggagctatctaattagcattcgcgcaaatttttacatagaccctgtggcataactccaagtcagatatatacgtatattttaaaatttatataatactccccccgttttacaatttaagactttctagcattgcccacattcatatatatgctaatatatatatatatatatatatatatatatatatatatatatatatatatatatatatatatattatagtatctatataaatgtgtgcaatgctagaaagtcttacattgtaaaacggagggagtaattataatgatttagaattttaatattttatttgaaatgagaaaaataatttattaaaatgttatcaacgaaattaaaaatctgtttatataactagaaatacctaactctggtccgaattggagctaaacaggactttagttgagcggttgagcctgggctgtaaatattttattttattttaatttccttttgccgttgatgtaggagtaggaaaaaaaaatggactaccttacatcagttgatgctctaggagttgacacgtgggattccaactgctgcaatctttaggcaagtgttgatgagatagtgtggccatgaacctggactgaatctagggaacatacaagtgatgcaatctctggaacatggttatccatcatccatcccctagaatttgaaggtcaactgttttgttttagtatcatagtaagctattgtggatgttgcatatcattgttttaaataatgttgatcttttctggattgaagaacatggataggttcaatgaacatttgattgcgctttatgacaaaatacgaccataggtttaatttgtttggaggtagcgaagccatctacgtgttacttgatgaaggaaaactacttaccagcaaggataccagcatgtctatcctaacaatgccattaaaagtcatcaacagagaagtttgcattaacggttacttgtaatttataaggtcttgaaggctatttttttttcacaatttaataaattttgcatgttgtaggacactgtcacttattttgcacgctactatctattttgtatctagtacttctctgtaaaaaaaaaggtaaactctagctacgaatctgaatacgtgaattatgctttttcttttagacggaggggtatcttatagctttattgtcaagaaattgatttaaatgtaataacaactagagtatattcgaagagtctctatgttggtttgcccggctagaaactgaaaatcaagtattaatttgatgggggaaaaatcctacacttctcatttggatgacttatcatttggatgacttatgagttctgtttataaccattgcaactaaagaaacatcataaatacttctatagttcaatgagaagtatgactaggatttgagtttaaactaaaaattaaaatacatgttcaatagaaagagctatgaaaaccatattctttagagctatttcctctgtttcacaatgtaagtcattctagtatttcgcatatttatattgatattaatgaatctagacatatatatctatctaaattcattaacattaatatgaatgttggaaatgctagaataacttaaattgtgaaacggatgaagtacatgacaagtacaactatgctagtatcttttaagtgaaaatgctttgcatatgaccattactatcgtatatatgaccacggcgaaggcgtattggacgtccgcgagttgacctttttgggctgtgatccgaatctaaatctcattgggtcttccaaaatcctagttacaaccgtggctaattaccatgtccggccgtgcgcgtccgtggaattaacaacaaacagattccgtgtgtgcatggaatcatcgtcttacatgagattttaatgggtcttcttcagtgctaattttcaattcttttcttagtttcttctattcatcagtacattgtataagtctgttaagacaaattgtttgtatattacagctgtgagagtataagtgggttttcacatgctattggaatgcttatggtcctcaattaatcatgcatagcttaattgttgacataagcacaatcgataattgataagctagttatatgaactgatattggtggttatactacataaaagagtaaaaaaaaaagaatttgctttacctagttatgtgaattgatcttgataacatctgctacactgtaaataatactagaatgttgagatcaagttgacagtcagtggattcagaatttcagattgacctaaagcttcggcagaaacagcatgtagttgtggccatgttgacatgatatggtgggtttggacttgtagatgggcatatgtacgtactcatagaggcaccatacctttgtcactgacaggtagactcagggttcatcggacccacatgttagtgacaaagacacatatctttaaaggtagaggagcctgatccggagtgttacgggcttatggcgcaggtccgatctagagcatcacttcacaccgtcgcccttcaccgtcggatcatttcgacagacgtatagcaggtctcatttttccataactgtaattgcactggaaattcgtatagtggcactggaaaaatactaatcataaaaatttttcaaataagacgaatggttaaacgttgaatataaatagtgcaaaactgtacttattttgggacggagggagtacttattctttttcatgctgtactgtaacaggagccgttcctacggctacgagcgaatgcagcgccagacgcagacggtccatctgtcccacactcactgtcgtccgggccccactccccccccgctccgcgccaacgccggtggggcccagaccaccgccagatagccccctccgttcgtttggccctccgccttcccggattgggattatgcagtcgactgcaccgtgtgccattgtcactgacatgtgggccgcgcgcggcgcacgagacacacgccgccctcctccttccagttcactccactccgctactttttccaaccgtcgccccacgcgaaccccgacgccgcgccccccttccccagcctccgcatccgattcccatggcgtgcttggcggcgggcgccgaggcggcccctctcctcttccggcggcggctagcgccgtccccagtcgccgcgcgccgccgccttctcgtgtcgtgccgagctcgccgccgcggtctcaggttggtagcccagagcgcaggatcgcgtggttgcggcgtggtcggtgcacccggttgtgattactggtgtgttgcgtggtctcgttcgttcgttctcagtagtctgctcctgcggcgaaccgggggaatggccttttggggtttgggttgggttgggttgggttgggtgacaggggatcgaggaattcaattcccttggtggtgcgtgcttgtatgcatagaatgcttcgatcgtgaccaagtggggatcatcaacctctgaatgctgctctcctaatattgtttggcttaggttctgaaatgcttcttaatcaccggaatgttccacctatctgagaaaatatcctagcttatgttgtgtaatcatgatcattgatcaaatcatcagaaatcgatactgtcggaacgctttatatttgtacatttttgttgttttgattcatagaatatgtcaagaaattctgttaagcttagcttcatttttgcgggttctaggactgctgcagaacttcctcggaagagtacaagtaatgataaacaccataatagggtgaatatgcagagagatgaagcatctgtttccagtgataaagaacggcaagaggtaccacagcacattcattagcaatttcatatgttttccgattttgtgagattgatataatatttgggccaatttcacgatactatgtatgtggtgtagattgaagtccccaaacactcaatatcccccttttaatacaattttctgtgtttttatattatttttacataagaaactgaagtgaaacacattgtcactaaactagctaaacaatttaatatccaaaggcaatacctgatattggcaggctatcttcacagaaaaatgccgggtcggccaaaggttggccgaccaatttcttaagattggggagaaaaacaaaggaatgttacagcgacattacaatgtcgcgctagtccgggagagatcccagacacagcgtgaacaagcgaaagagaaagagacaccatggatgcagtagttatcatgaagttactgtttgcgtcaatttcgtctttatttttatgtatgctcctacttgttcactgttgcttcttttaatattttgggctttgtgtgtttcaacagaaatatggagatgaaaatggtatatcaaaccttcaattggaagatttgatacaaatgatacaaaacactgagaagagtaaggggctcctttcttttggataaatgatatttataatgttgtaggcatgcacataataatcattatcttcaaacgtatttgtttagatataatgcttctgaatcaagctcgtcttcaagcattggaacatgttgaaacagttcttaaagaaaaagaagacttacagaggaagttgaaaattttggagacgagattgtcagaaacagatgcacggcttaagctttcagctgaagggcagttcggtactgagattaatgactctctaccagtactggaattagatgatataaaggaagagaatatgctactgaaggatgacatacaatttctgaaaacaatgcttattgaggttgctgagacagagaacagtatattcacattagagaaggagcgtgctcttttagatgcttcgcttagggagctggagtctagatttatagatgcccaagcagatatgttgaagtctgatcctaggcagtatgatgcatggtgggagaaagtagaaaatttgggggacttgcttgagactgcaacaaacaaagtagagaatgctgctatggttctgggacgcaatcatgatttggaagataaggtcgacaaactagaggcatcgttggctgaagcaaatatatcaaagttctcttgttattttgttgatcttttgcaggaaaagataaaatcagtagaagagcgcttccaagtatgtaatcatgaaatgcattctcaaattgaactctatgagaattcaatagcggaatttcacgatattcttagcaagctagtggaggaaactgagaaacgatcactagagcattcagcaagtagcatgccttcagaattgtggagtaggatatctcttctgattgatggttggttgctcgagaagagaatatcctacaatgatgcaaatacattacgggaaatggtcaggaaaagggatagttgtcttcgggaagcatacttgtcatgcagaggtatgaaagatagggaaattgtggacaattttctaaagatcacattgccagggactaggtacactttctcctttgctagtaggagtaaagcctgtttataggataatactctgtctttatttagttttacaatttattgattaatgtagttctggcttgcacatcatccacatagcagcagagatggctcctgttgcaaaggtgatccttggtactcccttcaacctttcatcacgtgcatttcatttcattactactcctgacacaaatacatttctagttagtatattttgatatggttctgctgattagatgtgaaactactgatgtgatagttgactaagggtctaattggtagcctgggctgcggctgtgctgcagtcagctgctacagtcccttgcatgcagcatggcccactgctgctgctgaggctgcagctgtagttttggaatttgatttgttgttaatgctgattaattgaaatcctatcagttactctttaagtttgcttatatgcatgattctttaggttggtggtttggcggatgtgatatctggtcttggcaaggcacttcagaaaaagggccacctagtagagattattcttccaaaatatgactgcatgcagaatgaccaagttaataaccttaaggtatatagtttgtttctcaccgaagtttttggtcgcttcttttgtttgtttaagattttatttttctatcatgcaggttttagatgttgttgtacaatcctactttgaaggaaatttgttcaacaacaaaatatggactgggactgttgaaggtttgaagcatccctcagttcgacctttctgtaaaattaagtcataacattgaatcttcatcgacctgactaaatttagcatatgcaggccttccagtctattttatcgagccacaacatccagcaaaattcttttggagggcacaatactatggagaacacgatgactttaaacgttttgcatacttcagccgtgcagcactggaattactttaccaatcgcagaagaaaattgacatcatccattgccatgactggcagactgcatttgtggtacgtgtcaaatgcacttggctgtattggctaattgaccactgaaaatggatcatgctcttcttggttgatttgccaagttaaagatattaatttgctcatcttttactttgaaattccaggcacctctttattgggaagcatatgcaaatctgggcttcaactcagctagaatttgcttcacctgccataattttgaatatcaaggagctgctcctgctcaagatttagcatgctgtggccttgatgttcagcaacttgatagggaagacaggatgcgggacaattcacatggcagaataaatgttgtcaaggtactgaccattgaaaccgtgcaatagattgaattcaaatttcacctgtatgataccaacaaggttgttttgggttcattgttttcagggtgcaattgtgtattccaacattgtgacaactgtatcaccaacatatgcactagaggtgcgatcagaggtaattttcttgtaactttagttgtgtgtatttgattaactttagtttcagtagtaccttctaatggcgagattagtgtttctcaaaatttatataccagttttttttttttgtgtgtgtgcatgtgttttatgtgtgtgtgtgtgtggtggggtgggggtgggggggggggtgagagaagggaagaagaccataagttgatgcacaattcatgggaaactaccacactaccttgttgttcattatgcagtttatttattccagtggcattcctacatgaactgaaataagctgctgcatcataacatagggagttgtttaagagcttgactgcttgataaatccctttatatgtaatgctatacatatcactacatcagcatatccatagaatgcctcaactatcctggactcctggtgtttctagtttccattattcaatatgtcttataccctatattgttacaagtgttctaaaagcagtacactaggcaccaggtagctgccacgattagcatttaatggtgcattaggcgtctgcccagctttgggggctccagtgttgctatattaatgttctattgtctttcttttatgtcatatgctaattgcttggaagccccttgttaagttgatcctaggcgcacctaggcactaggcagcgtcttgccgaccatctaacgtctagtgccttctctgattagaagttcattgtagtagtttcagtttgtaagcgaagtctgttggcattctgttattgacaagctcttctggtgctcagggtggacgtggactacaagattcactcaaattacattccaggaaatttgttgggatacttaatggaatcgacacagacacatggaatccttcaacagatagacatctcaaggttcaatataatgctaatgatctccagggtaaggcagcaaacaaagcagctctcagaaagcagctaaacttatcttctacaaatgcttctcaaccactggtacgatttttaatcccctcatctactgctaaactggatacagaaattatgaccatgtacctgtacttgaattaagaattttccctcttgtcagctttgcagtttattttagctatctggttttattatattcccttttttttttcaagtatggtttacctatgtatattgataaaacagaagtgaaatatttacaaggtttattgctttctttcatttgttatagaagtttcgctttcaattcaagactaactacacactaaagtttccttgagcaggttgggtgtattacaaggctagttcctcaaaagggtgtacatctcatcaggcatgcaatatacaaaacagctgagctaggaggacagtttgttcttctgggctcaagtccagtaccacacattcaagtacattttcttctgaactatagtagggtcagctaacatgatcatatttgaatgtagagaaaaggaaataaaaaaaaaaacttaactagctcgtgaacaatctatatatctaaagctggcgggtctccccgccagctgattggtggattttgccaccatcaatctgttgacacgtgtccatttcacattggcgcgcagtaaacggatcctactaggcttcgctggtcttgcgcatcagcccacgccgattggcttgccccgcctggacgctctattgatttgctgacagatgggccatccttaaaatatcctaattattaatcctctgaaaaaacaactgagatgggccatccttaagagctacggcagcacggttagaagtcattgggaaaaatatatgcatgtaaaaacatgcatgtgaagatatatacgtgcaccaatttgaaataggaaattttaatatatatgtgtatatataagccctattttattattcgtacatatgacaaaattatactaccgtcacataataaaggatgacaatatcacaaaaataattcttattcttacgtaaaaataacaaatgtataaaaaacaatccaaaataattttaatgtaaaactgcatacctctaatcagtaaaaagaacaaagaccaaaaaatacaaactatgaaaaaagacacaaaatcaatctaaaaattatgttctaaaattttaaatttttaacaaataggctatgagagtgcttaccagtttacaacttcctttaatactattagtccaaagtatttcctccagttccataattcttgatgttttgaaaaaaaaatgagatcaaataattaatttgatgacactaaaacttggtgtggtgtacagattggttaaaatactttagtaaaattaaatattgacctatttattatttatattattatagaaattaatagtaaattatagatatatattttgaggtccatttaattgtccaggggtacagagtccccgtcaaatgtagcatttttaatgaatcttatataaaataaataaatttgggtaaaatctataaagagaaataggctaatcagccggcgtgccaaaaggcacgcctattttctagtctgtttatatggatggagcttgttttttatttgaaaaatagttgctcttgctccttttgttgaacacctctttacttattgttgctatagtgaacatgtttggtgctaatttactttgcagagagagtttgagggtattgcagaccattttcagaacaataacaatatccgactgcttttgaagtatgatgattctttatcccattggatttatgcagcatctgacatgttcattgttccatccatgtttgagccatgtggcctcacacaggtgtgcctttacatacttatattacgtagtttgtattaaatgtaaatactgaaacgtgccatttagcattatccgtaatctgtttctttatttactatgcactctatgattgtcttgataaattatattcctagatataaatatgcaatgcaagcaatttctctgatcgtacttccatcttttttttcctatttggtagaggatttattcttgccttattttttttgaggtgtatgatatatgatccaatacctcataatatgatcattgaaaacttttgaacacaattcagaagtacagagtgagaaaaataaaatgtgccaagatgtttttccaattagtcaatgaaattctgccctttacccttgaaacccacagtagaatatgttctcagatttgaagaatttcatcaacacaaaaataaacatgtttccagagctttccaaaattcatgagcacaagcttgcagttctgcaaagctgttcttggttcattcctgttgagcaattctgacatgttctgtatccacagatgattgccatgagatatggttctgtgccgattgttcggaaaaccggtggattgaatgacaggtaaatagttattaattaaccaactatctcccaatattattctccttaataatgtaaaatgcccccactcacctgctttgcagtgtcttcgatttcgacgacgaaacgatacctaaggagctgcggaatggctttacgtttgtgcatcctgatgaaaaggtggatgtcgtttcagttcatctctcctcttttggtggacacaactcatgtgggtgttccttttttgacaggctctaagtggtgcaatggagagagcgttcaactactacaatagaaagcctgaggtctggaaacagctggtgcagaaggacatgaggatagatttcagctgggcctcttcagcttcccagtacgaagatatctatcaaagagcagtggctcgagcgagggcagcagcatgaactctggcggtttagtgagacctgagcctttctctgacgcggcgcttgatgccacaggcacagattctgccttctgaagaagccgcaccatgcacctctctgatgtgcgaacatggcttcatctgcagcttcgattcttggaatggaacccaagatatttaaagacatgatccgtcagactcatgcaggaagccgagatgttccatagtgcagttatggaatggtcgaagaactaaaatcttggcacccattgtcgtgtcccagtgacagtgtggactatacagttatataacttatagtacgtgattgctcagtcgtgaaatttcactagcctcgatatatttatcatgcgctacggtgaaatgataagttttgttctttgtatcacttgcagtgtgctttgttatttgtgcaaagtcgtgtgtgttgtctatagaatattctttcgtcaaaagcaaagagatgagagacagaccctgttttttttcctgtttgaactctgaaatgtagaaaaaaatttcataggctctttgaaatttttttagagaacactacaattcatgtagaaaatttcatgtttttcttctctgatgtactcccaccgttaaggaaaggggatatttccattcggtcacaacagtagtcaaattttaaattttgaattgattggatttctcttctataagttttattggctgaaaatacctagatttctgtgcattaaatcagtatccaaaaaaaatatgtatgaaaattgaattccagaaatatttatactcctagatttaggaaccaagagaacaaaaatagaccaaaggtagcggaaccaatggtctgggcctggtcctgggcctgggcctgttcccatatgggcctcacatttcgcttcggtaaaaccgcctcatcattcatcacgtccatctatattctgccacgtggcacagacgcgagccgaccagaccagtcaactttctagtttctaggagtactgcagtgtggaggcgtgtccccgcaccgctctcctccccctcccccctctcgcctcgccgacctctccacctccccggcgactcggactcgtcgaagccgcgctcgcctacgaccacccatggcgctcctcccccgcgcggcgcggctggcggccctctccgcgccgcgcgcctactcgtccgccacggcggcggcggcgggcgcgggtggctccgcgtcgcccgcgccatacggcggggcgccgccgccggccgcgaactccaaggcggcggagttcgtgatctccaaggtggacgacctgatgaactgggcgcgccggggctcgatctggcccatgacgttcgggctcgcctgctgcgccgtggagatgatgcacacgggcgcctcccgctacgacttcgaccggttcggcgtcatcttccgcccctccccgcgccagtccgactgcatgatcgtcgccggcacgctcaccaacaagatggcccccgcgctccgcaagtccgtacacttgcgccctttaccttgcgttcttctttacatataaccatcaaatttgtgatttatttcgtatcgtctctgagagaagagtagcaattttctgttaggatgctctattttgcactttgaattggttggtgatgctgcttatatagacttcggtagaggagggcgattggattggggattttttttttgtcatgtcaagttgcatacgatgtttaatacttcattgtgcagattcttttttgccgggtcggccgaacgaggccgaccaatttcattaagaatgattctgtgcagatcaatttttttgcagattcttttttttatccttataggcgtcaatcccttgcgtgttcctcataggagtagataaatttgcgcttagtctgagcttcccatgtgttcacagcttcggttttgtatggcatatgccgttgaactatttttcctcttagattatatagagaattgtatactggtttagcatgcgtttgtaaatcagaggcacgtgcattttttagtgtcaggaatagaacagtgtcgtgcttgttcaaatatcataagggttcattgaatagaataatggttttccatatcaaaacatgagccatgtgtcttgtgaacatggttgatgtaagtacaactgctaaatatgcattcatatccacttctgttagttgaaagtagttaagttttgtacttaaagagtgatttcccttcattgtttcttttatttgtagctatgtagtaccaatattagaattggtactgtttctaatgcattattaggacttaggatatggagagtgcaattcgtttaaatacattttgaataaaattcataggtacttcgatgagtttaaacacctcatgaataaaattcataggtacacagtacaataatattttgtgtgctttatgtgttacattccaactttctatgctgaaataaaaacatgtccatttgcttactcagagaatcccatgaaagcaacaaatctaaatgtatgcatcttgtagaagaaagattgctggttccttagtggagtatggtcacatactttaattaattgtagtacttcgtccaaaaaaaacccttcaattgtagtacctttgcaaaatgtatgtatatggttatcctagggagtatagctatttttcttataggaatttggtttaacctctgcaagtgtgcctatatggttaccctacggagtaaacctattttcttatgagaatttggttctgattgccgacatgtttattgctttttgaaagaacagtgttttttgtgttgatgatctcatggttctcaaatctcaatgtgcgtgtattatgggaatcataaggaataaggaccaacagtaaaaaacataatattggttggagacctttaaaacatgcgtacatgtaatttttatgtgaactactaactgacagacacctgtgtaaacttggtgaccttctccttagtggttgtcttttattcactaccagctcaataccgatagtcgcacagctatagtttgcaatgttgctgacatttgtagctgtctgttgttctctgcagggtttacgatcagatgccagaacctcgatgggttatttcaatgggcagctgtgccaacggtggtggatactaccactactcctactccgttgtgcgcggatgcgacaggattgttcccgtggacatctacgtccctggatgccctccaactgctgaagctctactgtatggcgtcctgcagttgcagaagaagatcaacaggcgcagggatttccttcactggtggaacaagtgaaccagcacttctctgctttcctatctgctacgaatacgatcctgtcaaaatgttatcgagcttctgtgttaaataaaggaaagcgtgtgctttccgatcatcaaactctctgtagtagatgcagtgatagtgagctcctggctaccttgatcaccgttcatggacaaaaaaacaattggtgatgctgttgcggtgttgctgctttaatactatgtataatattttgtaatttgtgttgtcttctactagtgatgtaacattgggtatgacgctcaatggcgttgtgatgctgtatactttaccaacttgtgtaaatagaagtgatgataatataaaaaaaattaatagaagtgatgataaattgttaatggctgctatatgttctgatttctttactcatcagtctatataacttgtatattggagagttcagaagttaagtcatgcgtactttttgttttttttctttttatcccaatttctttctttttaactacagtaaatataaagatagaatgtacaattgctgaccttgcacgatgacgtgatatgtccacatgacgtttttatggcgtttcttttggaccgaaggactatgttaaaccaattgataaatcttgagtatttgtttggataatttaaaacatcaaagactaaattgaccatggggcaaaattccaaagcctatatcactatatgggctattcacccgcagataaagtaaaaactatccgggtaacaaacgaatagtagatagtaggaaacacctgaataaaaatactcctaaatcaaatcgtgatttacccaaactaaaccggctttgaccccttccccaagcctaaaagccccaacccttttatacctccccacaagagaggcaaaatccgctcgctctcagactcgcgacgccgccttcttcttcgatcccctctccctccgatctccccctcccccgcaggtaaatcagagaaacccccactagatttcgaatccaaatcgaggcctcttcctcacgatctcaccgcatttgctgttgcgattcccacctcggggttttgtggttcggtttggagcagatctaatggcggcgctggcgtcgaagctggcacagatgcaggcgaaggcgtgcgacgcggcgaggttcgcggcgaagcacgggtgcgcgtaccacagggcgctcatggagaagaaccagaagtacgtcgccgacccgcccaccatcgagaggtgccaggagctctccaagcagctcttctacacccgcctcgccaggtcggtccaccctcacgatctccctccaccttctccacgatctcttagtcctccacatctgaattatctctattgtttagattgcgcactccattagaacacgatctcgatcacttccacattatggaaggccgaatatgggattctaatcatctatggcgaaacctaattatgttgcctaattagatagaccagcaattttggctgattgttttaattgaataaattagcagcacatcatgtaaagtgacaatgcaggaaattggtaccattgaaagtctggaaattgcagtgttgaaaagtgtgttatttttggtgatgttctcctgctatatcggaagttagaataatgatcagcgatgtctattccatccatcctaataatggaatctatgcttcccgtctcttagaagctgagcaatgcataatgcataatggtcatgttgtgaacatagtccatagtgatgcattgcaaccgtgttttgaggatgttaagtatttttgctgaacaagttgtcacgttgcatgcaattagccatggaaaacaagttcctcctaaattctatgtaaatgaagacgcaagagatgggtagtgggtttatatggtaatgtgggttgaaagtcactgatcttggccttagcaagattgatctgatgagaagcaagctttatttgagttttttttaactgtgagaaattactttgttttgagccaatgcttttctcttggacagagtcccagggatgtaattgttcctgatcagccattttgtcttcatttgtcttttgagaagaccgatactagttatttgtttgagctgcattttgcttgtacttcatagagatagagtagtagtttgtctatttcaccattattattcatccgtgttgtgctaaaagtgcgccttcagtgcacattcctctggttgtctttgccagtgctattatgaattataatatacatctgatatggtgccataatttgatgattcattacataggtgacagaagatacttgatcattcatttgataccataatttcactcacattataaggtgcatttcgtatcttcaatctctgtgtctttactgactagtgacacatttcttgcagccttcctggtcgctatgaggcattctggaaggaagcggatcaagtgaagaacttgtggagaaacagaaaggatctgaacgttgagcatgctggcgttgctgcactttttggcattgagttgtacgcgtggttctgcgttggtgagatcgttggtagaggatttactttcactggctaccatgtctgagtgctaagcaaccacattagtcgccgactcgccgtttctcattgaagactctgctagagtgttaggatatcagttttttgagatgggatgactgattgattcagagttttgttttccgaaatttctcgatgctggtgtaacagacggctcagttaaaccaacatgacgaagttcaataattcagtgaatcgtagttgaagtatgcagtaatttttctccgatattttattgaatattgatgccattgattgttttattttgctgcgtgtttgatgccagttctcattgtcgcaagcatatagtttctctgtctctctgtatgtggacatgcacttttctccttatctttcagttcagtgaccaagtctgcttttagcaaatttcagtttagcctctgttcttgataattgtcgattaacattagcaccaagcttattggtgtgcttatacctatatacacattacattttgatggcttatctcatacttatttcttctgagttttgagttttgactgacaaggatttgcattgcaaactcggttagttgatctctccctgttttatgtaggttcttatccattaccgtgaatctgtgatgtaaatgtatgtaactgcattacacttgtccatttctcagttaaagtttgtatcattatgtctcctcttcttagtttcaaggtctaatatagtaatcaaatccagctagattctgaacgaacgactgatggtaaattttctatgaagaccatttgtaaaaccttatccaacgtagacagcttgatcaaacaccggccgcccagatcaaggatagatgtgcgggtaaatttttcaaaaaagagccttgctaaacgtaactcttcaatgtgggaccctatttggatcgctataattgacagcgaccctaccttgggccaccggacatcgcttgatcgaacaaaaacggcccagattaaaactaagttgggtccacctttcagacttatcgaggagtaaggcccacatcggaccatcacgcggtaccgatattgggctgcatttatatgggcctaaatagtagctgccatgtggacttttatgatgggcctcatttatatgggccaacgaaaattatactccgcatttgcggtataatctagtataatttcgaaggttctgaagcgaataataacgcgcaggcgaaaaatcggcagcgaagttagctaatcggcgaacagatcgccgtccggtgactgctccggcgaccggggccggcggcggcgggtggtctcatgtactccgccgctcgccgcctcctcctcgccgcccgcaccggcgccggcgccggcgccgcttcgcggttgtccgcggcggtgtttgcgctccgctcctactcctccacggcccagtcctcgtcgccgcgtcggttcccgacgcctaaggagatccgcaggggcctggacgagttcgtcgtcggccaggacaaggccaagaaggttaacgaaacctccctcctcgttggtgtggtgtgtactgtgtagctgattgggggtgtgaccagtgatgacgctatgagctcgagtttgagcatgagttactttgctttactacatatatgatctatctgctagcaatttacaattgtgcaagttcgattgaaattatggaactatgtacaaatttcgcggctaggtttaacaagggtgctttgcttatgcaggtgctctgtgttgccgtgcacaatcactacaagaggatatacagtgaatcttcaaattggttagattctggaaatttcatttggtggttcagttatgcatcacgattttgacttcaatttcatctgtggtgatatagttctatgaagagctcggcatgtggcgatgttagtatgagtggtgatgatgacattgagcttgaaaaaagtaacatccttctgattgggccgacagggtcaggtgacgcgaacacatacgtggttcatctgtactgtgaaaatgctgtttgcttatctcgttcttttgctatgaacctatggcaggtaaaacactgttagcaaaaactttagctcgatttgccgatgttccatttgtgattgctgatgcaactgcaattacacaggtaggaaaggctggttcaagcattctgaaaatttcttctatgtgtgcttactccagcgtgtcatggctatcgtggcaaaaaaagctgattgtgtatgctattttcttctttctgatgccaaaacaacttccttttcaggctgggtattcaggtgaagatgtggaatctataatctgcaatcttctggcggtatgtaacagcctatcactctctttctggccatttatgtactcttttgggctatctagtgttcctaatattttagttgaatactgttttacattattttcctaagctaccatgctactaacagttctcctgcaaattgttaataaccagttcctttttgtgtataatgaatcttggatcacctatcatctgcaagaaaatgttttggtgccaatagctacgttgggcataatctgaacaggatcaagcttatatattaaactattaaccattaaccataaaccatatattgcttttctgacatgttcttccttttaggctgctaagttcaatgtggaagccacagagcgcgggattgtttacatcgacgaagttgataaactcataaagaaggtcattgaacaaattagttttgaactacttccgtgcctagcgaatgtttctgcacttgcaataattggatacattcccacatccaggttgaatgcaatgaggacaggagggatgtctctggagagggtgtccagcatgctttgttaaaaatatttgaaggaacagtaagtgcatatattaatcttctgctctgtaaagtaaatttatctttgtatttttcatacttggtaattacactagcccttctgaagagagtgagatctgattaacaacacatgtaagtatatgtcaattaatgcatgtgtgactgatgctgaccataatttttttttctccctgaatgtacattcagtcatgttctgtctctgaaataagacccatttgttgctatcattcttaggtcatcaatgtaccaagaaaaagaaatcaagatagtatatccgatggttatgtcgaggtattgattctgaatcttttgattaagttgttaagtcagttaaattgttttgttaatagctaccttattgtttatcagcatgatagttttgctacagaacgaagttatgggttcttgatttcaaatgtaatttatcattggtgttgtcgtactctgcaaattgcatttgtggttcaaagtcgaagtaattactaagttccatctgtctctaaatataggttgttgtgggatttatataggtaaccttttactttgatcattgctgaattggaaatatatagaataactgcctgtttcttccctatcttaatgaaattggtcaggccgggcaaaaaaagaataactgcctggaaataataaaataggatttttttttcttgcaagatactttttatagttccagtatattatgatcaagaacactcaaagtaggttgttagaatttaaaaagacttattttgtgttgcaggttaataccaagaatatactcttcatctgtggaggttccttctctggcttggaaaagatagtatcagaaaggttgtgcacttacaaataatacaaacttctataattctctgaattgtccatctttatccagacttatatattgccttaaagtacttgtgctattgaagacaccgaaactgtcatatggggtttggacttccaacatctggtgatctgcgaaactgtggttggacaaatgctatcggggaatcatgctgtgttgaagctgtaagatcagttgctgacatttgtcaaacacattattttaattccacatagagataattttcaacgatttcctacttagattgaaagtgatgacctgattgcatacggcctcataccagaatttattgggaggttgccaataacagttggcttgaatgatctcagtgaagctcaattggttcaggtagcaatggttctataaatttgtaattttatgcaatttatttttgaccacatattcctaaatgaatctactttatctcttcaggttctcatggagccaaaaaatgcaataggaaaacaatacaagaagttgtttaaaatgaatgatgtgagtctggttctgttgtattgattgttttgattcaactgcaagttatgattaaaaacaccgtcttctgtggtatgttaacaacaaactattttctcattttacccatgtaaggtcaagctgcattttactgaaaatgctttgcggttaatagcaaagaaagcagcttcacgagaaacaggggctcgagaactgagatctataatggaagatattttgacagaagcaatgtttgaggtgacttgcacatgccgtaacttctatcaacatcgaccagcactaattttttcgttctatttgcagattcctgatgcaagagagggaaaagagaagataattgctgttcttgttgatgaagagtctgtagggtcagtgcattctcgaggatgtggagccaagattttccgggatgatggagccttagaactatatgtttaccagaataatattagactgccagggttaatccctgggaaccctaaacgtactcgcattgtcagcttctgccttttggtcgctttgtcagcaactaagctgtgggtttaccatacatttcactgcttctcctcgatatacgaatgggttgtgtcgatactatgtaaagccaacatttttacacaataaagcatagcattaagctttattttcgtcacggtgtcattgttgtctttttgataaatgggatgcaacaaatttgagcctggaaatatctggggctcacggttcacctataatattttgatatttttcacaactgccaaggttggtctccgtaatacagaggagaaagaattggtggcaaattgaaaaggaaagttggcaaaatatttcacactgcacaaatagaaaagggcctttaaaccgtaatgcatcaaaattttgtggccgtcattttattcgtatgcaataattgcagttacaaaagactcaaccagagttactgccgtttactcatttgacaccaaatgttgaaatcttcaggcttctgagaatttcaatttactgatcgatgctcttagaatcgatataaaatgacggggttatcagatccacaggcagactaagacatgatttcctgtggtcatcaaatgttagtgtccatctccttgtttagtttcacctcctgaagaagtgccttgaagcgcaccatctccagctgatgtgattccaaacctactctgaaacacaccatccagtgagtttgcatcaggtgcaggttctcctgttacattttcagtcttccttttatggccaaggatggcttcaatggcagcggcactagctctagctgcagcctcgtcctttgcagcagcctctgccctcctcttctccctttcttcccttgcaagagcttctgcccttgccttctcttcttctgcccgagccgctgcctcagcttttttctcctccacatcctcgtatagtttggttatgtcaccttccctccctgcttcacggagtgcgccttccaataggtccctcatttcatcgctgaacaccaccttctcatccaaaagaatatcctttgcgatgtcgattgatttatccaaactagcttcaccaatgtacgcctttagcagtgcctcatagcttgcaatgcttgggctaatttctttccccctcatcttatcgagatacccatgggcattgtccagcataccaaaaccaattaggccatcaacaatcttatgataggcagttgcgtcgggcttcaaccccaactcagccattccgtcaaagtaattaatgccttcatcgatgcgatcaaccctaaagcacccttgcatcagtagcacatatgtttcctcgtctgccttaagaccactttctcccatctccttgtatagcaactcggcctcacttaccaacccttgaagactgagatgccggatcaaattattatatgctgcaacatcagcaacaacttcccactcccccatcctcctgaaccaagaaattgcatcaccgaacctaccagcagcgcagtaagcatccacaatcacactgaagcttctcacatcaacagcaatctttagtggaggatcatgctcccgaagcattctttcaaacagctcgatcgcatcatccaaccttctgttccgcccaaacgcatcaaccacaccattataactctcagctccaaacctcacctccgactctgcaccgagaacctctttgtaacactccattgccttctcctccattcccataaggaagtaagccttcatgaggctcccatacacaatgccatcaagaatcggctcgcggccaatcttttccttcaattcttcgtacaattccacggctttggcgccatcaccggcttccacgaacccagccatgagaaggttgtagacctgtggatcgggcccgacgaacccggaggccagcatctcatccttgagctcgagggcatcagtgaggcggccatggtcgacgacgagggacttgacgacaacgcgatacgcggtcggggacgggggcacgggggatccagggcgcgagatgaggcggaggtggtggagcgcggcgtcggggaggcggcgcgcggcgagggccgagaggtagagcgcgtaggtggcggcggtgggcgggacggcggcctggagggcgaaccggtggagcgcgaagaagtcgtcgaggcggcgcgcgcggaggagcgcggcgaggacggcggcgcaggtgaaggaggaagggcggcagttggagtggagcgcgtggcgggtgaggagcgcggcctcggcgaggtcggcccccttctccccgtccttggaggagggggacaggagcgcgaggatgcggttgtggagcgcgaggcgcgacggcgcgagcgacgggaggggctccgcgaggcgcacggcgctcggggacggcggcggcgtggggggcgtcgcgacgaacgcgtcgcggcgccgcgcccggcgggacgccgcggccgaggcggcgtcggcgtgcgcgagcgggaagagcgccgggacgaggcggcgcgccgagaacggcttcgacagcgacatctcccgcggctgggccggctgcggcggcggcggcggcgagcggcgagcgaggagagggttttggggactctggggctatgggaaaatcgcaaggcggtggcccgaaggcggtgtttggaaaaaatacgccttctctacaaagaaacggattttcgagccacacttcaaaatacttctgcttttctcggggattgcgaaaaaaaaataccaccttcatttcatattataaatcactttgattcttttagtcaaatttatttaagttttatcaaatttatagaaaaatttaataacaactatataaaataccaaattagtcttattaaaataatattatttattttttgataatatgtttgtttgtgttgaaaatatttttatgttatatatatataattatttgcaagaaattcatgctggggggagaaaaacgagcaatttcgagcttcgtatcagcatatgctattccctattggaaaaaaagaatatgcttgtgggaataaatggccatacatcactcttgcatttctttgattgcaaatttccaaggcagaagaaaatatgtgccaggtggagcagtatgtcattgtcaggaacaacaaagaacacaagaaaaatttcccaaaatccatttctcacaaacagaaaaaggaaaatttccgaagctgccaccacaagccaagctcaaaaactccagtgtcgactcgagctcactgggtccaagaccccgaccgcactggccgctccggccacgcgtccgccggcgattggccgcgccggacgccgagacggcgactccgaccacccgagaatcttcgcagtaatatgccaccgtggcgaattccccaaaacaacccctgcagcatctacccctcccatgccaccaaccacggtaataacgtaataacgcgagaaaaccaggggtaattttgtccaatgtgacatcggtataaaataactgaaccacctaatcgccatggccacaccaccactctccagtctccacctccgcggcgatgcggagcagcagccatggaggtgctcagctccagccgcttctctagggttttccccagcagcctcctcagccccgtctccaagccgctcaagcccccgcgccaccgccgccgccgcgtccagacgctatcctcctcgtcctccgatgccgcggcggcgccgtccacgccgccgccagtgtggccgcccgcctcgctctcccggctcctcgccgcggcgctgcggggagggcgcgcgggaggggagctcccggacctagccgtgggggcgggggcggcggcgacggcggcggggggaggggcgaggatagggacgctgctgatgagcacgacggcggcggcggtgaccaaggcgcgggagaacccgtacatcctggcgctcgcggcgaacccgacgttcgtgtcggggctcgtggcgtgggcggtggcgcaggcggccaaggtcgtgctcacctcgttcgtggagcggcggtgggacctgcggatgctgttcagctccggcgggatgccgtcgtcgcacacggcgctctgcaccgcgctcaccgcctccgtcgcgctctgccacggcgtcagcgactcgctcttccctgtctgcctcgggttcacattgatagtcatgtatgacgccacgggcgtcaggcgccacgcggggatgcaggccgaggtgagccaatgcttcgattgcttttgtccatttctgtattgcatttagatgtatgtgatacatttttttttctgaacttttgattttgatagctaatttgtcaaaatgattcagagattgcttgttatttggggtaggatactttttgttcacattgttcaatcatcgatgaatgactgattcgatggcccttgtgaggtttgaacttgcggctggtggtatattttacatttttacccaatgttggagtgattatgggattgcatactcctatgttgttactttcaatgtggtagtatttgtggtgtacatacagattgattgcttatgttatcattgtttgggataacattggtgttcattttactctgcttttatggttttcgtctctcagcagtaagtgtaatggttaccatttgcaaatgattgtaaatttgtgatatgacttacaactgaaaatctgaagctaacattctgaactcaatggggactatgatttcgcgttggcatcattgcgatactattatgaattgtgctacatatataagattatggctgtcctgatataaaacaagccagccaaattgcaaaagttaatcatgtgcgagctgctgttatttgggctttagaagttgttatatggcagttttagtatcttttcgcataaacaaattttggctttgtcttagctttccagtggccccagatacttttttcaccatatgttgaactacaaacttgagtgtacttgttgggggcaatggaacggtgttaaatagttttgtgattgtttagtatttagcatcaaaatagatttcaggcattcaagaccaatgtcttgctccttccaaacaattgctgtagtttggtatgaaacttgtgtgctacattcaccttatttagctcattatcttttttgtaaatcataaaaccagctactcaaatatatattacttccctgattgaagcttcacatattaccttagaataacacatggcacagacctgagacctgcaatcattttgccaatatgcttttctttatcaacttactttaaggggtagtggtaacattactgttttatcacatggaaactgatagcaagcagcaaatccagttaagcttgccgtacatatcatctaaaaaaatgcagtccagatacttttttttggaaaggggaaaatcctgataattatcacgattgcattctgatgctcgagtttagattcaggaccatttggatattggttttggatagccatcacaacaacacagtagcaatagtgtgttatatatgacttgtgatagggtgcttatttcctgaatggtaatacacaataacaccagatgcaccaaatgctgtcagttttatagtactcgcttattgttacttgatatcttccttatgattgacacaggtactcaataagatcgttgaggacctgtttcaaggccatccaattagtgaaagaaaactgaaagagttgttagggcatactccatcacaggtttttgccggcgctttgctaggcatcatggtggcctggttctgttgtcagggctgtattgttcccatttgactgctgttgtacttcagaaatggaaaaatcgttttgacacgaagatttttggtgcatctggtgtaaccattgttccaggagatagctaattttatttcctggcctgtttgcctgtacatatatgtaactcaatagcagggatagccacgaatttgatattctcaattcatagttgagatttaagtccttttctgatctgattgacatcattgaatgtaggagtgttttgctcttagatctgaaaattctggagttaccctgtacaaccactgtgatcaagaagccataatttgggcatattatctctgtatcatatagtgaaaccaatgctgattgttactggcttcagtcaaacaaattctgtctggacaattaactgttactaacaactagtattggtgtattaccagcaagtacaaattggtctagctatgtttggcaaattgggtcatgctaagttgctgctttgctagggcacacgtgctgctcaatgcttttgtttttggtactactttacttggcactttggcagttcgcaccttttcaattgagggatctcgctccaaagtcgacgatggtatcgattttttatcacatgaagcatggcattgtcggttgtcaacgacgagatttccgtgaaactcaacattgacaagagcccagtggtgcgccacgaatcctgacgatgcctcagggcgtgctggttcacgaggccatattgccctattcgtgacaaggtggaggtatataacattctacaatttttttattaaaatacttttaaattgtaggataattacattgtaactactgtaatgcaactactgtataatttgctcatctaacatcaaaacgttagactaacttagcggatgaggtgcgcttttgtgaagcactgacatgtaaagcgagtgtaactgaactgattaggtgtttttttgtggaatatgttcatccagatttaagttctagatttagatcccgtttgaatcatttagtccctggattaaaattttaatcccctactatttggatccagggactaaaagggactaaagtcatgtgtaccgaagaagagaggggttgccactatagtcctataagtctcaatatgcacttttagtgctttttactcacccctgtttggattcttaaggattaaaatagagtgactagtggattagtcccacgaaccaaacagggccttagcacatgtgctcatatttacgattatttatttttttttaggggtagacaacattcatgccaataataacttaataagacgtctatagttaatttatgaacttcaagatataatgacctaatttttaagaggtgtttatagagtcctaggagtagggtatgtatgtgtgcgtttatataggtgagtttgcacacatctatatgagcgattgcgtccataccgtgttttggaaaaaaaaaacactgattttaaccagacacgttgcttaatcaggcaaagcatgacacatttttcactttggtgctttaggtaagggcgaaaacctgaaaacggctggaaagtggaaacgagtgaaaaaccatgttttgccatatatgtttatcttggttgataaaaaactgaaaatgataaagttaaaaacgaaaacgatattgggaccttataaaggtgtgttcgggaggagaggttaggaaccccttctttttaacacgtaaaaggaaacacacattagcgcatgattaactaagtattagctactacttagtctcgaaaaaagataaaccatgtgttcaaattcgtagctaggattaggtttttttaggacggatggggtatcttttaaaaaatagattaatatgattttcaaaacaactatatatacaagttaaaaaaatgtattgtttaacggtttagaaagtgtacatgttaaaaaggagaaaggtaaagttaggaacatagataagagcatactccctccgttaaaaaaaaccaaaaagtaaaaacatactctatgtctaaatttattatattaagatatgtcacgttataataataggttatgttttcagacggagggagtagccagtagtggtgatagtacattcagcccaactgaccattaatcctagtcaacataatagacaagacgtgttgctccctgcttgttcaccatctttggacgaatgactgggggcgtgactgcgtgtaataattctgtacaaaataacagatttttcaaacacaactcttaatcaggcaaagtatgacgctgattccaccttggtgctttaagaaaatagaggtcaacatggaaagaaacggaaagatggaaattctctagattcaaagaaagtgagataaagcagctccttggaatgctcatgtcatgcttgaaggtgtctgccactcattagagtatctaagataatagtgtcatcagtaacacactttagtagcggcaaacaaggccgcatgtcttgtttccagcaagtataaatgcatgtaatagtcatggctcctgccctttcgtctttttggaaaaaaaagatatcaatgttaagttgtttttgttacgcaaatgtacctggtgatagcaaaccgcacaccataattgtgatgaaaagaatataaaatgacatgctttcaggggtgtttctgttaggtacattcacgtgcatggacattcgcaatttcacacgcatattcaatcagagcataccatgatgcagtgaatggaattaaatgttagccatatcatgcacgggccattgctatcaccgtgctttgatcagttgagctgcgtcttaaaaggagagagaaacaagcaaaaattaatttataagttactccctccgtcctaatatgtagcaatctagaatgggattagatccataacccaccctaggactacgaatctggacggagagagtaaatctttatatctgtattagaagtttacatatatacaattttcgcaaaaatcatagtttagaagctcgtaaaacatgtcacgttaatctattgctatgttttcttaaaaaagagaaccaaaataaactctaaagcgtgacttgagttccaaaattcaaaggctacagttaataatatttggctttggtttttttcaaaaaaaaaatatttggctttggttaacatacggtgggaaagtcatgcatctttcaaatacataataactcaaaatcctgtgcgcacgtggtgtcgtggtgaaagtacgctgtgattggaaaaaaataatggacgttttagactggatacaataatagatggtagataatccatataggattttttatgagctaaagtagagaggggaagagagagaaggagcgagcgactaattagtcacccaactgtactctctgtccgagacgtcggcccaccaggtgtactctctgtctgagacgtcggcccaccaagaacgatgggtgcacccgcgcaagccgccgttgccacgtccgcgggcgtcgcgctccaccagattgccgctgttgcagtcctcgtccgccatggctgcccttgccatcgactacgtttatcgtgaccgtcgccgctgccctcgtccatcatggctacaatcgccatcgactgcgtccgtcgccgctaccctcatccgtgtccaccatcgccaccatcgctgtcgccatcaaccgtgtccgccgccgcctagtccgttgcggtcgtcggactgctggccttatcctccacgctcattgcctgcatccgcctcggctacaacctcatccaccgtggcagcccgtgtccggcttggccgcagccctcgtttacggcggccgccgccatcgctctcttctgctgtcgtcgtccttggtccaccatggtcgtcattgttgcgttcttccgccgcagcgggctcatccactgcgtcgtcgcgtccttctgccagtgtcgccttgtccactgtggccgcggccgtcgtgtcgccgccattgtgttgtcgccatcttccaccgcaattggcgtcttcgtccgccccagccaccgtgggcactagtacgccaccgtcatccacgtgcgtcaccgtagtccggaggactagaggagaagaggtgagaggaaaagattgggaaagatggtgggtcccatgaagataataaaatatatatatgttacagttaatctattactccctccgtcctaaaatgtagctatttctagcacagtgtcttgtcccaaaatgaagctatttcttcacctacctcctcctctcaaccaatcacaaccattcttcttcacacactttctcttttcaaccaatcacacactttctctaatcattctcacctacttttttaatacccgtgtcaaccgtaaaaatggctttattttgggatgaaggaagtatagacaataactatactgtttgttatagatgatattactatctattatagtcagcactcagcagtggactttctcttcaaacccaattcacctcttcttccgcccgccgttggctgccccgcacgcgtagctaaaagcgggtgcaccgagagcggccacgtagtactaacttctctttatcgagcgtcaacgtgagccgactgcaccaaaatcatcagtggaagcggagcacttttccccagcgaaaatcgagcgacgaatcatggcaaaaagcttgaacccggtcctgctttctctgaatttctagctatagccactcacaggattttgctcatgtgcagtcgttagtgtgactcatcttaaacagtcacgaccatccaaattgcatgtaagtatgggtgcaagcgggacgggcaagttgattttttattctcacttccagttcattttttatatcaccatacgagaaataaactagcaaacggatttttatgcgggtagtgagactacccacttgcatctctacatgtatgggttgaattctttattcttggagcactgttttacatagaaaatagtaccgtacaaccactgtagtgatggtgctatagcacttgatttacgtctttgatctaaaaataaaaaatgaatgataagataccataccgttattaacttacagttctagttgtgactgcatgtaatctcaatccacatttttctcatctttgcagaaaataaaggaagcgaaaggaaaggaaacttagtcctatttaaaatagattattaactgaattatcatagtagattaccaataaaattataattataaactaaatatttcaacgataaacttaataaacacttagagatctaactacttttgaaaaaaaaacatattttaagagacgtgaaatagttaagcgaagttctgaaaacaacgggaccttagtgacactgtagtgtagcacaggccacataggaatcaggacagggcacaaagtcagctggcgtcggcaaatgaagggtgtgttggttgccggtcacactcacactttgtcacaactaacattaggtaaattgtggcagccacaaaagtgtggtggacaaattgctagtcacaaagtgtggcaaagttagcaagaaaattaagtctatgacatatgagacatgctattgaaaaactgtggcaagccacaactgttgcagtgaaccaaacacatgcctaacaaactgtgccaaccacgagtatggtgtggcaacgtgtggccaagtctcatctcaagcgagctaaaagaaaatctcaagggagctactcctatgtgcagttgaaaccgcaagctgtggatacatagtaatactagtttagtccattttaagcggagcgatggattttcgtatctaatatttaactgttcatttttttaaaaaaatattaaatattaaataaatagtcacatataaagtactattcatattttattatataataataataataatatttttaaaaaataaattaaactattaaacgtttgatataaatagtgtaaaattgtggtctttctaggcgaacatagtactgaatactgatgtcgcacagttggggcgaaacgagttgtccattaccattagcgaagacgacgatgctgcctcgctccaagcccccaacttgcgtgcgtgtgatggcactagctctctctgattttttttgtaacgaatcagacagccgtcaatttcatttaatagagaataataaaactgtacagaaaacacagacactagctctctcatctcacagaaacttactttttaccgctcatgcatgatatcgaatggctgggagctggctaatctgaatctcgctcgcactttgacccggctcttgcatatgcatatgtaacattagtggtagattgctgaatgtactgagattattaaggcgtgatcttgttctgccgtggtcaaatcaaacactgcaacaatcttttgcccgaacgaagcaaacaattaatctttttgtgagtgtgcgaagaacgcccttatcttttttttcatggctttattcagggatttgttttatttatttgcgatatcttctgaatctggatacaagctgttattatcagaaattatcacaaaaaaatttcacatatatctgagatcgttagtagttcatgtatatactctctacattcccaattgatcgtcgtatataatttttaaattatttctaaataatcatcatattagtatttattttctaagtttattcgttatatgtgcctaaaagatactccctccatcctataatataaggcgtggtcaaacttggcactatcttagtaaataaaatttaatttataatataataattgttagctaaatatttttaaaattaaatattaaaatgtgtgcacgctctatttataggaagatggagtattcctaaatagacattgatgctgtattcatgcacataacacacataacagtgttttggtttattatcggttaattagtaaatgatacgaatgttgtatggattgagtttgttaccgagcaaagtcattatgaaagaatttattatgtactcatgcaatataatgattaactgagagggaacggatggagtattttccatgagaatctgcttgtcatgaagaaaaaaaaaaaaggcgccatgtgtgcgcacggtgaagagccagcttgatgtcggaagtaagcgaaaaggaaataaaatatccgatactgtgtgtctgtcgccggcttgccgagcaaacccatcatccgtggccgtcagccgctctcgcggcacggcgacgcgcgtacgcacgcacacaaaagctggggagcaccgccgccgccaccgccaccgccgcaccgtgcatcatcgtgtggactcggcgctcgctcacgagtcacgagcgcgatatagaagttaaaaaggtgacataagtgagctgtataagttgtcacattaaatttatacgtagagaagaaaaataaaagaaaaaaacagggattataaatttatagctaactgtaacacgaacttagataaagtactccatctgtttcttattccatctgtttcttattatgagtcgtttgtctttttttttctaatcaaatttgtgatcaagtttgtagaaaaatacagtagcattatcaatacaaaacaaacattatatcaaaactaggaaggtggcccgcacgcgcatgcgcgcacacttatattattgaaaggtaagattattatttgttcaaaattaaattgtcaaatagattaagggcaaactaaagttgggataatggcattttataataatttaagggttctatttttcttaaggtttcttaaaaaaccattcataaacatttgagtaggagatgaattaattacttaccacttttgaatcatgtttttttctcgagtaaataagaaactattgcttaattatcatacaatccatccatatacatatcatgtagtatgtccacaaatgaatagtgcgagagcaaatattcaaaattcttgtgattaaatcgcctcatgaagacgtatgatatagtaagaaagggagggaagcgtatgtaaggaaaaaaagaagaaaggggaaaatgaaaaaagggaggggaagtgtatgtacccacgtacgtaggtgcgcacctatgccgtgggaggagaggtgggacctcatagtatttagtgttttctaagatcaatttagtctaacggtttataatattggatgtgccaatttaagtgaaaatcaagtaatatatactttgcttttttttcatataatttctaatatttgctctaatttattagagcaccacgtgacagctcgagagcattttaagaaattttataggacttaacacatgtaattagaatattaaccatgtaatatatatgtatggggtatatggtaatatttgttccagcttcgtcgatgtttatatacatgtagagagaagccattagatgtctaattaatagcaattaattttgacacctatttaccgttgttcatagtagctcttacatattcatcttatgactctgagtatccattgatccccaatttactgtttacgatgactcgcatgaaaaaaatgtactacttagggtttaggacaactgaaattgatgaattatctgatttatgtgatagctatttgagggtataaacgaatgaattgacttctaaaagttaaaatgttgtttaaaaaaagacacaatttagaaacttggaaagcatgcaaatgaaattcaaactatggaatcgggaaaaaaaaagagggtcttaaactcccttgtcttagaagagttccattgatattcgttaatattgtgctcacatttataatataatgatttctttcaactgtacggacaaataatacaaaatccaaatacaacgtaacacaatacattataattattctgtaatcaactctcggttcagcttaaacggagctaagtgttccaaaaacacaacccacagtgcttaattcttctctcgctgcatcacacctctaattttcttttcatgttattaacaaaatttatcatctccatatatgatttgacatgtagcaaagcggtagcgctgcggcgatcgtgatcaccttatgcctcaaacacgacgctttgtcacgcgtgcaaaaggcaaatgtgcatacgtgcattgtgcagcgggccaaaaagggaactttggatgctttatttattagcaaataatagatttgatgatttaaataatatccactggttttaatgtaagtgtaaattagttgatatagattttaaattgttaatttaatgggtacacaatataatgtcatagactgtattttgaaacaatgcattatttgagaatgatagtccaatgtaataaaaaatagatccaatgatttaaataatgggttcatcggtttaagtgcacgtataaattagttaatatagatcttaaattatttatttgataggtacacaatataattgtgtaaactttattttaaaatagtgtattatttgaaaataatagtacaaagtaatgagtacgacggtttaattaagtggaaattatcttactccctccggtttcattctaattgaagttttggataataacacggtctacaaaatatatctttgaccttatttttctattataatatatacgataaataaatatatgtttctattataatatataagataaataaatatatgtttacttttattatagtgctttgagagataaatctatatatgttgttctagttcctttaaactaaatatttttaaagttattgatagtcaaggttataaaagtttgacctcaaccttgtccaaaaggtcaattattatagaaccggagggagtacattattaatttaatgggtaacatataatggtgtaaattttattttcaataactgtaaagctaatttagttacatgtgagttgtttgatggtagattctttgttagtaaaattatgattatttaaaaaatatatatccattatatgtttggcaacggttgaaaaaaaaagaagggatggaatgtacgtacatatacctacacatgtgcggagaagaggagaggtgggnccccatagtatttagtttgtttattcttagaatttctatgattttctctaatttattagagcgtcacgtggcggcttgagagcatttgtaggaagtttaatggacttttagtatacctacacatgcccgggagaagaggagaggtgggaccccatagtatttggtttgcttattcttagaatttttaggattttctctaatttattagagtatcacgtggcggcttgagagcatttgtagaaaatttaataaacttttagtatataatagatatatagatatattttattttttaaaaaaatataggaaatcctgtcgattttctttccaatgatggtattacgtacatatgtttctttgactttattttcttctgtatattgtataagtacatgtatatggttttttttttcttgcggcacagtaggccagctttatttttttttcctttgaatcgtacttagtacaaacagttatatatttcttgtgtgggaggaaggtattatttttttaataacagatctaatataatggtcaaaaatataggggccaccaatttaagtgaaaatcgacggtgagattagatagtgccatgtggcggtctaggagtgtttgtaggagtgccacatggcggctttagagcgtttgtaggaagtttaatggacttttagtatataataactaagaaggtagtccgcgcattcgcgcgggcatgtatcataggctgcatttgagatacctataagtaataggctgattgtgttaaaatgtcgtatttgttatatagcaaactatatataggcatatggatcttatatcgttggtttggttataaacatatcaatagttaaagattagaaatcagacgtgaaacttataattatagattatttatctttagttaaataggaacgtgagaggaatgaaaagcgtagagcttgagacagagaggggaaggagtgggtgtgtagtgatgggcgcatatggagcggatttttttttgtattttttctaagtaatttaagtgaaagcaaattatcatatgttaatttcctactatttgcaagttttttttcaagatgtgacatgtcactgatttgatagatttttttttctaaaagtagatttgatagttgaaaataatattaataggtcatcgatctaagcaaaaactgttgggtagatgttttattttttctttgaatttataagttttactaatttttaaaatgtgatacttggtagtttagcatggctctaaaaggtcatacatggtgactttgtatttttctaatttttattatgtacaatgattaagatgacataatacatgttgtcacttttttaatgtttcagtgttgtttgcttgttggtctatgttcaaattacgtattttaaattttacatagtaaaatatgagcaataaaatcaacagtgtaaataaattaaaaatcggatgttatctgggttgtcatgtaaagaatagatggcagttcaaataacatattttattttatagtaaaatattggtaatattgattttaaattatttagctgtctaattatgaaacaaccgttcaaataaactaaataaaaacatatatactacctctgtttcatattataagtcatttgtcattttgactttttcttgtcatttttttacgtttgaccaagtttatagaaaaatatagtaaaattttacaaaaaaaaacatattatggatatatattgaatgttatatctaacaaaataattttgtgtgatagatgttgttaaattttttatatgtattggtcaaacctaaagaattttaattaagaaaaaagttaaaaggacttataatatgaaatagagggagtaactttttagaattatgattattttgctatgtaactattatcttttttctaaattgttagttaaaaatagatttgttatttataaaagcatgcatctaatcattaatattttatatatttaggcatgggacacgcaatcaagagtccacagccattctcgtgagatagaagtgtagaaattaattattaagtaataaaagaaaaatcttaactaccatacataaaaaaaggaaagagatgaggagaaggagacgagaacttacgtaaggtagtaattgaggaaggatatttttttatgagataaatctaattggcccatcagtttaaattatatattttttctaatttattagagtgccacgtggcggcttagaagctgacggagctcgtggctcctcaccgggagaccgcgcaggcccccctttgccagttcggccgggggcttagggtgagatctcaagctctctctgtatgtggaaagattgcgtgcccggaagaaacgcgagacacggacgatgtatacaggttcgggccgctgggaagcgtaataccctactcctgtgttttggtggatttgtgtgtggaggagctacaaagtctgagccgacctatcccttgttctaggctctaaatctggaaaaaatcaatcctcccttccctatgggcaaggtcctccttttatactttaaggggataccacatgcactcttccctttccaaactggacttttcttctttacataaatggacggagatttgcacggttgccctccgaacgtccttctgatgggacggcacatacctacctccacttctgccgggggcaggcgcgtcgtgggaacgtggctgtgagctgacgacatgagcagtgtcagaccggtcacaaatcggtcatccttgtccaccgcgtgtcagcttagcaacgtgcatgtttgcccttcttcacacaacatcttgcctgtaatggttaggatgaagcctggtattcatctaaccagggctaacgtgtcatctctaagaggtaacacgctagctccggctggagacgcgtgcctagaggctctcgtcttgacgggacggggcgaggcgtgcgtcagaccgccagtcgccacctaaccgttgatctgaccggtctgtgactggtcacagaccggataaaagagcgcgctgcattgcgctgcatgcagcgtgacacgcttgaccagaccgcaataaatgcggttaggtgagccctaccgtgttcacccaacctatgtacatagtgcaaaccccacaaggggtcggggcacctcggccctcggggccggggcaggagcaacccgacccccccctcggggaaatcaggaggagggcggacacctcaccctcgggcccgacgtccccgaaggtgccaggccacgtgggcgattccatctgcctcaagcctccgggcgcaatactcccggtcccatatcaccgacagtagcccccggcgttatgtcagggcgatcatccttctcaagggaagcggtcgggcatgacgccactcataaagcctggtgacaggtgggaccggtctccgtgattgggcagaaacccaacggtctcaaaccacgcatatcggtaacggtgccatggccgtcagtcatgggcggtctcttcaagactgccgcatcacttgagcagcgctcgaatctaggcgtgcagattcgtttcgtctggagatatggtaacgtcgcttcggtcggcgagcgtaattaacgcgcacacgatacgatctatctcgactgccacaaccgcatatccacctcatgcgccgcaagcaggcgaatggaattagtggaagcgtgggcgcgagaaacgagggaacgagatagcgagtaacgagggagcgagatagtgggcacgagaaacgaggagccgggctcagcgatgggaagggtataaagccatcaaggaaaggacttgctcccttcctttcgccactattcccctttccttcgccgtttgcgccctaaactcactctttgctacgcctcaccttcgccacacacactcgttctcaaccctttctttctccgacgacatggcacggggctccgctctgctcgacggtagcgtactaccgccttcccgcattgtgagcgagaggcaggctgggctgccgcgccgcttcatgccggaatccgccaccggccgggagatagtgatgctgggcgaggcgcgcccagcaccagattacccggggcggtccatcttcttcctccccttcgcgatggccgggttggttcctcctttttcttctttctttatggatgttctggagttctacgatctccagatggcgcacctcacccccaacgcagtgatgactttggccatcttcgcgcacctgtgcgagatgttcattggggtgcgcccatctcttcggctgttccggtggttcttcaccgtgcagtcggtgtcgccgccgtcggtggtcggtggttgctacttccagccgcgggggccggtgttgaaccgctacatcccctgcgcccttcgcaagaagtgggacgattggaagagcgactggttctacaccccccttgccaacgaagcgtgcctccgactcccaagccagcccccggcgccggtctccagctggcgggcgccagtagatctgggggatgactatgacgccgtcctcgaccgcctggcgggcctgcgatctcaggggctcacaggggccatggtgtacggcgactacctccgtcgccggattgcgccgcttcagcggcgcgcccggagcgcatgggagtacaccgggtccgaggactacatgaggacccactggggagtcagatgggattgggctcccgatgacttcaagatcgtggtccaaagggtgctgaatctcagctccgtggaggcgtctcttattcctcaaggactcctccccctctgttgcgatccagaccgcgcctccattctgaccatcatgatgggggtcggggcctcagaggaggtggctcctaagggccacgacggcgccggcgggagccgccaggaagaatcaaccccaggagggggccgtgcttctgggccccgcgacgggggctcgggaagcaaccgccctgccgccgcccgggggaagaggaaacagggaggaacaccccccccatctcctccccgagggggcggggcggtgcgtgccagcagcaggcgcccggagggggccgtgccgacatcacagcccgagacggaacgcaagaagaagcggctccgcaagacgggggagacggaaccatcccggggaaacctgatttcccctccaaggtggtcgttcaaccgaccccctcgcaggttcgtttcacgcctttcacaaccatcttccctttatcccaatcagcaagttttctcttatccatcttgtttgtcttccggttttttcttctgcttcagcgatgtcccgtcgcgttcctcccgccatcccaagtccggccaatccgaggccgaagatccggcggccgcagaggaacggaggcgagaatctgaccggcgagaggccgcagatcgccttcgggaagctgaagaggccgcccgggaggccgctcgggttcggcaggcggaggataccgctcgggaggaggccgcccgggctcgccaagccgaagaagctgctcgggaggaggccgcccaggctcgtcaggctgaagaagccattcgggaggtaaccgcccgggctcgccaggctgaggcgatggcgtcttccgaggcggttcacgacaagaccgccggcgcgtcgctcgggcccactccctcgggtgacgctcaggcgacaacctccggggcggctcgcgacaaggccgcgggcgcatctcctgggcccgctccctcgggcgacgcccaggaccaagcgggtccgggggacatccccgagctcagtgcgtcttctggcgggccgagccgcgtcgcattttctccaaggcggctcttctcctcgtcttctgccgccccgctgagtgccgagccccttctgcaagccttggccgccgcaaacaccgcggtgctagatggattcagcgcccaggtggaggccttgcgagcggaacgagcggagctcgaggccgcatgagcgcgcgtcgaggaggggcggcgctcggtggacgccatggtggaggtgggccgtaaggctcaccgccgccacatctcggagcttgaagcccgcaaggcggcgctggcggagatcgcccgagaggtggaggaggagcgagaggccgccctcatcgccaccaccgcgatgattgaggcgcaggactccctccgccttcaacacgggagctgggaggcggagctaaagaaaaaactcgacgccgcccagggggtccttgacgccgccgctgcccgagagcagcgagcaacggaggctgaagcggcatcccgacggcgcgaagaggcccttgaggcccgtgccatggtgctggaagatcatgccggcgccgtggagaccagcttggcggaccgcgaggccgccgccgctatccgggaggcgacgctggcggcgcacgaggccgcctgcgccgaagaggagtccgcgctccggctccgcgaggacgcgcttgctgagcgggagcgagctcttgaggagtccgaggccgcgacacaatggctggcggacagcctgtccctccgcgaggcagcgcaggaggagcaggcgcgccgcaatctggaatgcgtccgcgccgagagagccgcgctggagcagcgggctgctaacctcgaggcgcgagaaaaggagctggacgcgagggagcgcagcggcggggcggctacgggcgaaagcgacttagtcgcccgcctcgcagctgccgaacacaccgtcgcagacatgcagcgcgccctggactcatccaccggggaagccgaggccctccgcttggcgggcgaaatagggcccggcatgctttgggatgcggtctcccggctggatcgcgccggtcgggaagcgggcctctggaaaggccagacaatttcgcgctccaccaatctggaaggcctcgccccgcaccttaggaggatggcctgggctgtccaacaactccccgaggagctcgagaagaccatcaagtcatcctcgagggacctcgcccaaggagcggtggaactcgtgttagcgagttaccaggccagggaccccggcttctccccatggacggcgctggaggagttccctcccgggaccgaggacgatgcgcgcgcgcgggtccgggatgccgccaaccacatcgtccaaagcttcgaggggtcggcccctcggctcgcgttcgcccccagctccgacgaggagggcgacgccagcggtgaggacgacggtggcgacgaggccggcgacccgggcacattggaatgagcccccaggcccccgccaatctccaattttttctttttctttcttctttttgtatagatcaacttaatctgcaatcaaaaatgatgaaaaatttcttatgttaactttattttgctatgcatatgagttgaggatgatttgtgccgtggtccttttgcattttagcttgatttaagggctcgtgctcaagtcccgatcctcaaatggctcgggtcggggctagtgcctggggagatccacatgtcgagactggccgggccgggaacatggtgaccgagggttatgggtgacccgattgtgggtttttgccgattcccccccggagttcaccacgccccggggcacggctcggttctgggccccgcttggcgattttagctgaccgaaccgagcccccgagggcaaggttgagcacgagtgaccttatttcaagttaagattcttcagaaaaaaacggcacagatcatcctttaggaaattgaaactgcttttattgaaatgctgaaataagaaaagtaaggctgtgcatgtgtggtagcccccggctaaccctgcacacccgaggggggtgcagggttagcccgagcccgaaacctgacacccgaccccccccctcaggggtagaagcgacgaaggtgttcgatgttccacgggtttggcagttcagtgccgtcgcccgtggccagccgtacggagcccggccgggggacgccgatcactcgatacggaccctcccacattggtgagagcttgctcagtccagcacgcgtttgaacgcggcgtaggacgaggtcgtcgacgcagagtgatcgggcccggacgtggcgctgatggtagcgccgcaggctctgctggtagcgcgcggctcggagggccgcgcgccgccctcgctcttccaagtagtcgaggtcatctctacgaagctgatcttgatcagcctcgcagtacatggtggcccgaggagacctcagggtgagctcggatgggagaaccgcttctgcgccgtagacgaggaagaaaggcgtttccccggtcgctcggcttggtgtggttcggtttgcccagagcaccgctggtaactcctcgatccataaatcgccgtgcttcttgagaatattgaaggtcttggttttaaggcctttgaggatttctgcattggcgcgctccacttggccattgcttctgggatgagcaggcgaggcgaagcagagtttgatgcccatgtcttcgcagtagttgccgaagagttcactagtgaattgggtgccattatccgtaataatacggttaggcactccaaaacgggccgtgatgcccttaatgaatttaagagcagagtgcttatcgatcttgacaaccggataagcctcgggccacttagtgaacttgtcgatcgcaacatacagatactcaaacccgcccggggcccgtttgaacggtcccaggatatcaagcccccagacagcaaatggccatgacaggggtatgatctgcagggcctgggccggctgatggatttgcttggcgtggaactgacacgctctgcatcgccggaccagatcgactgcatcattgagagctgtcggccaataaaatccttgacgaaaggccttgccaaccagggtacgcgaggcggaatgggctccgcactcgccttcatggatgtcagcaagaagctcaacgccttgttcctgaggaatgcacttcaggaggattccgttagccgcgcgccgatagagggtcccttctaccaacacgtagcgtttggaaatgcgttgtacgcgttcactcccttcgcggtcctcaggtagagtcttatctgtgaggtatgtttggatcttagagatccaagcaatcaatctaagggagcttggagcgctcccttcgggtcccgaggcctggactccaacgggcctcgggggccggtcaggcgcatccgtctcccctaaggggtcgggtcgcgccgacggctgggtaagcctttcttcaaaggcgcccggtggggtctgggctcgcgaggacgcgagccgtgagagttcgtcggctatcatgttatcccgtctgggcacatgccgaagctctatcccgtcaaaatggcgctccatacgccgcacttggcgtacataggcgtccatttgcgggtcagagcaccggtactccttacagacctggttaacgaccagctgggaatcgcctaacaccaggagacggcggatccccagtccggctgccaccctgagtccggcaaggagtccctcgtactctgccatattattggtcgctcgaaagtcgaggcggaccagatatctaaggacgtctccggtcggggagatcaacgtgacccccgcaccggcaccctggagggacagagaaccatcgaactgcatcacccagtgggtggtgtgaggcagctgcgaggggttcgtgctggcctcggggattgagacggtctctggagccggggtccactctgccacaaaatcggcgagggcctggctcttgatagcgtggcgtggttcaaagtgcagatcgaactcagaaagctcgattgcccattttaccacccgtcctgtaccctctcgattatgcaagatttgaccgagggggtaagacgtaaccacagtgaccctatgtgcctgaaaataatggcgcagtttccttgaggccatcagaatagcgtaaagcatcttctgggcctgagggtatcgggtcttagcgtcccggagggcctcactaacaaagtagacaggccgctgcacccttcggtggggccgatcctctctgctaggggccgtatccccggggcgttcttcgttcaagtggcctttcggggcgcacttgtcttctgtgccgatgacctcggggtcggaggatgaaaggggcggccttccctcagtggcctcggggccgtcctgagggtcgggggctcctggcatcgtcggacaagcgggcaaagggccaactccggtcgtcaggggcctctggcctccgttcggctcgggggcctcttctccctgctctttcccgggtcgagtcagcacagggttagcctcggggtcagaaggcgttaagtgcggccttcccgcagtggccttggggccctcctgagggtcgggggcacctagcaccgtctgacaagcgggcagaggtccgactccggtcgtctggggccgtaggccaccgtccgactcgggggcctatgctccccgctcgctcccgggccaagttagcacagaatgggggtgcacgaaatgaggattgtcttcatcgcgctccacaaccaacgctgcactaactacttggggggtcgccgctaagtaaagtagcaggggctcatttggctccggggcgactagaaccgggggagagctgagatatgcctttaactgagtaagggcatgttcagcttcctccgtccaagtaaacggccccgagcgcttgaggagcttaaacaagggtagcgccttctctcccagccttgatatgaaacgacttagggcggccatgcaaccggtaacgcattgcacatccctaagtttgctgggggggcgcatccgctcgatagctcgaatcttctcggggttggcctcaatgcctcgggcagagaccaagaacccgagaagcttgcccgcaggtacaccaaacacacacttatcagggttcagctttatgcgggcggagcggaggttctcaaaagtttccgctagatctgaaagtaaagtttcttggttgcgcgtttttacaaccaagtcatcaacataagcctcaacattacgtcctatttggctacccaaagaaattcgagtagtacgttgaaaagtaggacctgcattctttaacccgaagggcattgatgtataacaataggttcctacgggggtaatgaacgcagttttttcctcatcctccctagccatgcgaatctgatggtaaccagagtatgcatctagaaaacacaaaaggtcgcaccccgcagtggagtcgacgatctgatctatgcgaggcagggggtaaggatccttagggcatgccttgttaaggtcggtgtagtcgatgcacatccgaagcttgccgttcgccttgggaacgaccaccgggttcgccagccactccggatggatgacttcacggatgaatccggcctccagaagtctcaccacctcctcgcggatgaaggcttgacgttccggggcctgccgccgcactttctgccggaccggccttgcgcccggtcgcacggcgagacggcgctcaatcacctccctggggaccccgggcatgtccgctggtctccatgcgaagacgtcagcgtttgcccgcaggaaggagacgagcgcgtcttcctatttgccatccagaagaccaccgatccgtgtggtcttggatgggccgtcgcccaaggcaacctccttgaccgggacctcgtcgcatgtggcaatccgctgcctcggggcggtgggggcggaggtgccaagcctctcgtcaccaccctcgggcttggtcgcagcagcgaggtggtccgcgcgctgctccatgcaagcgagcgcgactttaaggtcgccacggacaaagatggggccaccggggcccggcatcttcatctggaggtaggcgtagtggaccgccgccatgaacttcaccaacgcgggtctccccaggaccgcgttgtagggcagactgaggtccgccacatcgaagttcacccgctccgtgcggaagttggctgatccaccaaaggtgaccggtaggtcgatgtgacctaacggccatgtgtgccccggcgtcacaccgatgatcggatgagacggctggagcaccatccccggggccttgatagcatcaaaggccgcgggggaaaggatgttgagagccgctcctccatctatgaggacacgccccaacttcacattgcagatagtgggggaaaccaccatcgcaatctgccctccccgggcgacgcacggtgggtggtcggtctggtcaaaggtgagggccacctccgaccaccgcgcccgacgcgtggcctcatgagtaggggccgcggcgagaagctctcgcctcatggccttaaaactccggcgagaaacgtgagcacacgctcccccgtcgacagtggcaatggtggccccaggttcctggaaacctaggtcatcatcaccgtcatcgacgtcaacggcgggggccttctgtttggcctcacttcgccgtttaccggagggaactgccgcggacttgccctcacggcgttcctgcctcctgtcctcctcccacttcctcgttcgctcagccaagtttttgactgcgcgacagtccgcgagatcgtggagggaggtgttgtggacggagcaccacttgctggctgggcgctcccggctgggagtaccagcctctttctttttgtcgctcgcaggcctcccctttcgggtggcccgcggagcgccctcgacggcgaggacgtgaccctcgtcgccggaatggaccgaccttttcttcctcctcctgtcacgccgccctgtctgagcggcggatccgggggcggccgaagctgccacaccggaaccggaggggttccaggtccaggcctcctccttacgagccactcggtccgcgagctgaaaaagctctgcggtagtctggggctctttggaggcaatcttttcgagcatgcggttgtgccgcacaccccccctgaacgcgtagatcactgcgtgtgcagggatgcaaggtatagtattgcggacttggcagaaacgctgaatgtacgagcgaagggattcatcatcccctcgctgtactgcgtgcaagtccgcttcttcacctgggcgtggataagtgccttgaaagttcatggtgaactgctggcacagatcctcccaggagtggaccgacgcgggtggcaggttcattagccaaccccgtgcctgtcccttcagggccatgggaaagaaattcgccatgaccctgtcgtctcccccagcggcctcgatcccggtcgtatagacctggagaaactcggtggggttgacgctcccatcatacttctcggtgatggtgggccggaaccttgggggccaacggacattccgaagactcgccacaaaggctctacagccgataccaccagccgggggcacggagggctggtcctcacgtccatgtcgaggtgacactctggacgaggaggcgccctccgttgcacggggagtacgccggctattacgccggcgctcgatgttgaggcgggcatccggctccccatgctgatcctcccgagtcgaaggtgtcgacgagggagtggcagccgaatgccgtgcagccgccgccgctcgccgcgccctccgccttgatgacacggaaccggtggtggcggcgccggaggtcttggtggtggcggaccgtccaccagcacccaggcgctgctgggccgtcatgaccaagttggccacgtcgtccagccatcgctgagctggagactcagggtcatggacgacgggcgggtgacgtaggagcgcgccagcagcctgaagcgcgccctgaggcgtgctgccgtcgccgtagacgaggaggcgacgctccccatctcgccgttctcctgcatcacccgcgaccggtgatgctgcggatttatcaaccctctcgagcgcctccccctgcttaggactttggtgtggaggtgggggagtacgagctcgacggcgtgggtttggctccccgtcgtcgccgctcacactcggagagaggtcgtgcgcctttgcttgctcggccattaggcagaacaagggaaacttggcgcacacggaagagtatgagagctcagaaaacacacgctgagccccctacctggcgcgccagatgacggagctcgtggctcctcaccgggagaccgcgcaggcccccctttgccagttcggccgggggcttagggtgagatctcaagctctctctgtatgtggaaagattgcgtgcccggaagaaacgcgagacacggacgatgtatacaggttcgggccgctgggaagcgtaataccctactcctgtgttttggtggatttgtgtgtggaggagctacaaagtctgagccgacctatcccttgttctaggctctaaatctggaaaaaatcaatcctcccttccctatgggcaaggtcctccttttatactttaaggggataccacatgcactcttccctttccaaactggacttttcttctttacataaatggacggagatttgcacggttgccctccgaacgtccttctgatgggacggcacatacctacctccacttctgccgggggcaggcgcgtcgtgggaacgtggctgtgagctgacgacatgagcagtgtcagaccggtcacaaatcggtcatccttgtccaccgcgtgtcag

SEQ ID NO: 10133 - DNA, 40092 bp, Oryza sativa
  unsure (1)..(40092): unsure at all n locations
acctagacacataaatcatgagttatttgtgaagaaaaaacaattataaaccctaaatcacgactgattacatttacaccagtaacaaatcacacatagctgcagactctgtaacaaagaacacacccccaacctacctgaatccttactagtaggaaactaaaccaagcgggaaccacaaaccatcgcaatcacaaacctacacagatttgcttcagaaaataaatcaagccgtaattccaccgcaacttgctcccaactcctaaagcctaacccacacccacacccactgcccaccaaagtgctcctaccaacaaacacctactcgcagcaaaccaaaaaccaaaccaaaccagatactagtaaaagaacagaacaagataacttcacaagaacaccacccaaaaaaatgaaaggcgtcgtggggaggaactcacagctccgttcgcggcgtaggtggtgagcgtgaacttctggtccgtgtggtaatccctatacaggagatctgcaaatcccaccagaaaaaaaaaacaaccagcgtcagcaaacacccaagaaaccaagaaacaaccccaagcaaaagggcaacaaaatcacaaaaccccaaccacaaaaacaccccacaaaaagaaccagcaacgacgcagcatccccgaacctctagccttcttgccgatgtcggagtagagcccggggcccgcggggggagcagcggcggccatggcgagaggaggaggaggcggcggcggctgcggcgagaagcgaggagaggaaaaatgggagaaggggatttgatttgggggtgaagcggagtggaggagagagctggtatttatcggcgggcggacggcccagatctgcgctcgcggggctctcggctcgcctgcgccgtcggatgggcttatcctggccctttttcttggggaggaagaagatgccaaaaatgatttaatttgcttaatttaattgttgcgcagggtgaacttttgggactgttcactttgatgtaaaaaaaaccttaccaaattttagcaatatagttgtcaaattttgataacttgctaaaattttagtaggatttctataagtattaaaatatggtaacaaactaaatgcagccatttttttataactttattaaaatttggtaaggttgaaaatggtatcaaaattgatgtgagatgtgaggtgagggcgccgtgttcttggagagaagggttttgcgtgattggtgaatagcgacaggatttttgccttctttcttgagtaaaaagatggtgccatgttttatttttaccgccgtgaaattatttttaccgaggtttgaggccttgagcgggacaagatcagtactaatttatctgggcactagtaatcgtgcacgtgcaatacacgtttttcataaaatatatcatagggatacattgaaagtttggaaactatatctaccaaaaataatttattcaaccaacatttataaaatatatatcctgtgtaattgtaaaaaagatataaccaacataatcggtacttgtaattatgggtatgatctgtctgttttgtacgaattttgataggagggaacaaaatagaactgaagccagaggctatacaaagttacaaactaacaaaaaaacagctctctcttcgagagaactataccagccttttttctctgtagctggtccactgcttgatctcataaaaaagaatttgtcgacaattcgctgaattgaccatccctctttctcgaagtttctattgtttcgttccgtccaaattccccagcagaccagcaagaagagggtcctgagcccttttctttgcatcttttctgatgaagtcttgtgacaccaccattccaatacnnnnnnnnnnnnnnnnnnnnnnnnnnngaaacttcagttaagcacaggcttattcctgtccggatggcttgaaactaatctactcttcatgaacaaatgatgagatgtctcaaggtttgatgcatagaggacaaaactaattgtttggccagccttaagttataaacagcaacagtccataggcgattctaagctaggagacaagcaaaagattaatttgcacctcaaagtcaaaggggcctgacttccaaacaggttgcatcaaatctgatctgatcaataccttagaatcaaattgccatgtatgctggctttgccatgtagaattgtagatgcctaattctgaccatcgccatgagttcctttggtgagtgtcaccccttctagcaagcagcgtcaaatcccaaaatattccgttaagaaccccattgataggtcatgccaaacatcatctatccaatgttgtttcaaaaatgcatgaataatgattgccctgttgtttttaaactgcacgaaaagtgtagcattatatgcagttgtaacaatgttgagtgtttctaaaaacatggtttaccagtgattcggaattggcaaagtcctgacatgtaaacaaaatacaaaggacacgaaattaccagtgatttcacccattattaaattccttatgttaaatatactatctttttataagcaaatatgcatgttgaaatcactaaaatgcagatccagaccccaaattatactataatgttgacaggcaacaccacagcgaaataataaagcttcaattagaaatcaacaaatcaagaaaaaagagtcaatatggatcaaagatatagtaggagcagtacagtaccttgtcctggcacatgcatatggagcgttagatccccctatgccaatgatgtgtgtaaactacgggaaatggaatagatggcatagcatactacgcaccagatgacattcaccataatgatggcaatggtaagtttccttttataaggcactgctcaggccaacttaagcagttgtacctggatcatcattgtcttcagcaatgttattacaactaaaaaagaaagggtgtcagaaatcgaagtcattttatagataacccaggatgctaattaatgtagtctaatacagggttcaatatttctttttcggggtttatattggagggtgccgatataccgacattttggaaactttgaacaagatattaccaaattcacaaaaaaatgaaaataaattaaaatttcggccgaaataatatcatagggggggtccgataggaccaaaacttctgaaattttggaaatttcgttcccgaattttgaaccctggtctaatattggttatcttaacaaagttacttcagcattgcagaaagttaacacacatatatatatatcaataatgaagtaatcattccaagaccgaatcatcggtgccattgttcaaatatagagatggcgtacatagagtttatacagtacaaagtgattgccagatgatcaaaatccataaaacctggttgaaaatttatattagtatgtaggtgagtactcttggcagattgtttttttatcaaacatctattgatctaattaatcaaaaatatgaaatcccaagaacacttatccttcaatgccacgtataacctatagacataaaaaaaaattctcaaggcaccagtcaccactgctaataacataaaagcaatgtaatggaatgttcttaccagcaaatcattacattatagatgcatggcctgcagaaatgagcattaataacattgttacgggaaaaagaaatagcagcacaatcttgtataatcagtaacataccaaagtaatgagagagagaaaagaaaaaatatcgacataaaggagagacttacctgatttttctatattattgacgacaagatctgtagacaaatggtaactttagtttgtatgcttgtggaaatcagatactaaactgcaaaaagaagatttttttttggtagacaaacttaccttgcctgtattcatcagtgcattctagcgcttgcatcgtccgcaattgctggtgcagaggggttcggctgaccagggcggcatagtgggagatcccgacgatggcagggagagccggctgtgggctcggaggggatcgacaaccggcggctgggctgcggagggcatgagagcaggcagaggggatgcggcggatgcatcaactgcgggtggcggcggcggcacccatgccctccactgcatcggggtatcaccaagtgagtcccctcgcgatgcggcggcagcggctaccgtggaagtgaatggcgacctgcagcaaagccgacgatggctgggggatgcgcgcagtggttggaggatgcgtcatcgggaggaataggcggcagtgttgttatcgcgagaggatggcgcggcgccggggactgcgtgatgcagcgattgggtggcgccactgtggggtcagcgcgttcgctggtggggattcagcgattcatagctagccctgggcgttctgagccgttggatgagatggacgggtgagatgatatggggtgatttggcctgtagcattggaggggggcaactcctcctttctatattagtatagatatatacaagcaaaagatgcaggtttgtccaatacatgctgtaattacgaaattatgcagtgcaagaaaaatgaaactgtgcatgttatagttctaaacttctagagcatcgaattgggaaatgaaattgtaggccacaatattaggtgaatattcagttatgatctacaggttgggtactaaaagttttactgaggtttagttatggattgacaaaatagcccacaagatttagttatggaattcatgctctttcttctttttgaccactgctcatcgattcacaattaactaatatctccaagatgagtagataaatgctagcaagggtactacaaacctctaaccgaagctaccctttcaaagtattgaccgtctgcaattatgcctgtgagaaggaaatctgccattctctacaacgaattcagataggaaaatatatgcataacaatattggttacctccaattcttccatgtccatctgttccttacctcacatatttggaaaagctaatacaacaatttgttagtcatatacacaaaaatacccctatataggaaaatgttgtgtaatcaaaagttgttttgtgattcgagatgacgaacctttgattggccaagagcatttcgtgactgagcactcgcatcttgtatcccaaaactgaaaggattatgctgttgatgcgcctacttcttccagcttgcagcgccaaacccaaatctgttgggctttgcctgctgttgttgctgttcttggtgagggctccgtaattgcaactgcacggtaaattagaaacaggcatagcaaataaaaaactaacagcgaattcctctgtagcaatcggaattaaaaactggtggccaaacgatggcaaaccaaagctttgaatgaatttcatcataaatagtcattaaaacacatctatgtatttgaagtgaatacattttcagcaataaaagttgatttgtagagaaatacaaatttacagcaagaatcaatgctgtcaggcatggaagagaattgagttagatcacagtatcttattgacggaactaaattgaaggcaattttctgtcaaccactaatcacctgcgcaactgagttatttatatattacaatacaaaattatcaagtgccaacctgcagaaagacacgttaatgcgtcacacacctatgtctaactgcatatccatgaaaatcaaggaagtccagtagaaagctacttttacacactcacagagtgtgagtaaaaccaaaggcaaaggttattagtagaatacctcaagaaccactgatctgctcattttgaaagaaccactgatctgctcattttgaaagaaccacagactattaacttgaagcacatgaatcacagtaaggaagaactattgaccgagaggtcagttgcgttcacaggggaaaaaaatatgaaatcaacctataggagcataacctcatatatgtcacctggaaaaatggaatgttcaagccaatcaatcaagctagatccagaaaatgaaataactgaaaatatgcaccaggagcttaggagccttctttgctatttggttcctcctaattactgaagcctacatatgtcactgcattcacattggcatctgctaagatacgctacattctttgagtgtaagaaggatggctggcgatggcggcgcgcggcttggacgaccggccgtgatgacagctgggcagcgaagggcaggggtcggcggcggctacccgaccgaggaggtgcaggcagctagtggaaggccggtgggagagaagatcacgtggctgtggtgggagcggaggcgagatccagaggcatttgcggcggggcgacagcgagtctcgatctgtggcggcgcgacggcgaccgcacgaccccgccgaaactcctgctcccggacggcacggaggcgggggcccaggcggcggtagagggaggcactgactgcgtcggcgaagacgggagcggcggaagcagcgacaggagccgatgcggtagcagcggagggaggcacaacgcgaagtgggaatgaggcggcgatgatggtggcggcggcggcggatggggcctccctcggcgctggccgcggcagatggtaggatccggcggcggcagaaggggacctcggctccggcgaggatgcggcggcgcggcggcagtaatccggagcgagcgagcgagcgaggaggaggagcgccggccgcgacggatggtaggatccggcagcggcggaaggggacctcggctccggcggcggacggagaagaaggcggcttcggcgaggatgcagcggcgtggcggcagtacagaggagcgagcgaggacgccgaggaggaggaggagcgaagtctccgcgcgtgaatggagagtagtcttcgcggcagtactcaatcgtgcggtggagacctcttgcgcgcggatggacggtacagattaatccggatgattttacctataagattagagaggagcaactcctcctttttatattagtatagattagtattagtattagtatagatattaggaataagcaaggtaataattgatcacataatctggcatatttggttaattgatcgcaaactagtcatactaccaaaaaactttatacatgatgatcaataatggtatcagcacattttatatttcccttttattttatgttctgggaatcaaattaaggtcatcatgcactatggcgagacacacgacacgagagcatccatacaaaaactataaaaacaacgagagtcaacgtctgaacagcgacgatttttattcccaacttaccgtgcaagttgaaaagtttggttttaaaaatttctacaaacttttcgtaatcgagcggggccgcaaccaggccgtcattgagaaatgaggaattttgcttgcgtgacgagcccatggcatgccatccttgggcttgcgatagcgcggcccagccgccgccgtgacctgacgatggcttacctcgccgtcgaatcgcccatcagacggcgagcggccacacgccggtgtcgcgggacctggggacggacggtggtgaccgacatgtcttatgcgggactcgatttcgccttgaatccttggcctccttttgaacacaatgccggaattttctagagattttgtagaattttactcctatctcaaaatgtagtaacaatctaaaatcgaattaaagttatacaaatctgaacaaatatcccatgcaattcttgtgcaaattcatgaaactaagatgtgtctaatccaattctagattgttactatattttggcccttttgaacacaaggccggaattttgccgagatttcttagaattctacttcctccatcttaaaaatatagcaatctaaaattgaattaaacatttcatatagttatactaatctgaacaaaattcttgtacagattcatagtactagaatatgtctaatctgatcctagattgttatattttgagacgaaggtagtacataattttcacaggattcaggaacatgacatccatctcacattcacagtgcaggcaaaacaactggagcgctcgacatgaaaaggaggccaagaaaagcagtaaacaaacagggtgtcatggaatggcacaactcgctagtcagttataagaagaaaacgcagaagagatgtccaaatgggataagattgttcaatccaacaagttctctctaacatcagcagctctcttgctcaacaaaagcagggtgtctcggggaggcagggaaatcaaaagcaaaccggaaacgcttcagctatacatgaacatggcagaggaaaggacgcaaaaaccctatagaaataagtcaaatcgcaccagatacaaaccacaacaaagcagctggttcactgtcacggatggggagaacatcttttttacatcggaagcaaaacaattggatcaaactgcagacgccatcatcgtcgtcatccacccgaatgttgcgcaacccaacaggaggatttggtgctcgatcgatgaactcttcagcgtttccattcagctttggcaggtctttctgtagttttttaaaaaataagtggcctgagaaattgtgacaatggctatgcaatgctactacttggtatgtgaaaagaacatctcaaacatacatcgcataaatgtgataaacaaaacaggcaggttttcttgagcccacaagtatgaaatttaaaaatgtttaagaacatgggaaacatcaagctttccaatcagcaaaacaaactaagaattgaggtcactaaattcaacaggaatattgttaagtcacaaggacagctattattgtgaagtcatatatctgttcctttacattctaaacatttggatctcaggtgacattgactgaaggctcactatatctacagatttcggtgaatattttaggactgatatgctcttaacaatcaagctaagctcatgtacatcacaacaaatctagataacaaaagggatagatggtgtcccagcgcccacctatgtgaaataatgaagaaatggatgtttcattttcattatgtaaagcaaaatgagggtgataggaagatattatgcataaaacaggaaattggtttattctatcaactttcttctagattattcaaattcctcttaatatccaaatgcattctgcgtatactggaaggtaaagttaaatgcataataatgttaggcacaatacagatactaatgcaaacaatgaatattcagatatattgtttacaacttaccacttgcgtctcttgatgatagcatagacttgtcagccttcactccctctttgccaccagcatgggttggcctttgtgtacgcggcgagtgcgagttcaacttaccattagaggatgggagggaatggcgcctggtgaagccatttttctccgcagagtcagaactaagtctgggtgaattctgtccccgcagtttcgccttcgcagattgtgttgcagccatgtagctgggaacagcaggcgaattctttgaaccattttctggatactctgtcttggttgagaatgaagacctcctcttgctgcttttaaggctctcagtagaaagaggttcttctttggatctctgttccatatcatttactaaagcattttcttcattgtggatatcttgcagcggcatagtttctaccgtagggtcagcaacagtcagttcagcaactttttcttcagtttcaacttgataagaaggaacctccggttcaggttgaagatcaggtaccaggatatccgtcttagcattttccaacagattaccattctgaggttcttggatctcaggataatttggaacttcttctgcagttcgctgtggtttctcacattggacctcttggcgttcagggatctcagttgcaggagtagatacctttgaagcctcagccatagaattagttaccttcctaaggttacgtttgaccttctcaagttcagttaactgactttcgggcactgaatcagcagtagagctagtgaatttccttgggtttcgccttgatttttcagtttccatggctatgttcgtctgagaggactcaactggtgcagcagaacttctccgagaattgcgcttcaacttccctgactctgtttccattgcataactggccttccttgtgtgtggcttggcatcagtaacagcagctctctttggatgtgaaatgggcctccagacacgacctatggtccatctctccaaccagttgaaggctgaatttggatccctctcatcatattgaaaatggagagcctctaccagaattggtgaagctaaaagctacagcatttatagaaaaaaacaattagcacaaaagaagaaaacatatacatacaggaaacaaaagagtgatatatgcctgtgagtaatgagtataacaggctaatgcatagattcaagattctcatatttgtatcaagccattagaagactaaatttagtataccttacgagcaaatgcatttgaagacaatttctccttccatgcatcccgcttaccactctgcaaaaggggaaagaatcatataactagcatatcttgctaggcgaatctgtcagttttaacaaagcttcccaaacaaactaaaagcgatgaatgcaagcatgcaaaaatatgtgtagcaatgttctatttagcatgattgtagtgctattacttgcttatgttgaaccaggagcattttgatgatagacttgcaatgttttaaaaagtggtaagcggtttcgtgcggtgaccccaccttgtagctcttatacagcataattggctgcttatgtggcttaagtgctaaaaggttggggcacatgttccttgtatgcggccttgtaggcctttttttatataacagtgaaacagattaaaaggaaaggggcatcattatgatgaatacatcaggtactgaatgaaacaggatcagcaagaaatttacccccgactgttgttgaacaagcttccagttgacttgaatggtattagtagaaagtctgacattcctaccacggactagagcttgaaacttcacaatcaaccatgttgcacgaagagttgcaacggcttgcctccttacgagatgcccacgaatcagggcttggagtcttatgattcctttcaacgcacggaatgcccgacgtgcctggaccaataccatgctaaatttaggatgcataattctaaagaagaactttacaaggtattgtcgggttctttagtggattgcagaactacacgacgcaaggaaattttataaaaggcatgcaggatcaaacaggaatcagaaaaaagaaacattaccagatagcctcggaaggcagcttgtgccttgacggccgcttgttcctctctcaacctctcggggtcgttggacgcatcggaaacgacagtattctgcttctccaggtcttgactgacatcgcgcaccaccacttcaccttgtaagctggaattctcacccctcccaacctcctggacagcctcattgttatgaggtgtaacgagcaccggctccgatatcaccggggagctctcaaacccagcatccttcccagcagcagcataccctttgttgttcgagcccttctgcgtatggaaagtaataaatttggttacaacaacagatcccttctatctaactacaattccataactggactccataatcatcaagaaatcggttgcaacaacagtatttgccgcgcaaacaaagaggtgtaaaacataccgataaatctttcgccttggtagagccggacctcgatgacttcttcccgaagagcacggatttgatccacttcgccggagacttccccattggagcctacactgccgcacgcccaagggttcggagcctgcaataccaccgcacatcagctcacagatctacacccaatacccatttttcaaaaattctatctacgaaaaggcccacaagaaacgcaagaagaagcgaaggccagtgttttttttcccagcggaatcaagcctcgtagcaaagcaatcaaaccccgcaagaacaaaactgacggttaaatatctcgcacagaaaactaactccccccgaaatgcagctccaacaaactcaaatccacgcaaccccagctcaaatccgcgcaagaaaaacccaagaaccacgcctacaccgcccagcagacgcagatctagacggcggcggcagactcaccggatctgagaacgagagagtgcagactcaccggagggacgacgaactcaaggaggcagcggcggcccaaaaaccctagctccctctctccctctctctctccctccctcctcccaacactacgcctccattgcagcgagagagaacgcgaagagagtggtagtgtagtgcagtagtagagctcagcgagaagaagaaaaagaaaacagcagcgagagcgctgaagcggataaaacaaattgggccaaaaaaaaaaaagcgagaaaaagggagaggaaaaaaaaaaggcgagtagtgtgacgaactgatgactgagccagcgtgcgggccccaccgcccaacggaaccaccaccacctcgcgtccgtcccagtacgggtaccccgcctgaccaggtgaggctgacccaccttcactgacatgtgggtcccactccccgctcctgagagtgtgacgtgtggggccttgtttgttttttttaatgagtgggtgcggctcgtcggtggggggcgaggtgaacgtggcttgggaaaaaaaatgatggggggaggagtggggccgaagcgaggtggggtccacttgtcagtgggccatgtcgaactttttgtacagctggtgtggtactggagcctttttttttttactgagaaaagcgggaagcctcgtcttttttaaccggctagctgtcaacccgagtccccacccacagtatttgcagggtgggaccacatgtcagcgggcgccgtgcatgcgcctccaatgtcaccgagagattaaagggtatgtgtggtgattaacggcttgaaccgccttttatggcctgattaggaaacggtttgacgctctgctcgttttgaaatggagtcttgtctatgcgattagggtggactgagctcgttgcaagatttatagggttttctgtcaacatatagacagctcctaattaaaaagtcggatcagcttcgtcttgttaattttacaagcaaaatgtttaatttgactcgactcatcactcgtgtactggctcataaataagttccgtcttattcctatcattttattatacataaacgtaataatggtaaagcactaaacctatagctaaaaaattaagcactactctctatcccaaaataagtttatttttcactcatcccacacatacaaatacatagccaaaattactagaatacatctatttttataattccaatgtaattagtatccactttatctattcccaatataattattctttattttaacaaaccgtgacgtaatgattactctaaaaatattttttaaaaaacacaaatgataagagctaaaaatgagcatgttatgatagggaaggagtaattagaaagtgcatatgaaaatgatctcacgagttaaaaacctagtttagctcgtctcattacgtcggatgtttctttgatgctcctgtgtgaaaattgtgcaaatctgttattttctttgaaaaaaataaattcttccgaatatcatatggaatccacttatatttcaagttggaattaatgtttcagcaacgcaaaatgcaccaatctgctttaatttctaagcaagttactccaaactccgggcgacacaaggaccgactacagaactaccggcccatcgctctgcaatctgcatgcatgcatgcagctggccttgactttgccgccctgttagttgcagtagtaatctccgagtccgatactaattgtctagttgatctgaccaccagcgaagcaattatcaatcgcgagaggtaacgtggtgctgaggcgaccgatcttcgttgacagaacggttcttcgttgtatggtgccgtgtgtttttcttgatttgatagagattatatgacttattagccctagcttaaacaaatacattttttttctagcctaccacaaaggcggagctacactataaaaggagatgcccagtaaccaggtattttttttcttttcagttatagttcatttattttcactacatgcatctctcaatgcaaacttacacgtattagcttcaactcgattcaaagtaaaataaaacgaatgagtggtactacctccgttttaggttataagactttctagcattgtccgcattctataagaagtctcttgtaacttgaaacggaggaaatactttttttttttttaagctccgcccctaaccttccaaccgagaaggttcaggtgtgcatgcttgcctccaactccccgccgatcgcgcaacggtggcggccgcgctttaacgccgccgcgcgccgcggtttctcgtacgagagagccgcaagcgcggagttacggtcgaacggcggtggagggggcaaccggcgcgcgcggcacgaccgcacgagcgacgtataaaaatcgcattcactttcaccaccgtcccctgcagcgaaaaacacgcactccattgagcagtgtggttctgtgttgtgcagtcgtagtagtactggactactggtccaccgaacgcaccgccatcaaacgcctcatgtgcttgtttttacatggacagaatggcagccgctagcaacaaaccgaccactactactggcagctaatgggaggtgaattttcttccatgcatggaggaaacattctctcgtttttcatacgttaactacttttaatttacagaaatcgaatttggtatggtatgtttctggtgtaatatgttttatactaatttatcttgtattttttattttttttaatattaaatagatggtatgcaagaaatgagaagatatccattcaggaatgaaaacacttctttacggcaaatggcgatcccatggtagatcaggtagtactttaccagtgtggattgtctgcagtactactgatacagtagcagacattgacgtgtggctccggacccacacgtcaatcaccgctactagtactgccgaggatttgtttccgtaccctgctgctccaatgatccaatcatatgccaacctaactgtgccctcctgtagtagtaaatcgggtacttgaagctgccattgccggccttcaatttcctgccagtacgactactatactcagtatccctgaagatactgctaccgagtactgaagcgggatacttacaaaggccaaagacaaatcaaacgacagcgaaacagggaacttctttggcttcttctgatcgatccacacataaaacataatccactgtccgctgtgatgattcggtgacattcaacggcagaaataatgggatttggtatcggatcgagttctgtctccttcagaaaaccaacgctagatattgctatatatacaatacaagaaggttaggtagctagagcctagagaagactgaaacacatccctgtcattgaactgaagcttcttctacttgaggaatctcatggtagtattataacacgaacctacaaaaaaacatagtgttagtgcttcgctttcgtctcttacataaaaagtgccattagctacacataaaagaccaacacgtaggttaattaattaacaaggtagacaacgcacagcagaaacttgttgctcaatgctcttcctaagaggctaagagttgaaccgtcagtgtcatccagaaacgaataaagtgcgccattgatcgatgctaatatactactactactactatccctttgtttctttaaactttattaatgcgatgtagtatgactttgggtggttgcactggcagattcatccgagcaaaggagctgtcgatcacactatcataaacgataaaaatatgacaagaccggcaagattgatgaggaagacggattgagaagaggacgaatcgaagggatatatggcagggagaaagatgagcagcgaacagcagtgtttgcttttgacaaaggaattaatggatgaagtggacgacgaattgacgatgccgtcgtcctgaatcctgatcccttttcactccccaagttttctgagcttcgtcgtcgtcgccggctgttcatcgatctcagtcggatgaagccttgaacatgatggaatcaacgtgcgatgcatgcgtcgcgtccatctcgatcgtccagaaacagaaacgtgagggcggcaggattggtgtttacgtattcttgtgatggaggcggtttttgttagaaaaaggcgtcggcaacagctaccggttaaccaacggcgaggccacacgaacacatatatgcgtgacagcgtggagtaaaaaacaaatgcgtggtgatccgatcgaatccattcgtgaaagcatatctcgacggccatggaaacaatggaatggcataattaaaggccggtaacaatcacatttcttccaataaatcacgcacatttgcagttaactatggacttgagaaacaaaagaaattgaggttccctctgtattacaaattacaaacccgattcagcacgagggttaaagtttgttttgtcagatttgctgaatcttaaccacttccagttcgcataagacactgcctcgtcgtcaaagggagcaacctcgtcgaacgaggagtctaactcagctggttgatgcttctctgaaatttggtcccggtatctttgcgccatctcttcagcctcggagaacaccttctgcaaccatacaaaaatgaaaaaatgtgacaagcctgaacattggcaagcctacattgttgacatcggtatactctccgtcccactgaataagacacacatattttaagattcaatgtttgaccaataattatttttattataaatttaattttatttgatgaaaataatatcattagattaatatttaaaatttactttcatatgattatgtttttgttgctataaacactatagaatatgagaaatttaaagtcaaaaaaatagttttgaagaccgtgctaagtttaattgcgccttatttagtgggacatatggagtagtatgtttacgatggtccagaatggagaaagaaatttagagttttctgacctccttgttagagagaaacagtccaggttcgctctcaaggtccttggtactgcagaatgaaacatcaacagtttcaaaggacaatcatagacgctgtgaacagcagatggcctatcaaacaacaaaagcaattatccggttacatgtttgggcagtgtacctgagagcaattctgcccggggctgttgatttaatcacgatagctttcacttcctcacccacttttagcacatcaccaacggatgttagctgcccccgtgttatatttgagacatgtagcaatccactgcaaaacgcaaagcattatgagttacgttgcatttggcgtgtggatttatccacttgcagacctttacaagcgtgccattagaatatggactagatatgcattctactggactgggcatgagataatgcagaccagttcacaatccaggaaaaaaagcagttcatcaaagggaagtactttttttttttaccaaaacaaagagaagtactatgaatgcacgaatttatatgagtcacgtgtaaaatgtagtagtcatctactgcattatcagtgcaaccaccctgatctaaagcatagcaagtttctgaaatcttagccagaagatgcttccgcagagagccctaatcatcagttcgcataatgtgagcatttgtaatgaaacccacaatctgagtcgattggtaaacctcaggtttcactctacttctaacaatcaagactaaggatgcttgcatcacgtaaagccaagactcctagcaatgctgctaaaattaaatacgacattttcttctaactaattgggcagatacaagcagataacaagccacactggaacatatgcttgattttttgggtgatcaatgaaattcagttgaataggaagaaatgacatatatagcaattgacaatcatgttatagatgttaccctctgttagtgtcgccaatcgtaatttgtgcaccgtatggaaacaatttgcggactgtcccttgcaaaagagttccttccctaaggtatgtcattgcctaatacaagtgataaacaaagataagcattgctgtactcatataagtataatttaatgcacagcagaaattgaattgaccaagaaccactactttaaataattagacagttctgataaatgatatgtcagtgaaaatataaaacaaaggggagcactagatgtcaatgcagtcaacttacccatgcttctttttcactaattatcaattcgttagctttttcatcaatccttgtgatgcagacatggatctgttgaccaacctgtgtagaagaaatattattattattattcatgaaagacaaccacttccttaaacagatagctgctaaaacagtcagtcatgctgctatgccataacaggaaagcagcataatgcagattccaagtgcctagggatgtaaagtgatattacatgtcatgctgtacttacagtattctttagatccgtgaagtttcttggtctagtcatcatttcaggtttagggaggaatgcccgaagcccctgaggagtgaaataagttttagtcataaaaatgaaaaaaggaccttgtaatgtagaatagtaaaattatacctcaattcttgtcagcaggcctccggcattccactcaaaaattttaaccttgataggcacatttaactgctttatctggacaatggtgtgtacataaacagtcatataagagcattcagaagaagaaaaggacagccatcactctaaaaaacatttacgcgaaactttctcattcaagtgtgttagagatgcaaattccgtaagacaaccatatccattgtcactcaaataagatatcaagaaagaaaaattttcattgtacatattcatcacacaagcttcctctagattgctcagtattcatgtaacaccttgaatttctgaagtacatgagctctacagtgtaataacttacagccggtgcatagagattgtgccaactcgtagtgcagataggagccataagctcataatcatacgattccatactaataactcctatttaacacacgtgatttcagacacttacgatctggacatcctaggtgcttgttaatctaatagcaagatgaatcactacgctttaacatttcgagctttaagagcaagcagttactttaagggtctagttgctacaaacaaggtggtcatgactcatgagctccagacctaaccgtatcggcctcatcttttcgcttatgcttatgcttatcagctaaaatttgaattttcaaccttaaatttgaagctgattttagggttttttcatcaaagtttatttttcagcctttgcttttaggtcgctaagaacacgtatataaaaattttattcacaaattacttctcgtttgcaaatatgccgaataagccaaacaatggggccgatagaattacttagtactataactgttggtttgaagtatctgggactgggactgggactgggatagcatcatgtcaagactctgtctatagattagtaatgcatcaactatgaaaaagagattgaactaccgaattatcgctaagtgatcagttcatcaaattccaactaatgtagaaaggagagacatagagaacctgcctcactctgtgccacgcgacgcgccggaacagccggcgcgcggacagcagcggccgcccgccaagtgttcgaccgaggacctcggtgaacaccaccgtgccgacgcccaaagccggcgaacctctccctctcccctttccgttcctcccgcccgtcgcctctccttgcccctccccgccgctgaccacgactcccaccttcccttccgcggcgaactgggctgcatccttcgacgccacgtcgcatgccaggtactcaaactcctccccggtcataggcaccgcctccttggccagcatcagcgccggctcgccaccggcgccgacgtcgatgtcgagcgtcctcccgtcgccgccgaccacgacgccgaccgcgaggtccccgggcttggggtcgtaatacacgaccccacgcccacccgcaccagctccggcactcccctccccttgtcctcctcgtcttcctccacatagcctccgccgccgccgccgccgcctcccgccgccgcgtcgtcctcgtcgggctcggtgctcttcccctggaagaacttgaggaacggcgcgagcgcctcctccgtggacagtgccggagcggcctcggtcgactcagactcatcctcatcggcgggggatggggaagggaacggcttctcgaggaggtgcagttcatcacctcctccgccttcgccgccaccggaggaggaggaggaggaggcgtggagcggcgacgcagctcgtgctccgcggacggggaggcggctcgcggtggggggtctccgccgcgccgctcggcggcttcgcggggagacggaggcggcggggaggagggagaggagggacgggggcggcatggcgtgcgagcgggtgggggagtggagtggagtggagtgggtgggtaggaaagccgttatctcctcgcggcgcggccaccgtgaacaggagggatatttcctattttgggtcttctcgcggaagcaggcctggatttttatgcgggaaatcgggccagagtaaagctgcagcgacggttcggcccgatactttcagcccgttttaatactttcatccgtccttataagtccagatataacatatcatattacaatgaatctagataggctctctacgcagattcattatactaagatgtgtaacatccaaccaaaaatttagagacaaatggagtactattttatttaatgttactatactggtcttagggatgatgtatatggaaaagagttgaggcataccaagagaaatattcaaggctaatatatgaatatgaatcttattaacaataaaaaccgtgttttttaaagaaaatagatagatatgaactttgatgtggagttttcaacttggtagaagtttgatttttttttctttaaaaaaatccatttgtgtatcacatcaggctagtaaattgcagtttgaaaccataaatacaatgaagtattatatttaagataacattaaatcgcactctatgcctaatcgttttacccttttcaccaaactactatgcaaataattttgcccgtgttttacccctttttttattgcatggaacaaatttcagtagggattatctgcagtactgcacatgcagtagctggctaactgccgctgacatataggatcgggtccacctgtcaaccactacgggcctgttcggcttaactcatgcggctgcggacctgcggtgcagccggccgaaacagtgatttgtgtaagcagctgcagcagcaacactgtgttataacgactactactgtgtaagtacagtactgcaaagtatccttgttaaacaaattttgagttttacttatagcaaaaccactgacatatgggcccgatgcagtcaggcaggacgagccagtcgagcccgagcagcccaagcccaagcccaaggcgccgtcgcggccagcacaacaccaaacaacggggcacgcacgcctttggcagcagggagcggcggcagaggaaggggggaagggagcaagcaaggcaagggattccgcctcgcgagaacgatggggttcatgctgcgggtgaggctggcctccttcttcgccggcgccgccgccgccggggccgccggcggcttcttcctctacaaggactacaagctcgcccacgactccatggccctccaggtctgtgcgccccctcctccctaaaacccaagatcttggatccttgatcgtcggtggtttatctggcagttcaatcgcgtcccccgcacgtcgcctgtggagagggagatttagggatacccgcttttcaagcttgcaactccggatatacgctatgcgtgtctagatcgttacctagatttttatttttatgtgtttaccaatttaatcttcgtgtctatatcatatgattgtgctgcattctcttcagtttgaccgaaaggggatttgacgctgttgttctgtcctgaaattgggctgccaataacatgcatggattaaaaaccaagcctgaacttttcctctgcccaattattttctgataatgtggagtgtctgtggtgataccgtgatagaggctactgttccatggtcctgccactttcaatttaactatcacttgtgttcaattgtataatttaactagcaacgcagttccaaagtttggcttggttgacagttccagtaccacttcatgtggaatctgagcttgccaaattgaaggttcgtgtggcagtttaattatttttagcttgtggtcatcttggtgggctctcgcgtacaatgtacattgtccacagaagcaactagcttttcaaaacgcctaaggatgagaagccacaacctgatattctgaaatactgttgcttgaatatgtttttctagacaatgccataacaccattctttatgagatttctattcactttgaatctgaaaacaatgtgtttgccattccttgcgtgcacagaaaatgctttgtgttcaagaatgtggaaaaagagagtgaattttaggatgccatttaatattaatattatggcgtggttggagttgaattgaacccagtatcctacatattatattatcatagacataggcattcattagtgcaacgtctgtgcatttaagttgcacaggaacgtcatcttgcaacataaaatttgcagctataaatggcttttcttcagagtattttaacttgaaactggtgcattcctgtcatcagcaagaaccttggtgctgttaccaataacttgtttccaatttgaaattttgttggaacttcagtgagaaatgactcttttgtgagaaaggtgaaatgatatgtatatgccaacagtgctatggaagaactttaggatagtccatatgcctgattaacctagagtcctagattagtatgcaatggtgggataacctcatgtaaaagtagaatcacgtcacgtggatgaaagctggaagctgttttgtaagatgcaatatatgtgactctgtagtttgtcagaagaggttccttaaaatgggtggatggtctacttgtgttacctccaatcaatataaccatccaggtccagctatggcatagctaaggaggctattcatatgagaagttaacttttcatatttttcttgggtccttcaaacaggccacttgtttgagctgtaagattgaggtttctatgattctctatatgtggttctaatcctgctccctttgcacaaaatttatgtgcatgttcaattccactgtgcatgatactggttgggtttcaatgtaaaagcatctgacctttcaaatgcatactcaggtcaaaggcctacaagaccatgtggatgcccgttacaaagctcttgacaaacgacttgctacattggaagaccagaaaaccagcgagactgctccagacgtgggcgtgccatctgattagtctgttcattggctggcttgagtatggatgatttacgactgtttactttaacctgtgttatcgtctcttggaggcaaaagccgatgactgactgcaaaataatttagtgaagagttttttttttgtgtgtggcaatgaagcttctgtagtgttatagatgcccatggggatacccaaccttgcaaaaccatttcacttttgatggcactgaaccttggcagtcaagctcgatcatttaccaatgtacctgtgtgaaagtttctttacctgtttgctgccaggaacttggatgttttaagatgcctgctgttattctttttcaaaactttccgtgatgcatgtgcattttatggccaggcaaaatggtagatcttggaatgaatctgatactgacaaattggccatctattgtggaaaacaatcacttaaatacataaatggataaagtatcacagatgaacattgcaaagagacttgccgtccttgttctggcaggaaagtatcaccgatgctagcttctttgcggccatggagaaccatgctgcacaatggctagctgatgactcatcgtcgtcaccagttcgtcatcactggcatagtggcatgggaattcaggattgttgcgtgtgctactgtattctctatatatgctcgtcctacttctactgaattatactgatttctgaacaattaactgtccctttctgtctactaacttcttttgagttctgggttgagacgctaattggtgctgctagagctggttgttttcttgacagatgattcgtgcaaggaatccccttcaagcagattcttccttgcccagtactgagaattaatggtagatgaaaattcttctagtgatccggtgaacttcagggtactgtactagtactgtaacttcatcatattcataggtgccaacaaatctccagcattttcaatctgttctgttcttgcaaatctgccaaacaacagacggaaactaattacggcatcaaagctccaaccatttcagtatccccaaccgtgttctttccgataatgcggttctcatattcaacctgttaagctgcaagtgcatgcacgattacctgaaaaatgcccatagagttatcagaatgagacggtggtaatgcgactgcttcaaaacaattggcaatgaaataatgattgggggaatatgctgcttgcaactgcttgcgagtctgatcagatatgatggatttggtaggtgtgaggagagaaatgagcatatagttcagatttgtgatcaacacaataaacaaagttgtttacaggaaagctgctttcatcaagatctcagcatgttctataaacatctagttaaacattttaatatattatgtaaaaaaaatctaatatccttattggttgtcagcaatctgtagagaccaaaaacattattattaattgacagcccattgtggcaacatttccaccacaattttatgtagaaaaaaataattcatgccagtagtcaaacaccagatattaaacacatgataatgactgggactcctaaccatacaaattgaaatatggtcaatttattttagagaaagtagtggagtcatcagattagcaaattgtaagaagcaaactctttcatggtgtccactgaccactatggctgtgtttgatacttggggttgggaacccaactccaccgcacggaaaacggagcggtccattagcgtgtgattaattaagtattagttaattttttttcaaaaatggattaatttgtttttttaaagcaactttcgtatagaaactttttgcaaaaaaacacaccatttagcagtttgaaaagcgtgcacgcggaaaacgagggaaaggggttgggaaacttgtggaaagaacgcagatatccaaagatagatagaacttgagagattaattttaatgcctctgagatccatgacactggagaaaacaatccatgtgctctcctttgatgcaaatgatggacgttacgcagacaccagcaaacaacaccactgaccatatgcatgctaatgtgcaagcaaattccacaaacagtaagacacaatattagcactcgtcaataattgaaccggaaaaggataaaaataaaccagaactaattaagctcactttgacttcagcaaaaggatcggagccatcagaaaaatttctttgcctgcagtctacaaaacctttctaacattgcaggatcagatgaatacaaatgcatcttcagatccctgggtaacaatttactagtacggttttgtgcatgttagatgcaacccatcattaaacagtattaatacgatcaaataagtgagctatcacccaaacaatttctatggcaatgaaaaggacagtacagtaacacaatccaaattgtacctttctgctaatccactaggcaacaaacattgtttgtactcaacattttccaggaccatattaacctcgctgaagtaacaggtgaaggatccaagtccacataaatatcagcccaaatattcagacgctgacaggaacaggaacactcacaaaacataaaactttgatctcgctgcaaggagatgatatgccaacaacacattataagaaaagacactgaagtgactgtctgattcattgattccactgaataatacggagtacacgataagtatttacaggaatgatacgaggtagcgtatcaatgcacattaatcccgatcaattggtctcatctgctgtggttttcttgtccagcgatgctcatctcggagcagctagcgaaaatgctccattgtttggatcgtttagaaatccttccaaagcagacatcgatcaaggagacccaaacagcagtacggcacctttcagcagggcatccggcaggacatctctgggagcgacagatgatgacgacgagtcgacgatgcgcttgcaagccaaacagaaaatatggtcacatatttgattggcaattgcaaaggaactcccatagatcataaaagaatacatatcttaggcacgttcttttgaaggaatgaagaattgattaatacaacacgcttctcaagttgctaaatgatatgattataaaataaatcttaaatgactatttaaatcgattctttcaattttataataattaatctattcatttctactctcgaacagtgattacaatatcattctactatttgggaaaaaaatgcatgtgcgcaatcaaagtacttcatctatttcaggtgataaagtgatttaattttagttaaagttaaactactttaagtttgactaattctgtagaaaaaagtagagtagtaacaaatcatatgaatacattatactagacactttattgtttaaaatatatgttttaggtatatgaaaataatatagtcaagtctatcttaatgaacattacataatagtacaattgtaaagtcttttgacatttataaaagagaatttgttggtgttatgttgacttttttttgggaacattactcccgcaaaataatatttagaaaaatgtacttcgtgcagtttttaggggacttagtaattaattaaaatatttagtactaataaccttcaattatatagcacattgcatttaggcggcggcccagtcagttgcccacccgctcaagaagccagcgaaaatggcgtcctcttcctcctccgcctcgtcgccgctcctacctcgccgaggccaccagctccaggagccagccatggccgcgtcccagatgcggtgcgggggcaggagggagaaccaggtaccagttcttggccggggtggagttgggttcccttgcatttttgctcgcgttcttggatcaaatcggttattattgctgttcttgttgttgctgctgtctgattctgaaaattctctcgtctgctccgggtggtggtggagaaggggcttgtgcagaggtgcgccgagacgatgatgctgtgctgcggcgtggattgctggtgcggcgcgctgcggctgtggcgcagggtggtgcttcgcaagtggctcaacgtcggctccgggtcgggcgactccgacttcagcgccgacgagtgcgacgccagcgacggcgagctcgacggcgaaggttaacctgcctcaccgagtcaccgtcccctctcctcttccttcctagctgctctgatttgatccagtttactcaagctttgctcttgtctggaggaaaaatggggggagaatttggtgtgcgaatttgtgttgttttgattgctaggcaatgaggggaatgctgaccagcatactgcaatggaagctctttcttgtacgcctttgtgatttgactctccttttttttttcagaagattaaaaaataatcccattcaaagaattggttagtttttttttctttagaactaggagatgtcatgtttaattttgtgtgtaagttgatgatcttgcaattgcaagtgccggcaatttggtatggtcattaatatctctgagaaagacttccattgtgatgtgtagctaggctagtactctctgcataccagcggctttcttttggtatattcaacctttttaaggaaaggaatgttaggtcagggagttcaaggatttggcgaaagcatgataccttttcgattcttttctaagcttgcttgagcaaaatgggtagcaaaaagtgaggataaagcaggcaacttttgcttaactcatagcctcgtttttttcttattgcttcaatgaatggtaatgtgaccatcttatctagttgactttactatctaatgacagctgctccctttgataaaagtcctgtaggtgttgtttttagttaacaacatgtccttatcaattgctcttcttgcacttaacttgcatatgttattgaatcatgcatattctgattgttctctttattatgccatttgtgcagacagggataatgaatcatatggtgaagggacgagtttagatggacttggtgcaggaacaattggtaatttcattattagctcctcatttttttttggagaggtctgctgaagatctgcacattcggttttttgataagtctatttctttctacatgttctatcttttagatgagttgtccctagttgattttcatacaagggaatggtcttgcatattggtgctaaaatactaatctgagcagtaaaggctagtttggttttgtagacagaacatatgagtccattgaccaaagaggaaagaccttatgtttggtaatcatttacatacgagagactgtagcctcgaatttcagtttccctggggtgatgatgcctctagatcggtttatcttaaactgttctacaaaatagtacatcatgcttttcttgtttttattaataaacatttgatgttatcacaatggatgaaacagaattgaatataattagcaagcattcagctttcaatattttttcaagttactctgaagtccatgtttagtacattaagtgcctatttgaaaaggcagggctgattggttgccttatgtgcagcacaagcacttgtttgataaaactgacatggcaggtttgccttatatgctaatgcaatcaactacacaatgtaggggatgaaattaaatctatgccttacaggcttagaagacgcaaatcagagacccttcgcgctcagtatattgacatcagagaactcaggtatagccgtatagaattttctccatctttgcatttttttttcctggtcctagttatgttcttccagttacagtgagtattgttcctatcatcttatgtcactatgtaattaattaatgtgatgtcagccactcatttcaccgtattcctatcacacaaatcatttcaggttaatgctacaattgaacccacttgttaccggctgaaataaataaaatatgatacttttgtatatgtttcaaactgttttctatatgcaggatttgtgtagggacatggaatcttgcaggcaagtttccacccagtgatctggacattcaagactggttggataaggaggagcaggctgatatttatgttcttgggtaaatcactattcacaatttttttccccctattttgtaaggtaaaagatttgtgccgcagattcgcatgaagcactccacttcttatctttgaaaactaaaaaaatgtttctggatcatgatttgaaattattttggcatcacagtttcttcaaaagagacagacattattttattatttagctatggtatggtggtggttctatttgtattcgtgtatgtcatgatgttggttggttgttctgttgtcagcactacaactgaagtatataaaaaatccattgtcataaatttatgtttatctttcagatttcaagaaattgttccattaaatgctggaaacatatttggttctgaggataacagtccaattgcagtatgggagcatattattcgtgaaactttgaataagatttgtccagataagccgcagtataaatgtcacagtgatcctccttcaccatcaaggtttaatccatcagattatgttatggtgatgaaagatgaattgcttagcgagtctgacagtgacaattatggtgagcttcatccattgattaaacaaaatgatgatatagctattgacaatgatgtagttcatgataaaacatatgaaaacttcagtgctgcttccaacggaagagttcataaaggcaaagatttcagcaggatggattcagtaaagacttctgatcagtcccccaacttaagttatgaaaaagacagatcaaaactggaagagacaaccaaattactctatcatccagaaaggcttggaatgatttggcctgaacagccattggatatgatggctcagtgtcttcgggctagcacttcactgaaggctctagcaactccagcatctttgaaatcaacagtgaattttccaaatgatgatttatcccatcaagttaacagtgacaatggagtgattaaaagtaaaaggccatgctttctgcgaatagtaagcaagcaaatggtgggaatatatctttcaatatgggttcggagagacttgcggaagcacattcagaatttgagagtatcaactgtcggtgtaggtgcaatgggttatatgggcaacaaggcaagtatcaactttaatccactgctcttattattcaattcaacagcactcaaaacattcgcaaatcatttagtcaagaagtcccataggttaatcagtttggtgttggtttgtacttccttctatctgctctatatgttagcataaaaatttagtttcatctactttgttattctacaaatcattggcttgacgatgcttcttcatgctgcaccttttcttttttcaaaatttagaaaataattggtgcaccgtgcacatgtgcttcttgaatgttccaggggtcaatatcagtcagcatgtctatacatcagacacatttttgctttgtatgttgccacctaacttctggagaaaaggatggcgatgaactgaaaagaaatgcagatgttgaagaaatcctccgaagaacagtatttaacccacttcctggacttagcacgcctaagggaatattgggtcatgagtaagttcacaaacttgtttttattttttttgaccaagggctgagcgcccccatttccattacaagttcacaaacttgtgtcttatgaaaaccttttactatcctcgagaggcttgcacccaaccagaatttattcttctatggtttcatctactgtttgtcgctggacactactcatgataatgccttgcttacgatataaccatcttttcccttgatttcttatggttatccatgtcatcattttcagaaggatcatatggtttggagatctcaactaccgaatcaacttatcatatgaaagagcacatgaacttatctccaagcaagattgggatggattgtttgagaatgatcaggtaatttgatggtgtgatacattcattaccattatagatttctgaatcatgcttttcctccctttgtaacagctaaaaagagaattgagtaaaggacacacttttgatggttggatcgaaggagatatcagcttccccccaacatataaatacgagtttgactcagaaaagtatgtaagtgatgagccaaaatctggaaggagaacaccagcatggtatgttagtttttcatagcactgccttctttttttttgcataattaaccttaaaagattaactcaagttcatgcttagaaatcatatctgttgcctgttcaggtgtgataggattctttcacgaggaaagggaatcaggttaatttcctacaggagaggagagcttaagctttctgatcaccgccctgtgactgcagtcttcatggcagatgttgaggttctctgccacagaaagttgcagaaagcattaacatttacggatgcagaggttgagtatcatctggtaacggaagaagatagaacttgagtgaaaatatatatatttgattgtgcaggcaagttcttcagctgaaggtcgctgaataacctgcctgattttgctgttcacaattgtaaaaaaaaaaggagttagtactaggtaaatgcatagctggatgatttactatagctataggttttcttctgaaaagtgtatagcgttttttttttttgatcataagtgtatagcgttcttgtttcttttgaaaactgtaaatgattaccacacgggtgtaccccttctctgtttgagcctaattttccattcagcaagatacagatatatcatcacgattctcaattctgtcagctgaaactgcatcttaggggcacaagttttgcacatgaacgaaatgaacgagatgaatggccaatgaagagaggccagccatttttctactagtgtggacaatgcatatacaacactacaacaacgaaaagataatgtggaaaaggttgatgagaaaattttatcagcctagtaaatccaattttcttaaaatataaggatgctttctccaaaattccgtccccatgtctgcgtgtgccacaatcacatcccaccgttctcttgtggtattttctctaccctctgcgtctgcagattcttccacctgcagccatttgaaacgtacgagttaagattcttgtggaaaacaaagcaggcagcggaaataatacaagaagtcaggcaaaatgcttcttgggaacaacaaagattaccttttgccggtaagtacatgaacccttccgaaacacagctggttcattgttgtaattcaaatgaaattgctggaaaagcaactcgttcttgtcctttgataatgttccctgcagagagcagtaagagagttatggctacagataaccaaagcatcaaacaagatcaagaggggggaaatatttaaaccgaaatgatgaaagaagacctttaatatctcacgagcttcgttttcacttttgccagatttcactagcatccaaaagcatgtgctgtattggttggtggtgtggcctgcgaaatagtacgtagcacgtgagttcactgaagatgaacaaacgaatacatactgaagttcactgaagagaatcatttaacagtgtcagaatatatgccttttaggaggaataacttacattctgcttgtctcgatgacaaataatcacaaagtatcttttgttttgggtaacatagaagttctgcctcaaagtgcggtggctccactaagtccttgttggggaaaaaatctttccacttcatcatgtaaaacaaggtgaaacgtgaggtacatgatgaaaggattaagctgcaaaagaaggtgcaatcattttgtcaatggcacctcttgaaaggacaggcataatagaaatgcataaaatcagtaattacctttcctgacgctggtatagttcagtcttatcctggaacacaaaactgcgacaacaagaagaaaataagaaagaacatttgcaaaagatgaattttctgtccatcaaatataaaaatatttgtctaagatgaaacctttgctatacaatttaatgtatggattattagtcataatatttttatcttgcgaagactaaattaaaacaaaatcaattcagttcatgacatccaggacttttttttctgtacaagcaaaggtttttctttctttcaattgtttttgctctaagacagtggataaggtcataaggaggtatatcttacctgtactcattgctaaaaccatagccaaagacaatgtcagggaatgactccatcatcaaagaagcagaagcattcatcaaccttagagctgcctcatcatttggcttgtcaaatgaatggatcaacgagaatctaacaaagaaaatttgagttctcaacaagacacaaaagagattgcatcatgctttcaaataaagaagaaacaagagggtcctaactgctcaaatttacaaatgtcgatgcgaacgacagtccaattacaaggtggaagcctatggttgatgtcaaacttcttaacattctcatacctacatttttctttaaccaaagactccagttagattgatgctgtacattttcagagttctgactgcagctgaattgctgaaagcatatagagaacaggagttaactcaactcaccttctcgaagaatatatggatgattttcccaaaactcgggtcctatgatatcgacatttgcatttgtaataactaagcgtgtcctttttatggggtttccacaacgatcagtcttcaccattgtttctacctacagtgatacaaaagctcttagcatacaaaagtgcatttaacaactattaacatttcagaaagcatgttatttcattcctggttagtcaatctcagcaaagggatgagaataatagttcacaaaaaggaaaaaggatgaagataaaattttccaagaactacgattgttccacaatcaaacccataaaagaaaggtagtatgcagtttacaatcatgttataagaatcataatctttgatcaataacttaaaaagaactggcaccggattgcataaagggtgctctgattatcactataagacaagtaccttttttacaaaatccagacaagttttaatctgtccccccctcttttttttttttttgccattccacttccatataattacgcatgaccaaacaactgaaaactgcaaatctcgccaagttcctaccaagagaactagcaaataagtctcactacaaggtcccaaatcttctttgaaatatctctgatggcaagtatggaaaaaaactaccatgggcattactagagagtagagactatgtaaatactttgttgagtattatcaaagctattaataatgatgccgttttgctttcttggcagcattaccttgtctcggtaaacgcaagacccttttcggaatatagccggttcatcatcataattgatttggaactgttgtgaaagtaactcattcttgtcctttgaaaatgtcccctagaaagaagaggaaacaaaaagaaaacaatcatttattaaaatgcaattggaagcatatataaactctctaaaacattttgattaccttcaatgcttgttgagcttctttttcagttttcccagacttcactaacgaccagaagcaggtgttatattgattgtttatatgacctaaaaaacacaacaaaggaatttgttctgagtcgatctgtttaatgaagaaataagttgtacaaatctcctaacacatagacaaatatttagtggtgctaagctgattccgtattaggtaaagatgatatacaaaacggtttcattgtacagaacatcattgcacaatgcaaaaatatgaatattgaatctgttttgctatacaagaaaaagttggtggagagaatatcttacaatccacttgtctccaggccaggtaatcacggatagtcttcaagtttggatagcatacaactcgaccatcaaaatatggaggctccttcaactccttattaggaaagaaatctttccacttcatcacgtacacagaagtgaagtaggaaacacataaagatagaattttactgcatgcaagttattagtagaaaagccaatgtcataaaacattgcacataagcacattcaagatactcagtgaaaatggtgtacatattaaatggtacctttctcgtctttgatagaattcagtttcctctctaaaaacaaaactgcaacacaaacatgagatgcaaataacttataattatactgaagacaatgcattctatgtcaacagggagtatctacagttcacgtctttgatcacctacttaagaggcattttgcacatgtaatataacagcacagctcttacataatgataacattaaccatggcaatcaagtgtagtgtttctcatttacctttggagaaagaacaaactaaggactctggaaaaattcaaactgaaaattccaagagaagatgttgtacctgtactcatcactgacgccatatgcgaagactatgtctgggaacttttcgagcatagaagtggcacaggcgttcatcaatcttaaagcacgctcatcatttggtttctcaaaggtatgtatcttggagaatctaacaaagagaatgctgaaattagtggacaggacaaacacagatcaactattccaaattgtaagcaacagtgatttcccctgtctagtatccacacacactgtggcctgcttctcatataaaccgatcatcacaaagaaaaccaagcagaaggcgttgtgcataatagcaggtttagcttctttttttttatccctaagagtctaagaccaaacagacatgttgcatcaagcaaaaagcaggagatttaaactgaaattgccatgtctgcataaactatcgcacactgcactaccaccagagaatgaactgatacagccaccggatggaaggtgagagcaactgtaccggtggaagtggcagccgtcgatgcgcacaacgatccaattagagggcgggaggaggctgtcgagctcgaactccctcttcacgtactcgtactcgctgttggccatcgccgtcaccccctcacctcaccgccacgacgaccagactacgcctgcaattctgcaaaggtgccagtagcagcagacgcggcattaacaggggcggatccaaacttttgggtgaacaaacaaactgttattatttaagagaggtttaaggctatcaaattaaggaggaggagaagatctagaagagaagcgcaagcaaattccagtcccggtggggtgggagagagagagatgaatcagaaagaggacgcaccaggatcccctcccctcccctccgctgcgatggagatcgccgcccggccctcccctgttcagccgcgactcgtcttggcggcggcgcaaggagcggagacaacgagagatttctttttcttttacgcgatactcgactactccccccttacctaacctacaattgtcagaacattttccatattgcctatccaacaaaggactgttgtgctagaattctatctaatcattttgagtcccttaattgtactctcaagcatgtactctgcttctaagtttaataaattcctggttctcaaaaaaaaaaaagactactccccccttatctcaatatttttatttaccactccctccgtccattagtatttttattgttattagatgataaaacatgaataatattttacgtgtgactaatttattttaatttttcataaactttttaaagacggacggtcaaaaattcgacacggattttcacagttacacttattttgggacaaggtagtattttaaaactagctagtgctatttctttatataactggtgacccacgtatcatcaatacttaggaaaaaattaaacgattgtgtcgacaacaaattcctcataccaccagcaaccgctaactgccactctacgtaacgctctttctccatgagccaccatcgttcctcctctttgcctttacatgcgcagccttaacctctagtaatcgatatgtctttttctcctcccctatcgtgatgcgcactattgttatggttgctattaaggtcggagatgtcgagcttgcaaggactttggaaggcaggagctgacccgacgaagagcgaaggcgctatatctaggctctttcttgctagatccatcggttatccaactgtcggatggaaaaagaaaatggagagagagagagagagttaatgtgcgaaatgattactgagtcactggacttggagatggatagaatatggtagtccaaataaaaatgtaaagttagctattgtgtaaatgaaaatggttaaagtataatattatatgaaaacttttaagaatttttaagaatacatagtatggattgtaatttactccctttgtcccataaaaaacgaatgtagaactggtgtggcacattctagtacaacaaatatgaacatatgcatgtctagattcgttttactaggatgtgtcacatccagtcctaggttggttttttatgggacgaagggagtactttttttttctctagcacaactaaagataattgtccataacccgatagtctcgtgatatgctaagtatgattatgccggtgtacctagctataactaataatctcatgatatgttgatgcatgacgatacagacttctactaacacgggctgattaactatggttagatagattccgctaaaagatgataaaaataataccatcacttttgctcaataataaagcattcggttatggtctttttttctcattgtattatatatgatgactacgttagtacgtatttccgtaattctttcatattattttttattttctacatatatgttaatttggactaatatatttctcataattaaatagataatacatcatttttctatatttctcctataaaatgagaatagggcattttatatttgaaaaattatattataagtgtatgtaatttaatgtgtaagatttggacttatagtataagatttaactttttctaaaaatgccgcatcatagtagataggtagttaactgaacaaccataaaaaacagagacaatccattgtgtgtcactaattttatccctgctctacaatatgtcattgggtttgtcaagttctaatatggcatcgcattttgcttaacttctataatataccatcgtctagttagcctccgttagcattgtacaattttatcatacagattgtaaaacttaaagagtttgagatgggcaacttctctgcctagtttataatatgatatttcggaattttcggccaaattttagaaatttttgtcctagggatatttcaatcattaggacaaaattatacagtactaacggaatctaaatggacgacgatggtatattatagaatttaagcaaaatacaatgacatactgtagaacttaacaaactcagtgtcatattacggtgaaatacggtgaagatacacgttgaaacatgtcgctatcacatatgaaacaacaaatgttaactgattgaaacatatgtttttctttcatcaaaatataatcatgcgatatcttgttgtaaatatttaattacaatgaatacaacggtgtgatatagtcatagattggataagtagtttaggaaaaaaatattttgaagatcataaaaatgtatgtatacatagatggatggaggggagagaggagagagagtagtggcgggtagttccatgatttttgtgaaacatactgaagacacacattgaatcatatcactatcacgtatgaaacattgagttttaatagtttgaaacacatgtttttattttatcataatataatcatatgatatcttgttgtaaagatttaattacaatgaatacaacggtgtgatcggatcgtagatcggatacatagtttaggagaaaaaaatatttaaagtgggaagaaaagaagaatgagaaactagttaatagcatgcatgtgagagtgtagggtccaatttttactgacccgatcgggcgctcgagcctgagcattttcaaaactattttatgaaataagttcatcagaggtctcttaatttgtcaacgaattcgattttcgtccttcaaccggaaaacgatatacaatgggtccctgaactattaaaaccggtaagtcccaaggcggtctggagcacggtttcaactgatgtggcacccacatggctaattttactcgatattcgtcttatgtggcattaacgtggcatatgaagcaaaatttaacaatttaaaaattaaaacaaaatatttggacccacatgtcagtcaaacaata

SEQ ID NO: 10134 - DNA, 54305 bp, Oryza sativa
agtgtagggtccaatttttactgacccgatcgggcgctcgagcctgagcattttcaaaactattttatgaaataagttcatcagaggtctcttaatttgtcaacgaattcgattttcgtccttcaaccggaaaacgatatacaatgggtccctgaactattaaaaccggtaagtccaaggcggtctggagcacggtttcaactgatgtggcacccacatggctaattttactcgatattcgtcttatgtggcattaacgtggcatatgaagcaaaatttaacaatttaaaaattaaaacaaaatatttggacccacatgtcagtcaaacaataaaataaaagatagtggggcccacatgtcagtgggcccacttcctcctccctcctctccctcttgcttttctcctcctccctttccatacgcgcgcacctcggcgacagcgaccgtccgggaaagggtgtggcggtggctcgtcgaccaccatggcattgtggccacgctcatcaccttcgccgacattgatgccactgacgcgcgcggcggccggcgggagaggaggcagcggcgcataggatatatgataggtaagttgacatatcagaacatcagcaatatcaatatagcagcaactttaatatggcttgagagaacatcctctcgttatttacatgtaatcttaatagttagaaaagaaatttaaaaaaataataagaagataaattaatatgtgatatattattttacaaacatacaagttaaaattcaacttttacaaattacaataaaaaaattaaactgcaactagttagtttgtttttttcgttataccatgtagaacatatttctgaagtgatctatcacatattaatctatcttattgatctttttttaatattctttataatcatttaaatgacatacaaacaaggaggatacatcccttgagagtttgtagtaagatttattaatttgtctcccatccagactatgaacaacccaacagctatacaaggacaacagaagcctggatctcactgatctctggttaagcctttcacatcccctatgtataaacaagctatgtgcagcggccggtggatatccatcaaggtagaacctggtgatgttatgcaggtgcttattcaacgacctgacatgttaggattgcaggcttcttgagccagtactgctcgaacctctgcctcgcataccccatgtagtcgaagtcaatatcgttgacatgctcctgcaaaagatgtaaattggatgtttacatggtgttcagtcttacacagttggaggcaagtgaaactgaggagaaaccaaaccgaaattattccccagagggcccaaatgagatggcttgccaaggtgtacttctcgatactttttatcagattattgaccttctctgcgtcaggttcctcgcctattatggatattcggttattgtttttatggaatagagaagggagaatgagatgttaatgacaaacttcatgcttacctgaagagctcaggtagctctgcacaaattgcttctgctcatcagtatctgttgcagataagcaagaacgaacagagaaaatatagggtgaccaaaatggataaaagggagaacaataatgtacaaattaataactttgacagctaatatgaaatacctggatatttagtgtagtccagtatgtgaggcttttctgaatggtagtctgcagccatctcgcagaaatggtttgcaatgtcataagcaactggaccaaaacttgcatactcatagtcctgtgtaggcatgatgaggaaccagtaagatcaagacgatatgtttgttaatttcgcctggctacatataaaacttcaggttcataaacagacatgacatacatgaaggctaataaggaaaatatgcataatctttcataaagtatgtcgtttcagaagtgaaatctttattcctggagatagtaacatacaactcaatgtatgataaggttatacggagtaccaagacgcatcaatgtgtgtgatgtgaaataacaaagcagatggtttaactctcctttttccttgtggtcggtctgatgtctctagacgaaattgagctttcttcttaatataaagatgtccaagtctcttgctcgttcccccaaaaaatagtaatggaacagatgaatcaaacatacacaatggagcaagaacttacaatgatggtcagcaatttggtctcttcatcaatcatgatgtttccatactggagatcgttgtggcaaaatcctacgcactggtaatcctctgaaagctcattttccaacgcagtgatctcgttctccatgctatccaagcagaactctttggcttcgtcagaggggcacaaattcttggcagttttgagccagttcctgatgaagatgtgcataggcattgtcagttagtaacttagtgttttacttcgatgatgtgtttcattttacaagtatgcaatgctaaaaaacagtgtaaacacaaattaagtaataccttagtctgtcccaaatgagtacagattttggaccaggcatatcaaggttgtggaattccctcagctttgaggctataatggctgaaatctctggatcacgcagatcaacagctgagagtgtctgaaaggaatatttgcatcagtccttttgttcttttgaacattaatggacccaccatcctatataaacatatttatagtcatcatatcgtaatgctttgtgtttttgaatcgtccttcttcggttcttcccagcaacacaaacagaacatgatgctttcttttgaaagtgaagaaacaaattgagaaaaaagattaacattcccatcctactttgttttgtccatgccatattttccccctatatattatattaataaagtaatcgggctgatgccttattctgaagctcagacgccgtgttctgtgacctttagcaactcggtcatcagtcttactaatcaaaagatttcttgcatgattaaaccagtgctcattgaggtgttcagacaccaaattgattccttatggctgtgctcaccaaaattaactatgtcttctcttttttttattcacggctgtgttcagcgaggtagattcgtttcagtaagcaggtagaacggtagatacgttatacaatacacacacttgttctttcatgtggatatttggatcgttgaactataagcaattaaatatgataaaccataaaacaatttcatagacaaccatcattaaacatagtagctgaactgtatgacatcttcagcaagcataattgctaactaacgacagcattctgccaggctcagaagctatcactaaagccgtcaagaagttatgaaggaaaaagaaaatgattcatgttgtacaatttattcagcaagagaacagtttcatatgtcctaacaaaacaaaatagtacagctattagtcatctccaagaagcagaaatgtctttcttttcagggcccaagaaacagaaatgtcaactaatgacaacaccctcccatgcttacaagttactaggacaagtaatttatatgctttctgccaaaagtaatactcatcaggctctctggtctgattcgtaatactataatgtgtccaatccattcaaaatcatttatattttgagacggatagagtatctcagtctctcggaagctattaagaaaagttttttgttttaatttttagatataatattaggcaggcacagtgtagtcaacaagagaacaaaaacaatggctgccacaattaaaattgggtgatgacttcattgagtacggatttgaatgaacatcccggataagtttctgaaggtcaatgttgaaatttcgacagtacaactgcagagtacatctactacatcatcaagaggaaattttcaaagaaaggcaactgattaatattcatatgacgctacctactacacgattcccacgatgcaggctgaaaacgattgcaaacagtgaaacaactctgaatttctcgccgaaaaataaaaaagctctgaattcgcaaacaaaatttatgcgtcagattccccagtcacccatccaaagttccaaactcaatacgaataactgaagaacactaccttccaagtacgaaatcaagagcagcaagaaattttgtcgcaagcagacaagaaagaagaagaagaaaaaaaaacagagaaggccaaaaaaaaatgctcaccctggcgtggatgaactcctcgacgcggccgttggggaagcgaccgaggaggcgcgggccgtggccgtgccgcgacatggactcgaacgtgcgcacctcggcctcccggtcgaagaacaactccacgccctcgccgtacaccctcaccagcaccctcctccccgccgcctccgcctccgccgccggcggccaccgcgcctggtagacctcgttggtcatggcccccctgagcggcaccacctccagcgcccggcagtccgccacgtcgccccaccccgccgccagctcgtgcagcagctgccgcgccccctccgggatgctgctccccgccgccgccgccttctggttcgtctcgctcgccaccatcccttccgctccgccgcctcggaatcttccttccttttccggaaatgggagggggatctgggcgtgggagcgcgacccagaaatggtttgtttcttcttcggggatccaagagttcggtttatggcggtttatatttgcttggggcgctttttgtagattcacccttgaagttgggattattcggtaggaggtactttactactccctgtttatcataggataagttgtttgacttttttttaagtcaaacttaagttttatcaagtttataaaaaaattttagcaacatctaaaatattaaattagttttattaaatataatattgaatatattttgataatatgtttgttttgtattgaaaatactacttcctctgtcccacaaagcatgacgctttaaggtttcaaaagcaaattagcggaagggaaaatgaccaagttgccctcacttaataataatcggatgccatttcattgagtgcaaggcattcaataggaatacttaggccatcaccaatgcgtgtctccagcccgtagcctcgcaaacaacaaccaacttccttcgccgggtcgtctccggtagatggagtaaatatggggaagagagagggagtatgggagaagagaggattgtacagtaaaataactacgtaggctttttgggttagggatactcattgggtcaccagggtattctccattgtaagaggtgtttcccacacagtgtcttcagttagtgaaggcgcccatgtagtatccttgattgtagatgcccttatatatctctgcacactgaagctatggccacaaaaaatacacgtggcaaagcaatcatgagcatattcaaaaattcaaaacagatggccattaaattgctcaaacgacatgttttgtgggacactggtataacctttaaacgtcaggttttatgggacgaaggtagtactatatttttttataaacttgatcaaacttaaaagaaaatttgaacaatataaaagtcaaatgacttatagttttaagggagggagtatccttttaaagtagatttaaaaaaccccacctgtttgttttagtttcataaaaacacaataactttgtcacgtgacacataatcctagatattatggtttcaacgttttacaaaaccacattactaatcattttgcgctatcacaattttgaattcaacaatcacgagcattttatccatcatacaaatgttacattcactttctctattttgatataggagtatgtcaaaatggttaatggtgtggttttgtgaaattttaaaaccataatacatgttatgtggcacatgtcaaaacatgtagttttatgcaaattggatcataataggtggggtttaatgaaatttactcttttttaagcatattatagctcatataaatgcgcgcacggcgcgcaatcacatctatatacgcggacacacacacctacccctacaaacacctccaaagacgaatagtggatatttaaaataaaagaatctcctgcctcgatcaatggaattgaagagaggatagaggatgttaaattcagttgtaaatccagttacccatgacaagcaagccaactgcggaacttgtaaatctggacaaatgaaagaatggttttgataatagtataattgaaccagcccatgtaatgacaatcacagaacaatgacacttgtgacaacttaagaaacaaagcacaatacccatgaaaaataatacaaaactcaaaacaacgggtagattcagtagctcaagaaaaagccacacctaagcaacagctcacgattaaatattggacaatccgtatcactcaacacttgaatttgtatggcaccagctgcagggttttagaacatccagcttcactgtagaggggactttcccgacgatgtatctctcgatagccaagagcgcgtttttggcttccatgaccatagggctatgtatgcggccacaacgaccaacttcgtgaacagatagcctatctgcaggattattatttccatcaaatattgtgtctagtgtaagaccttcaagtgatgttgcattctcaagaatatgacaagttagctcgaccatgatcttcacattcttgatggtgtcatgatggtgtcctggcatctgccttagatgtgatgaatcttcagaaatcacgtcatgctccatgcgagtctgtgatacctgcatatgaaccagcagagaatatttcaacaaatagttccactatatatgatagatatatatttccgcatattaaaatttacttacacgtgaaaactttacttaccttcaaagtgaaagtctccaaggcaggagatgcatcaagaaaataagctaaagaaagataatcatatgttggggaaacgaccctagggactgtgtgaagaaaaacagtaaggtgcttgaggtggagaaatcttaaaggtgcgatcggcgtattgataatctgcataaattgtcgagattaatcacatttcaaggtatgactattgctatatgcataatgctggaatctaatgatataatcttaagttgcgtaatgtacctcgctaactgaaaatacagtgagagtttcaatagtgggcacaatggatggaagatttgcacaggcataataaatagcattatgccaacgaatggaagctatggttaggttcttcacatacggtagacctccatctgatagtcgtgctagattaccctcataatggaagtttaaaagatttggagctttaatttccatcacttgtgatgcttcccatccatacattgccagcttgctgagccgttgaagcaggcaaggtatcttgaggtaactaagctctttgcaatctgtgagttccaactgctctaacacaaaggaattggaaaaaaggcaccctaattcgtgcccagtaatgcgcacctcatacagaaacagacttcgcaagcaattaagtccaccagtaggacggaagacacaatagctgagataaagatgcttaatcgagcttccacctctattgaataaaagtgagaatgggaagtcgtagtagtttgccttgtcctctggaaacagcaaaaggatgagttcttcaattgccggtgtaacagctatctggagccaacaatcaagataacaggcgtcgaccaaattataggatctaagcccaaaagtcttcaagccaacaccggagtggttttcataatgtggtcaacttttccattgagttctcctattactttattcctttccaaccaattgtcattcaatcccaatgttttcgcactgaagatgagattgggacggcatctccaagaacgtagaaatatctgagacacgcatgcggtacgtgcagcatcttgtagtggcaataaggagtgtatatgataccagatgtcctaaaaacaccatagtgggagagaagttcaacattgtgcttgtaaaggtaagtgaaccaggatgtatcggaattttatacctcaggaaggaaggcccatggatttctcattgttttgacaccttggtaatcatcgccttgttgacagggtgagccatttcgtttagccagtgaagcaaccgactcatctgcaacacatcatggtgacaataggtaccgatgataatggagtataaaacatgcatacatctaatttgtttctgttatgcaacttttgggcacgaacgcatattcttctgttaaagactgcaaattgaaatactcaatcagaaaaagaaagcaacagtcttatatctactatccaagcttttttttcttccagagaaccaaagaaagattttaagctatttaacctaaacgaatcaaacttagccactaacagtagtaaagaacctccagttcagtcccaaagcagcagtataatacaccctcctctttttgtctcggtgcagcagtataatactccgtttcattaaaactaaaattttaatatattttcataatatgtttattttgtgttggaaacattgctgtatttttctaaaatttagtcgaaacgacctaaacctataatatgaaccgaatggagtatactctaaaaaagaatagcggtatactaaacaagctatggacgccagggcattaacacagaaacactaaacacgatgcaatgcgacgaagaggccgatggggcgatggatcaaagagacgagctcactacaggattggaccagccgacgtggccgcgtctgctcctgctgcatcgacatgagccgccgccgccgcttcacctcccctcttcttccccgccgccctctctgctcctcttcgattccgaaaccagcagggcggcgcgcgcgcgcggggagaccagatcaccccgatacgccgcgctctctctcgatcttgctccggtgtcagcggcaaggcgcggcgtggcgcggctgcgcgaggagaggaggggaggggagtggaatccgcagaggtgacggccaaaaatacggcagaaaattaggaaacgaaaacctgctggtccatgctgtgggccgatatttgaagcccaccaaacgaggccttaatgggcttttgtaggtatgtttgggatgtacctaggggtagtaatgggcccaattttttaggtttaaaatagagtgggttgaatttttaaacatttttaacctataaatatttgacaactacttcctccgtttcacaatgtaagactttctagcattgcctatatccatatggatgttaatgaatctagacacatgtaaatatttagattcattcacatctttacgaatatagacaatgctagaaagtcttacattgtggaacagagggagtagttagggttgtgaaagaaactatggttatagtattttactgagtaattatattctaattacactgtagttacatctaatttttttcactcaaaaacttatggcatatttttagatagtccattttaaataggtctaactataatttaggcgaatggatatttggcaaatcagttaaaattgtcatgttcttcgactccattgagccatactatgttatttttttccccaaaaaaaaattgacttactgtcttcaaccaagacatgatcaggtacatgaaaaatcaaaccaatatctaactttttttggatgaaagatcattatattgcataatgaccttgtttttaaagaaagcaagacaagacaagccacagcttcagctggacaatttaagaatggtattggttatagtatactccaactgagaacatgacacaacactgacaacttcagagacaaatctccatcccaggttaaacaagatttaaaacaagccaacacctcacttaaggaacattggaacattaattcactataaagttcacttaaggaacattaaatcactataaagtcgaacagtaatggtcttttaacacctgcagcatggcatcacctgcagggcaaggaaggccttcactggtgtgcttgggctgaaggataatttgtacggattatgttgtttgaaatgcttcttgattgtggtagtttaggtgacaaataattcggaaaagcagacaattttgttgcccaaacacgtgcgtcagaatgaatgattgcttctcttcttgttcaactctggtgagcattagctattatcttttccagggaaattgtctcgtggacttccactaggacactgatgatcaaatatgaaaatgccaaaccaaaatataagcaaaacataatagcgttgatctctagagagagaagcagtttcaaaataatacactttgtgcgagtgtaagatacaatgcatttcgtccaaaaaaaagttgcaatgcattcataacccatcatgaaaaataggtcatacccattgatagctaaatattctattagtggtaaatgacacgcccgtcgataatgaggtagacttcgtgaatctcaatatatattagtccagtcttcagagatgcttatgggtttgtatgcaggtgtttatacgagcgtttgtactgtgtttgcagtaaactattaaacatgatatactttttgcaggaagtaatattaggatattattgggctgtcatgtaacagaaatatcaatgaaattacaagagcgaacagaacatgtacatgtcgcatgaatacaatcgtagatcatatgtagcatcccagcttcaggtggatttcaattgataaagcagagatagccagaagaaagaatgcttcttgattataatataactgaacatgtaacatgacattagaacactgacaaagcacaacccatgcaataataccacaggacctaaaacagcaggtacatcctatagctaaagaaacaagccacacctagcttaagcaacaccacataattcaacatcgccacaatttaacacctaaacttcaaaggcatggcaccagctgcagggcttcagaacatctaacctgactgtagaggggactttccccacaatgtatctttcgatagccaagagcgcgtttttggcctccatgatcatttgcctacatatggggctgcactcaccaatttcgtgaacagatagcctatcaggattttcataatcatcacatattgtgtctagagtaagggattctagtgatgttgcattctcaataatatggcaagtcagctctaccatgctctttgcagagcaaaacccaatgatcttcacattcttgaggttgacatggcggtgtcctggcatctgcctcagatatgaggaatcttcagaaatcacgtgatgcttcatacgagtctgtgatacctgcataggaacaagcaaacaatacttacaaatgattccattatagacaacggattaataggtattttttgccacatcaaaatttaattgtatcaaacaggagaaaaaacatgaaaaaagaaatgcttacggtcaaagtgaaaatctccaagacaggagacgcatcaagaaaataagctagagaaagataatcatttgatggggaaaagcccccacggtatatgctaagagaaatcgtcaagcacttgagatgaaggaatctgaatggtgaaatttgtgtattgaacctctgcaataatattcagaattccatattaatcagaactcttgctatgtgcacggcccagccaaaaaaaaaaaaaactcttgctatgtgcataatgctggtatctaatgatataatcttaagtttcataacatacctcgctttctgaaaatatggtgagagtttcgatagtcggcgcaacagatggaagcttggcacatgtgtattgaatagtatgatgctgataaaaggaagataagtgtaggttcttcactggcagcaaacctccatctgatagtcctgctaaattaccatcataatcaaaggttgaaaggtttggagctttaatttcaatcacttgcaatgttgtgcatccaaacactgtcagcttgctgagcctctgtagcacgcaaggtatcttgaggtaattgagctctttacaatgtgtgagtttcaactgctctaaagcaaaagagttggaaagaaggcaccccaattcatccccagtaatacgcacttcaaacagatgcagtctttgcaagaaattaagactagtggtaggacggaaggcacagtagctgaggcgaagatgcttaatcgagtttccacccctatcaaataaaagtgagaatgggaagtcgtagtactttgccttgatctctggaaaaaacataaggatgagttcttctattgctggtgtaacagcaatctggagccaacggtcaagataagaggcatcgaccaaattataatattcgagcccgaatgtcctcaagccaatgcctgagtggtttttcataatgaggtcaactttttcgttgagttccttggttacttcatcactttccgacaagccactcagccccagttttgcatcactaaagacaaggttggggcggtatctccatgaacgtagaaatgtgtgagacacgcatgcagtacgagcggcatcttttagtggcaataaggagtgtatatgataccagatgtcctgaaaacacaagagtcagagaacagttcaacatcgcatttgtaaaggtaagtgaacaatgatgcatgcaaaatttatacctctggaaggaaggtccatggatttgtcatagttttggcaccttcataatcatcttcctgttggcagggtgagcccgttcgtttagccaatgaagcaaccgacccatctgcaatacatcatgtgatcatggttatggcaggtaccgatgataatggagcgtaaaattgagagtacaatgcacacataaaatttgtttctcttatgcaaattttgggcaagaaccctcccaagttattcttctgtggtagagtgcaaattgaagtgcgcaatcagaaaaaagaaagcaacattcgttccgaggtactcagattttaagctagctaatctaatcgaatcacttagctactactgtctcagtcaggaaaaaccaaactttttcttctgtctcagtctctcggaacaataggaataatgcagtatacttcatctcaaaagaataaaagatatcttcctcaaaaaaaaagaaaaaaaaagaggatagcagtatcctgattactgatttaactgaacaagctatatgtcaggacaatgtacacaatacagtgcaacgaagagggccatggaagcacggagcaaagaagcggcttaccacgggcttggacctgccgccgaggcatggacgtgatccgctccaccgaccccatggccagcttcttctctgctcctctccgatctcccggctccgccctgccctgcccgctcgttccaaaaccaacagggcgcgcgcgcggcggcgcagggagagcaccacctgatccgccgcgctcgctcgattttgctccggagtcagcagcaacgcgcgacggcgcgaggggaggaggaggcgagcttgaggaggggaaccgagcggactccggagtccgtggaggtgccgaccaaccaaaaaatatggcggaaaattagggacaaaacagtcttgtccacgccgtgggccgagaatgaggcccatctgagaaggccttgtaggcttaataggtgtgcttaggctgtatgacccacaattgaaatgctactcttagggcggtttagattgatgccaaaatgaaccttaccaaaatttagcaatgttaaaattttggtaaaattagtaacattgctaaaattttggtaggattggtttaataatgttgccaaaattctatacgcattgctaatatttggtaacaaactaaagtagccacatacttgtcaattttaccaaatatggtatggttgaaaatgtcatcaatctgaacaagcccttaattgtagattagtgatgaaggaatagtctaacatagaaggctgagtgctttccacgcacacttctttctttacttaaaatacatacaggaaaaactacaaaaagcaccccaaacatcacccggaatttgatattacccatataagacctttttttttcaattacatccctcctaatttattttgttttgatactttcccaactgccgttactcaatcattctcgtgaacgcaaaccccacaatatgacactactgcgaaaatatggtcgtcactcatatcggacaggcacgataaaaatgattatggaatcctcactcacagtatcatgttgttggactttggtagtcacgagtctcgttcttagatattggggtggctagaaaatgagttgttacgtttatcttacagagtttaattaacagtggctttattttggttgattcaagatgagaaaaataatatcggcatgacactatatagttgagaaaaaaatatgtatattcacgctaaatcttgtaacggaaagaaaaaatacataaaaataaacttattttgagatgaaggacataaggagcaagtaacatgcttatgactgagttcgggggtgagggttataaatcttcattcctagtacgaaaaacggaataatagttagttcatgattaattaagtaataattaaaataaaattttaaaatggattaatataattttttttaaagcaactttgttatagaaatttttgaaaaaaaaccacactatttagaagttagggaagcgtgtgcacgaaaaataagtggatagaagttagaaaaggagagtttaaggagtatttgagagaaggagaaataagaagattaagaagataggccgtgtttagttatttggctaatttttttttaagtatacggacacacatttgaagtattaaatgtagactaataataaaacaaactatatattccgcctgtaaactgcgaggtaaatttattaagcctaataaatccgtcgctagcaaatgtttacttagcatcacattgtcaaatcataacgcaattaggctcaaagaattcgtctcgcaatttacatgtaaactgtgtaaatcgggttttcttatccatatttaatgctttatgcatgtgtccaaatatttgatacaacattttttatctaaacactatatataacgagagaaatcttcactcttttctctttatcatccatgaaactcagcagcttacatctgggtccacctgtcagccagccagattgcgtacagacagagcttctccctcctctcctccctcgtttctcctgacacgctctcatcctacaaggctccaaccccaaggcaagcatgccaaacgcgcttcttccataaacccccgcaatcccaacaccctctccaaaccctctccgaccgatcgatcccccaccacctcctccgcctcccatggcggccgccgcggcggcggtcggcgtcgtcgccttgctgttgttgctgccgctcgccgcgtcggcgtacggcgacgggctgggccgagcggccgtgggggtcaactggggcacgatgacgtcccaccccatactcccgtgcgaggtggtgcggatgctggcggccaacggcgtcgcccgggtgaagatgttcgacgccgacccctggacggccgcgccgctcgcccacaccggcatccaggtcatgctcgccgtccccaacgaccagctcgcgcgcctcgccggcgacccgcgccgcgcctaccgctgggccgagcagaacgtctccgcctacctcgaggccggcgtcgacgtcaggtacgtacgcgcccccactgctgctctcgctcgctctacgggtggtgtgctatggtttgcctcggccgccggcgcggtgtcgcgtgtgcttctagtttgcggctgcatgccaagtgttcggtgttgcgtgcggcgagacgacgcggctcttactctgagcgcgggcgtgcgagctaggtgagggtatggaatgtctgttcgggcgcgtcgaaagtgttcgacggaatgccaccgttggacatgcagtttcgtgtaaccgtgatgtccgtgatcgattgatcgtgtagtgcctgtctgtctgatcgggtggtgctgtgagtgtgagatgcacatgcatgcttgcatttgtggttcatgcagaatggatagttttctgttgttgcagtgcttccttggtggctgggttaaggttcccctgtcgcctgaaagacatgagtgttaattagacatcacttacaatcgtgtcacttagataaatacagtaatgtatcctgcatcatgcaattagtttcatacttcatgcatatattgcatatgggtgtgtagcagtagccgtactgatcaggggatgtttggttgatgcctaaccttgccataactaagtttaggctagttgtggcatggtggcataaatgtggcttagaaatagttggccacaagtgtggcatgcttagctctaaatttgagagcatgacatgtgggtcccaaagttaagaaagtgtggcataacacaattgcggcagcgaaccaaacacatgcctaaaaaactgtggcatggctaaagtgtggcgtggcaaagtgtggcaaccaaccaaacagcccctcaaatctgttttgtgtatgatacctcagggtcgagagttaacgttgtaaatgttggagaaacatgctttgattggtttatggaatacagtgtgtttagatcatgttccctctgttgatggtgtttatatgcttccatggatgttgactgaactagttcattgaggaaacctattcaaaatgtggagcaagtaaacgcaggaatgagccgacaattggattaccatttctaggcttctaattgtagatgccaacggaagccagaatgaacttgtatttatgatatttagagcattttaatccttaattgtgctgaatttactgtggaaatttaggtgtgtttttattggtgaagaacagtaggaattcagtggatttcattgacttaattcctactggatttcagtgactccactttctagcaattccttttgtaattactgtgctacttaagtttatcatgcatgatgtgccaaactgagcatatctctatgaatccgatgggcgatggtgtgttgcatataaaatgtatgtacttgcctagttacttatttctgaatattcacattgtctttggtgatactctcctgttatattcactggttatgttaattgctcaggtatgtggctgttggcaatgagccttttctaaagagctacaatggcagcctaatcaatgtaacctttcctgcgctcaagaacatgcaaagagctctagacaaacttggtttaggtgatcatgtaaaggcagttgtcccactcaatgctgatgtctacaactcccctgagaataaaccagtgccatcagctgggagcttccgcaaggatatcaatgccctcatggttgacattgtcaatttcctcaatatgaataatgcaccctttgttgttaacatctacccatttctcagcctataccagaatccaaacttcccactcaatttttccttctttgatggtggtagcaagccagtttatgacaaaggtgtggtctacaccaatgtgtttgatgccaactttgacacccttgtttggtcactaaggaaggctggtgtgcctgacatgaaaatcattgttggtgaggttggttggccaactgatggtgataaacacgcaaatgtgagatatgcacagaagttctatgatggttttctgaagaagatggtcagaaacattgggacacctctcagacctggttggatggaagtttacctatttgcactgattgatgagaaccagaagagtgtactgcctgggcgctttgaacgtcactggggactactcacatatgatggaaaaccaaagttctctatggatctcagtggagatggcctagacaatctggttggagttgaagtggaatatttgccagcacagtggtgtgttttcaacaaggatgcaaaggataagttcaaagacttgccagccgctgtaaactacgcatgctcaaatgcagattgtacaccactgggctatggatcctcctgcaataatcttagccatgacggcaacatatcatatgcattcaacatctatttccaaacaatggaccaggatgttagggcatgctcttttgaaggcctcgcaaagatcacaacgataaacgcatcgcagggaggatgtttatttccagtgcagattctaagtgcttcagaaagggttgtgccactgagatttttgcctacatccttcttgattctcctaatggttgtgtccattcttacatagagtcagagacaatggaggaccggtaagtgctgataccttggggttgttggagcatgacacagtaaagaacataggaactgataccttgggttgttgaagagttgaagctgcagtaacataggtttgtaaagcatttttcccctcgtattttgataggcaaaacaaggtggaaacagagctgtatgccttcaccaccgtgccagcggtaatttgcatggatgagaaatatgagacaggatagactagcccttctttatacctctgttttcagcttgcgatcttgcagttcatttttttttattttctaaacgaccttgcagttcaattgtcaagctgaatgctggtattttacagcagcatgccttccaaatactgatgctacctacctgtaactgtaaggctgtaaaccaatgtattggcggtacagagtcatatgtgaatgaacgctctgcaattttagctgctcttgaattgcaaattttgtttcgtccctggatgttaatttttctttctctgttgaaagcaccatggataatggttgtctatttgagtttctctgcttaaaattagttggcagaaatttcctttcgatgcaaatcctaagctactggagaaccaaggtagagggctagaggccaccattggcaattcggcattgagaatcactggaagcagtatttagttactggaactgtcagatttacttcatgtatatggatcgcgctcctctgacgtaaagtcagagagacgtgggtcactgacgtgggggcccaacctttgtgggtcccacatgtcagtgacagggggactttacgtccgaggagactcatcccatgtatactatggtactgaacagcaaggaaaaattgacaaatgtgaggttcatgtatacacgcggataaacctgagcgacaaagaatcagcggcgattatttccgagtggacaaaccgttgaagtgttgacgtgctagaccaccggacggttgagctacagcttacacccaccgacccgaaaagatttaacttctagagagcccgatataacgtcaaactgtaaaaattacccgagatacagggctacaaatgtaaaattgatagcgatccgaagggttaaaagaatgaccgctacataggcgatagcgaatgaaatcgagcaaccgaacaatgttgggcctccatttagccaactagaaaggaaaaagtctactttgactgccttaaaactatgccaaatctaattcgtcccctcaaccagaaaaccaggtaaaacgactcccctaactattaaagttggtttaattgaactccctcagcagttttataagatggttttgctgatgtgacgttttgacgcggtttgaccagctgactcagcatgtgggacccacacgtcaatgtcacgttttcctcaaatctctttcatttctcttccccccccccccccccctcccctttttttttctccaggacggtaggagtgggcggtggctagccagcggccgtcttcggcttcgacgtcttctctgcgcccgtgtcgcggccattggcggagtacgccgggctccgccacacgggacggcgtgtccgtgaacatcgcaccgccaacgccgcctgcacgaccgttgataccagccacaacgcgtccacgccgaccagctgcgccacgctcgacgcctgcccgagcgcaccccacaggccggaggccgctcctcgccgggaagcagcgcatccgctctccgccgccgatccggcccccgctccccgcgtacgggccggagctccagcccccactccaccccgagaccacgccaccgtcccgtcgctccgcctcatggccaggtcgccgccgctccgctggaggccggtccgccgccgcgcgtcgcggggtcgcccagccgcggctccgcctgggcagtccccgcggctgcgcagaaccccgtgactgcgacgcttgggtggagggcgcacaccagcacgaacaaggactcatcctccatcatccactccaatccaactaatgcctgcaactacatcacctcatcttctccaatttcttcttcttgttgtttgttgcaatttactgactgatgaagaacgaagatgcttgcttggatactgctagtctgcgttcgttgcagagaaagcaagcaagcaaaataacaagtgaggaaaggaggaaagcagagtagcagacaaaagaaacagatcgatcaatgcgatgctatctctctctatttgaatttgaatagtagcagacaaaagtttatatatccgattcaaatttgaatttgaattcaaatattttttatatatagtatttctatacatctaaagtttatacacctaaagtttatatatccgattcaaatttgaatttgaattcaaatatttttcatatatagtatttctatacatttaaagtttatacacctaaagtttatagacctaaagtttatatacccgatttaaatttgaattttaattatatccgattcaaatttgaattcaaataattcaaatattttctatatatagtatttctatacatctaaagtttatagatccaaagtttataagtcaaaagtttatatacccgattcaaatttgaatttgaattcaaattttttatacataaatttttctaactttttgtttttttaaatttttttgtggtgtactgtaatagggaaagaaggggaggaggaagggggagaagggagccagggggggcgggaccgatcgcccattagcccccccccctgaacggcggcggtttgtggtggcgttcggaggcagaggggaaattttcggccttggagaaaaagaggggaaaaaaagagaaaagaaagtgagaaagaaaatgtgacatgacatgtaggtcccacgtgctgagtcagccagttggaccgagtcaaagcgccatgtcagtgaaaccatctctaaaacctctgagggagtcaaattgtaccggttttaatagttggaggagtcatcctacccagttttctggttaaggggtatgaattagattcgacgtaattttaagggagtcaatgtggactttttcccaacgagaaatggatccgatccaaggatctggctgggccaaaatgcgcttatagttttaagcctactaatgggccgtcttggcatgacaagccgagagcccgtgagatcgcaaaggacatagtagtttattttggagtaattgcagccatggtaaaacaacttgtcaggtgggtgcgatatagtgtaagaacttgagaattgaacgtttgagtgcaacaacttgacaagtgggtgcgttctagtacagaaacttaataatttagtattttggtgcatcaacttggctaagcatatgctaggtgagttcttttcacgatgccaatatgtcattacatagtaatcctacggatattaccttataatattgaatttaatctttaagaattatattgaacatacaatttacatccaaatacctttaagaatttttttttgtttttttctccttctcaaatatcaacagaaaaataataatttctacatccaattaaatagactttcagttattagttaataggataaaatataaatatgcttacacaaatccatgctagtatattgtcaaaataagtacttaaaaattggatttatataaaaatgctccttataattaagttgtcgcattacttcttaatttattgtatcaaaatcgtacctaccttgcaagttgttgtatttgtacgatcacttataaagttcttatactaaattgcacatacctgtcaagttgttgcactagaatgcttatttctcaagttattacaccaaattgcactcacctaccaaactgatgcactgtgggtgcaatgcaacatttacttttcaattattgcattcggcagtgggagattgagaggagatttgtctagttctctgcgcgcacgctttccgaactactgaactcaattacgtcagtgggagcttgagaggagatttgtctcgttatccacgcgcacgcttcccgaactactgaacaatgtattttttaaaaaaaagtttctataggaaagttgttttaaaaaatcatatgaatcatttttgaaatttaaaatagttaatactgaattaatcatgcgctaatgacacatgtataaaagttttatcttacgattataagtagaacgatagggttttagctctcatggtagtttgttctgacaaaacacaggattgaagaaacgaaggaaaggagaaccagttgcttcctgaaaaaatttgaagacgtgcgtttcttgttccattcatttgcagtagtcacaggtaaaaacattgatcaaatcatcaaattcacatgaaacgcagggctcctcttgtcattacagcaaaattgaagttgccggggtgtccagacttcatagtagtctacagcatggtagttaagatgtggcaaaattggcaacttaaaatcagtataactacagtaagataacatctgcatgaggcggactcctctactccactgaactgatggtggcaaaaaaaaaaaaaagtcacttggtagttgatagctcctgttggatgtaatgctacagaagtttgatgtcccaatcttgttcaggatcacatcttgaaatttcataacctcatcaagttgatgggaccaatcagtttcagcctgaagcagggccaaattgtcaaatgcacgtcctgatggatctgcctttttctaatgtcgatggatgatgaaagtagcagccgaaggaatttctgctagagatttattggcatcaggaaaagattaagagaaacgaatattgcagaaaaaatcagttagacgtgtaccaagttctgatgagaaagaagactaacctgggttagcaggattggtgactgataaatgggagatcccagcattattggtcgaactaatttctgaaggatatcctacagctgaacatggaatgaatccaggatataccgtatggtacctcgtacagaagtcactaaacctctaggctttagcctctagctcaggttctatatggagttatggacaactaatggcttcaagttagtatcaagttagtatcagtatatttcatgtcgcaccagccaaaaaataaggtgcgcaggagtaaagattatatgaaaggaaaacagtttgatacttcttgctccagacatacagaaaaggaaacggtgttgtttcactggatggcgctgctttagcttgtatcttcgtcagaccctgatgatcaaggaaaaaaaaagtatcagcatatgatttttttttgtttatttaaaaagatgctcaactggttgtttgtcccactaaataacactgagattggtttacaaatgaaaagtgtcacatcaccataattcaacgaatgttactttaagctgcaaaacttgtaaataaaaggtttttggatctgcagatcagaagccactatagaacacatctaatactatatagcaaaacaatctggcaatgcaaatgctggcagtgtcattagcaaggatataaacttttcaacaagagagaatttacagaggagatactgctataggggagtctacagaggagatactactggaaaaaggccaacagcagcacaacacttacaatctcaccttcagacgatgggcagaatcacgaaaaaaaagaatacatatccttggaatttcttctgtactctgcccttgtttagttccaaactttttcttcaaacttccaaccttttccatcacatcaaaactttcctacacacacaaacgtccaacttttccgtcaaatcgttccaatttcaaccaaactttcaattttagcgtgaactaaacacaccctctgtagcactcatttcattcaagtgtaattagtacctgtcagaaggaaacataaatgagctaagctagaaataaagcattccgttagatgtgatagccttgcaagcctcaaaatagcaatcatttatatttttatgtaatagcacaaatattaacagaattaatttagaatatttagtctacataaagcctttgttattccagtttgcctgagattgagggccctgttcggtgtgactagatggcagccagcagctacggtagcaatatacaatttctactgtagtcactgcagcagcagtgctgcacagccgctgtagttggccggccgaacacaccctgaacctgcaactactaggtggtagcgtcaaacgtatggtcttcaacaatgtcagtgacagatagctatatcaaaccagtatcttatcatttcattaaaaaggaaaaatatatctaggtatggacaccaggaacatggtagagactgaccaagggcaagtctagataggtctgagcatgtaaaacatagccttgattttgaaaaatgggaaacagaaagagattcaagagtcaaataagtgtgcactcttgtgggaaataattggttggtttgcttttcagctttgttagctccataattataccaatgaagtgcatgaaatcatccaaaataactgtccgaaaaactaatttctattttcacacattgaagttatgacaaccaggtaaagtattttttacactatacaaggtattggtaaaagctgttcaagcactgtcaaaggtctaaagctcaagttcattaactcacatcagtgatcaaaacttaagctgatttttcccagactacttcccctctctttggaatatttgaagagtaggcatccctgcatgaaagaaactgcctgaatggcttgttcacaatactaaaaaactggaatcaagtaccactaaaataaaatatactagaattttattctaacctggttaacatccttgatctatcctgcatgcacctaggccatccaacatttgaaaaaacttcatagcagaatttggtttgcttaaagatgctgtaaacatcatttatgtaaatgcagagagagactgagttggatggtcccaggaagtgcaccgtgtgaaattcatagattcaatgattgatttggggggattactgatgcaactatgaggcaaactcatagtttgttttcttgcatgtgtttccaatatgtaaacatgacaattcagatttgctgcataatatggatccggtagttctcatactgcactatagtttgtcaaggaggaaagtcaagtgctggtgcaaaaccaggtcgtctcgctagttctgcattaataaaacctgcacccttcgtctttaagtgactattatcagtgatgaccagcaggacaaatttgtcagatcttctgctatcctcctgtaacaatgcaaacaacttaaaaggttcacctccaatttcctgatattctgcactcttgtaatttagcaaatgcccgctttcattgcacctgccattcttccaattcccaatgatagaatcggtcctaagatcacgtccaaacacagaagcagcactagtgtagaccttccgctcatcagcaaaagtttctttgtctttctcttcttccaatgtgaataatccaatttcttcaagtgtgcttcttatatctctttgttctgaatagcaattatcttcggcatcctgttctggagccaaagtttctttagaatttctttttgattccacccaaccttcagattttttatacattcctacaagtgcatttgccacatatacatcagaaatcaggcccatttttataatggaagcatgcagttgccttcccaaatgaatagcacaaagatcagcacaccccctcaagattcttgcaaaggtaacacggtttgcacgcaacccactctgttgcatcatggagaaaaattgaagagcttcatcactgcatctattttgaatataacccaacatcaacattgcatatgaattgatgtttcgactcctcatgctatggaaaaacctacaagcattagcaatgcacccacacttgacataaaagtttatgatagagtttccaacaacaacatccaagtattcagaaccaatcttcacaagatggccatggatttgctcaccagcctcctttgctcctatatcagcacatgccccaagaacagttgagaaggtgaaatgatcaggacgcagaccagaacgatattctctgcagaagagtagaagagctttctgtggcagtgaattccagcaatatccagagatcatggcattgattatcactagatttcgtggaaataatgtgctagagaataactgagaagcccactcaatgtgatggcattttgcatacatgtttactagggatgcactgatgaaatcaacaagtagcccaagtttaagagctaaagagtgaatctgctttcccttgtacatgtcttcaagtcctgtacaggcatttattagattagcaacacagtgctgatctaatggttctccagagtttcttaactctaaaaaataaccaaatgctctttcatattgtaggttcttgacacagcctgccatgactgcagtccatgatatgacatctcgggattgcatagttttaaagattgattccgcgtgaatcaacgatccaatttcagagtatatcgatataagagaattgcaaacattagtataagataaatccccagttctgaaagtataagcatgcatctgttgaacttcctctttggtctgacagatatttatcacagtaaccaaatccccttcccttaaattgagacccgaataaagaagaacctctgcgagtttcacagcttcaccctgacaaccatttgagtgataacctgagattgccaaagaatacaaagacgcatcatgccttctaactgcaggaacaagctttttgatgtactgagtctcacctgccttcccagctgacttgatcagttcagacacaacaaaacagtctcttcccaaccccgctttaagtgcataaacatgaatgttcctagaaagctcaaatgctcccagaatagcagcgacgctagcaactaccctcaatgtcaccacatccattgccatgccaactcgatgcatatcctgacaaagctccacggcatccatgaaacagttattctcaacaaaacctgaaatcattgcattccaagcaactgagctcttcaccggaattccattgaacatcctgaatgaatagccaacattgccacatttcgcatacatatcaacgaatccaacctccacaaacctatcagcacccaatccagacttgaccaccattccatgaaccatgagcccctgttctatgacaccagaccgagcacaggcgttcagcaccgatgagatgacgaaccgatttggcttcacctcagaagacaggagttccttgaacagcccaatggcctcgaagcagtgcccgcggctggcgtgcgccgcgatgacggtacaccatgacacgatgtccttgttcggcatttcgtcgaacaggtggcgacaggcagccatgagaccgcctttggcataagtgtccatcaggacgttggacacgagcgacacggatgcgaagccgcgcttgaggacgtgcccgtggacggcgcccgcgcccgcggcgagagcgtcgcgcgcgcagcgccgcaggaggcgcacgtagaggcgcgcctcggaggacgggaagaggagctcgatggggcccacgatctccagcaccgcggagacgatcccatgccccccgccgactcgggcaccagaagaggccgcggcgatggcggcggcggcggcggaggaggaggaggaagagaggagcctagatggtgcgggcttggagacgagcgcggaatggaggagtagcagagggagagaccgggacataagagaggcggtggatgcgtcgccggagatgggcgacagcggcggcggcggcggtggaggaggacgggatcgccacgggcatagtcgccggcggcgagaggggtttggagcctagagatgtgggcccaccttcgtcagagacaccactcccaaaagtccccagattcgctgaacgctctacgcctcttgccttgcgctcgcgtaatttcgtaaaccgccaactaaaatctctccgtgaccgttcgatcacgtttggacggtagggattctttagatgccctggctcgtgacgtcatcatcttcttcccccaaaccgtacggagtccggttctagtagcctcttaatcaaaaatcgagatttaatccagcaaattaaccgagacggagatggggttcccgacgctgaagcggctactgtccatgcagaaggagcggcggctgcgtcagtatcagcgctggcggcggaatcggccaccgcggcaaatccaagaccgtagaagccgcctcttgcgctgtgtacacagcaaatcctcagccatggtaaaagtttgagccttgttttcttattgtttctgatgaaaatgcttcagaaggatcactgtttacttgtctagttatagattgtgtacttcctccgtcccaaaataagtgcagccatggttttccacgcccaactttaaccgttcgtcttatttaaaatttttttgaaaaaaaataaaaacataagtcacgagtagtaaagtagtattcatgttttaatcatctcatgacaacaaaatgctaattataaaaaaaattcaaataagacggatgatcaaaattaggcatggaaattcatggctgcacttattttaggacggaggtagtatcatctactgtcctccgtcttaaaatctgatccaagccccgcccctccggccttgagaaaggatcggggttgcacttgtggttgattctaactatatttcagtcctcctaatttgtgtcctcctaatttgtggttgcacttggatggcacaactgctatggttgcgcaaaaaataggataagttcctcaaagaatatggcacacggaaaaatgaacattaaaatgaccaaaacttgttttactgaacatttggagtgctgatacaatatacaaccacatcccctagggagagactaaaactgaattcaatttacagtactatctgggttttacattttggatgtcacacaagaactcgattggctatttcttgccatttcggtattagaaatgcagggcaatatgcttcactcttccattgtttactatttccataacacttacacttgacataagattgcttaaaatacgcagctaaacacaggaggcatcagaaaagtgttaaaaaaaggggtttccaccaacttggggcaaatgactttggttgatggggaaactggcattctgcatctgatgtgtaaccttaacatcatgttgttggactatgaactgatctgcaaaatagttattgtagcatgacatgatataataaggtttagagggaaatcacgatggagttaaattgaattcagaagatggcgaaacaaagtaaaaaaaattacggttgttcgtcgtcattggtggcagaatttgtggagttatcagatcagaattaacaaatcctgtgaatggagcacgcggcagcattgaagtactacccgtatgcggtaatgctcctcgcatggaagacaaagaagggaactgtacatagatggaaaaaaaaaagatcttcatttacctaatagaaaacagtaaaaatgggtatccttcttgataacttagacattgtgattccatcatgtgctaccatgatcagtaaatttcaagaaagtgacacaagtagatgtgtaacaatacaatataaaactcaacagaagaaatgcaaccacattcaggaaggagatacaaggttaaggaccataaaggcaagtcaacagtgcattcagaatcattctttctcgctgggcctgtttagaacaattcttgatcaaagagctgggaattcccacatcaaaggaaaaatgatgtcaacaatacgcagaacctatgtggcaaatgagtcaacatattgtatggccccagtgcatccggaccacccagatcttatctaattctttactactcaaacaagaggtaaaactctgtcatactgtcgatgcatgagaagatgagctagcaaggaacctttggcatgttagccaaattcaatgaactttggatgaaaaaatgaatgtcttgaaagggcctaatcaacaagatgaaaaaaggaacaagttttttttttagaaaaagaaaagaaacaagtaattgaatctgtgaactggtatgagtatgacatcatagaacttacattggcagctcctacaggatattgcatgttgtattgtccatatcccatatttaactgaggatttgctctccaatcccagtttgcagcatatgggtggtaactcatggtaaaaatatcctacaaattgttctcgttttagagaaaacaaatatggagcacagtaagttattttgagcatctattacctctggaagtgcctttcctctactagatgtggtgtccacagcaggtctctgtgatgctagtgttcctgccaatatatttgagccatgatttgaaggaagagcatggctcccttgtattgatgcttgcgatgcggctccccacaactgaaaataatcatgcagcaaaacaaaggtctaatacaattgctcaatggaaatagttcttcttacacaatatacaagcagagagctaacctggctattaaccggagcactattagctctgtttagtggagaactgtaagactggatattatctgtggggcggaaaaagaactggttctgctgactgccgttatttgcttgggaaaaagacaaggacttggtactttgcctggttggaaaactaatttgaggtgctgagacagaatttaggatctgaaccagcggaccgttcaaagaattggtactggaaattgaagtggctgtagcgtttttaggagtagtgtcatcaaaagtagcccaaccaacatcaggtaaaggtgagctcttctgcacttcagtttgaccaaaaccttgatgaggctcgaaatctgaatcaaagtcaatcaaacttttcgatatttctaatttaacatctgttgtagtttttgaactgggatcagcagccctcggtggcactactttctgcaaaataggacttccacataaatattttaagttaaagatatcattccatttttactttgttttttgtgacatagaattcgtctgacttctgaaataggacaagtattctcaagaggcaagaccactgttaggacttgggaatataaatatggaaatccctccctagctacctaaaataatgtttccacaaaccagataagaagagcatggcaaaacctgtgagctagcttacaatatgacatattgttggtaaaagttgaaatcaagaataggaccttatgtaagaggaaacaagaagagaaactatgggcaaagcatgcaaacagcaaaagtaagatcagcaggaattggattacctgtatttcagcaggagtggtagatgttgtggctttatgagatctaggagggtcaggaagccttataggcagaacttttctattagtttctttggaaggttcaaccacagaagatactgatttggtcgtatccttaagattattttctgagcttccacctgtcttttgaagtccatccaggtattgatgtttcccagtgttggcattttccctttctgtagtggttctattcttttgatccactttagcaggtactggatgcttattgagattgttttggtcttctgaggtgcttgctgtgctatgctgtggaccgtgattatcttcagaagttccaccatatgggcctctttgaactcccctggatgaatctatattgttgtttctgtaagtgtcatcccgactaccctgagttttcattcagatgtttcgtgtgttacaaaaagaggggagagactaatgctatgtgtttaacagttatggctagcgcaagccaatgacaaataccttcgcttgtggttgatggttaccaattctttctgctgtgaaccttcggtcaacatatacaatcttgatgaagtttctgagcctatctacatcactatatgacagtactcaaacatcaacagcagattcacatcatacattaagagtctatgataatcatctggtttagtggcagacctaatgtcaggaagaggctgtccttggaagtcccaatgtttcaaatatatttccttaccacgctgaactatcaaaaatatatgttgtaagacttaaaagcagacaccaagcatatcaggatttaaattataaataatggtattaagccaacctcgtttcccccttcttgaagagcagaaacttcttgagaagtaaatttagccattgatattgattttacacgatgagtgaactcccgactgaagaataattaaagttcagtaattagacaacatttatcaggagtttattacttctgcacataaattcataattgtcatagtcaatcacaagtagttgtggaattgcatttttaaagtaagaaacagaggaaacactagaaggatattttcaccacttactgtattccgctgcaactaacacagacgaaagttgagaagcttgtgcatacgtattgtggtccctgatgatgaagaatattgtttggttatttatgtcatgaaggaatattatacatttttcatctgtcatcgtattactaccacttaacaatatatcatttcattgctaaagaaacaatgcattgttgcattcactcaactactcaccagatcatttattctagaaaagaaacatggttaaatcatataattttccagacaaaattatacatactgataatgagataatattcaaaatgcttatgaggtgagccaatgtttgataggcagttcaacctcctcagttcatcaagaagacaactaagtattatttataaagtggccaagtgggcatattttgctgcagcagatatctaaagctagtgaaaaacattaggcagtatcactgtcataattatctagtttattgttattgatccaaaccacaagtacctattactaatcggcaaccattttgcaatcctgtgcactctacaaaagttcacccagagctcattttgtttgttactaccttgttactaactcaatgttgatgtggtcaatttggtatatgaatccatacactgggaaaggcatctattatgaatttagagcacgagatctgtaataatatcaaacatcgcaggcacttgtgttatgatctcttggagccaaaatgaaatttcgttatttcgcacattcccgcatatggtaatggtggtaatgtgttattagtattaataacgtgtaaatccatatgaccaggtactagttactaaacagaaactagtaattaataattcatttccctaatgacagtttcaccatcctcaaaattcctaacccatatacaactgaggaaataagaatcagattaaccaccattaataattcatttccgtaatgacagtttcaccatcctaaaaattcctaacccatatgatttcagagtttcagcaacaattcagaaggaaataagccgagcaaagcctgaagacatacagagacagagcagctcagaaccttagccctcctcacaagatgagcaagctacagtacctttaccttccttcctaacacaccattttttgtgtccacccaaaagatcaaaattctcaaaacttttctcagagaaaaatcgagctcaccaggctgttgcagttgatgcagcggcggttgccgggcagcttgagcagggcccggatggccctctcgttcctctcctcctccttcaccctgctccccatccaccccctgctctgctccgcgattcgatccgcagcaacaacgaaccggcggtggtgctccgacttccaagagcgagatgcttcgaagatttctcgatggagtttggcaacttttcttgctgttcttggcggctttgaggcggaggagtggaggaggtgggaagagaaggggaggtcagcgtcggcgtggaggctttgaagggctcggtcaccttcgcctcgcctcgttggctggtcgcgtggccgtggtcgtgggtgctgacatgtggcgtgctccggctaattaccacaatgcccttctctgattaaagaacctgattagtggatcacagtagattacccgtttccctatggtgattaacagccctcatcgtttatctttaatttctactaaaacttaattttgaagctgatgatcgtagtttacttttttaagcattaatttaaaaatctctaagaacatatataaaaaggttttatctatatttttttctttgataagcgtatgccaatcgataaggctataaaattatctgtcattttaattccagacagatcagtggttaaaattgttgttgttattcttaaaagggtatgctgattttggtaggattagctcgggctaaccatcaaccttaatgatgtgacaagtgttccggtacccatgaaatgagcattcagtacagtatgattcaagagttattacacaaaaatggataaagtggttagctcactaactaaagttagttaaagtgacataatctccagtgatcacttagttgagctacttttgagtagattaaaaactgaaaagaggagcaatcaaagccttctagataaagaagacaaccaaagcagagctctgaaatctgataaagaaaagaattctgaagtctgattgcctgaacatccactcccgagggcattatcggtacatttctgttccaaatgggcacgcatgcatcacgcatgacactctcgaacgggttcggaattcagagaattggagattgcctgataagaaaaacacgatttggttcttctagatataaatttttgaaggaaaataatgggaacaagccgtcagattcagagattggagaggaattgacgaccaattcagtcgagagaagaggaggcggcgtcgtgttcggtacgcgtccgctgttagaaggcgaaatcaacattggaaaaacgcacggtcaatacgaggaaaatgattagttagttctggaatggttggttaatagctgtaatggctggcaaatggggatgtttttcttctctgataccgacattttgttctagaaaactaatttgaccttgtactatattactaattattttcatgtggttcaggaaagcaacgtacaactgccttctttttacatgttgtccactgttaacaaaattaccaccattgtttatatgagaatacatgtattgtttatcacaagaaaataattatattgttatattaacaattcacaaatcacaggtatgcgccaacttatccttaaaaagcagtaaaaaggaacgaacagagcatgcaactagttttgcaaattctacacaaaagtatggccccgtttggatcatatgatttttttttttgacagaggaagcacccactacacggatgacatgaatatctttttcttggcagattagtaaccacactttctttgatgaataatactacttttttatataatactaattacaagggaattattgttttatactccctccgtcccaaaatataacaacttttaggcaatgtttggtttatgggagtaatccattagttcctccattttagttcctaataatccaaacagggataactaaaaggaactaaaagtgtatatgaggactaaggacctgtttgattcagcttatgattattataatctggattattaggagtaagctgaaacaaacaagtagattattatgctaaattattataatctataagccaaattactataatccaataatctcctctagaggagctttttccagattattgagtgtctaaagacccactactcttagatgcctctaataatccagagaaacaaacaacttgtagcttattttatgccagcttattataatccagcttacattaatctgatttaataatctagattacaataatcttaagctgaaacaaacagggcctaaaatacattaggccctcttgaaggtacttatagggactaaagtgacaacctctctcttctctctccctcggtccatgtgcttttagtcccttctagtctttggatctaaacagtaggggaccaaagtttttagtccagagactatttttagtctagggctaaatgatccttaggcacttaagatttgtcccaaaataataacaaattctccaccaatattctcttcccaatcaatcataacccttcaccgttcactttttccacctacctccacttctcaaccaatcataacccattcctatttaattttatctacttttcttaataaccgtgtctaactttaaaattctaattcggactgacagagtactataatattcattcaactttgaaggaggcaaagcacataaaaccttcttttttgggctggtttgcaatccagtcaagtcccccatatagaaggactgggattgcgggcctcctaagtaaggcccaagcatataaagaggtgcctagactttatgtaaaaaagtttgaaaattcgaaatagataagaattcaaattcaaacccccaacaatttcttcaaaagaagggcattcctaggaatcgtatcttcaacaaaaggagtatcgtacaaaagagagagagagagagagcctctttagcctttagcaaaatcacctgcctctttttgcaaaatcacctttctttacgaaaagggaacattgccattaggcccccacgcgcagtatgtgggccatacctgtcagcctcacaaaaaggatgtctttacctcgtggatttggacaatctaatggttttaaatatttttttaatcgtatccaacttctctcctccagtcctctccctcccgtagaccgtggatatcgtagaacaaacggaagaacacgagaagcctctcgaagcttccagaatcccgattccaccagattcctcccccccccccccggagccctaattctctcgcgcggttcgtcccgcgacctcccggttcctgccaatggccgacagggagaaggcggaggagacggaggaggagtacgagagcgacctcgacgacgcgcccctcccggcggtgcggcgccgggacgcggcgagcgacgacgacgaggaggaggaggaggaggaggaggaaggggcgaggccctctccgcctacgaaggccggatccgacgcggaatccgacgggcaaggcgccgccgaggtgtacgacgacgacgacgcgtacgaagatgacgaagggtacgaggaatacggggaggtgtacgaggagttcgagcaagggcgaggcgttgcgggcggagtggccaccggggcggtggccgcagcgggggaggaggcggggatgggtatgaagggggaagcggaaggtgaggcgtcggcggcagcggcggagggagaggaggggaagaaggggagcgagccctatgccgtcccgacggctggcgccttctacatgcacgacgaccgcttccaggaggcccgtggccatgggcgccaaaggttccggcctttcaaccttcaattgctgcttgatttgctgttgtttccttatatatctagggtatgatgatatgatctagagaacttggtagcctagtttcaaccttcactagtttggtaaccattagtgttctctgaaaccactgcttaagtgcattgcgtgttcaatagttcaattaatatcatctaagttgataacacgagtgtgtcatgctaactagtcctgtggaattgttagaagaggctaaagtttgatatttatatgtgcagtagtagtgtagtatttgatagatacaagtcataaaacggcttaaatgtatttattttcgcaattggtctattttggttctctagatttggtacggttgctcgttgttgcatctcttcgttatgatgtcctgcctaagtttcctttacaggataaccaaggtctgtgagtagcttattgagtaattccccagcatatgataatacatgggtttataacattgaactataactcgtaaagcacgcaaaacatgagctaaaataacaacacgaagtcatgtattcacaggcattactttacagagttgattgttatatgccaagtcgcaaacatgaaacaaaaatgaaactttgcctacaagtttttaaatctggtgtttcatgtgaaattgatttagtattaatgcaaattggacacacttattaaaaagtagaagcgtttaactttgaagtctgatcttgttcaagtgtttctactagaacaatacctacatgatctgaaacatggtctactaggatacactactacaatatagatgagactggtaaggtatggcatggctatgccaataccatgatacattatctctttactattttaaaaagaaaagttgtgtataatggcgagctctacacccacaagtactctagaagatcttttcaggttagatatagtttgcaagaactttaaaaaaatataatattgtagatcttctaaaaatacactattatcatgtaggttgttgatcgtttttacgtagtcatgtctaaaaaattttagatttatcattttcttaagtttaacttatggatcttatactacatttttttaatgctagttacctcatacctgaaatgattaatcagttttagtgcatcagatgaacgaatgcatcacagttgaattcaagcatagttgaaatcatctgttttgaggagggccaatcgcaaatagcttggattgaaccaaatccaaaattttaccttttcttttgcatgctcccctagtttgggaagcatgaatcttaccaagttgggcattgcttagatcaatgtcaaccaacagaaaaaagagaagtaagcccatcagatactaaaccagtaaacactccattgaccattccatactgtacatcattctataattatacacaataattatgatttgtggtaaaaattgttgatagtgtggtagaatgaattgaagtgtattgaacaaatactggaaaatttgtctcaacgaactgaataataggttgtatttactgtttttttcccttttaaaagtagttgtttgactggtgtgctagtgttccagtgtacaaactggatgctgaacccaactaagctagacaagtttgattatgttgaatgctttatctcaattttaaggaatccaatatgatactctgtttcattctctggacatccatgatctatattttaatttctgctacccatgttgtcatttcaggagaatggtgggtgatagacggctgtggaatgctaaagaggatcaagcgtgggtccatgacagatttgatgaaatgaatttacatgatttccataatgactacgtgagtatcatattgtctttttctgtgtgttgaactattgattcatctttcttaccaagatgcttcttttattgattgtactatagacaagaagaaggcccagaggtcgatttagaggacgtggtggtgcacctgttggtaaagttcgtggtggtagccgtgataatttcagaggcaacaggtcgcagacatactatcgtgatggtgctaagaactacatatacgttccgaaagaacctcatagttaccatgataacaccaagaaggttcaacaggttctgaatgataatggcaagaatagaaccatcaaaccacctaatcctcgtgatggcgatgccaacaatttcgattttgttcgaaaagagtctcgccctctttatggcaatgccaaaagtaataagagtgcaccgagagtagttcgaggaagaggctctaaacgttaccaaccacattggaggagtaccgctgagatatcttcagagcataataataagtgagtggaaggtttcttcttatgtgctatctgtgtctttgttttgttaatatagaacttactgtggtactttttgtttttgttgctcatacttcagatcacaaaatcttgaaaacacttcttcaaatgcaaacttgggaaaacaccaacatcaagcttcaaattctcaaccagaacgaggatttccgatgaagcagagctttgcatcaaatttgaattcagcttcacctcccttttacccttctaggccatctcatcaggaactcccagtgagtcagaggggggatggacaacccagtaccactactagacacttctcatcccccattggtatggagcatgtctctccaaccccacagtatggccctctcttaagagggaaagcctttgtaccgtctgctgggcatggcaagttgcatgctgaagttcctataaagggcatggatcatccttcatttcattcatctacatcatcatcaactagtcaatttcctatagctactaatcaggtcactggaaattcggctaagtccccacacccaattgtccaacaaaggttggttcaatcatttaatcaatccacaccaaagatgcctggtcagatgtttgctgcgcaatttgctagcagtgataaattgccatcttccatgcaatctacatcaacaattttgactgaaggcactgaaatttcttcacctcatggttccaacaaatctaatactagattgatggcaaagggacaacatagtgaccagggagaagaacatgcttcttttatgtatggtggagctcaagttcttgggactacaggatcacttggtgaccaaaatttccatggaacccctgcactatttccaggttcgtatttttactattcacacggcaatatagtaaccagagtgttaaatgagtaaacgattacatgggtgaggggaaaagaaataatccaatttctaaaggcttattcctccattgattagagggtgcatgctatgtgccttgagtgaaaatgtttacagtgatgttagtggatttataatctactttgaacttctggtttgatttctgaaaagtagtgttattttcagtagactgccaccccattggagtgaactgaaccaagtttttgtttccaaaaccattctgcaatatgcctttagcttttttttttcccatacagttatgcagtttggaggccagcatccaggtgggactggcgttccctcaattggcatggctctaccaggatttgtgtctcaacaacaacttggtctgagcaattctgaaatgacttggtaatgactctttgaactcttagaatagttgtttgctttatttttctctacctccaattggtatgatgtggttatcacattgtacttcatttagatgttagcacactgctgtttgctcaggcctaatttttttgtgggttgtatctgaatgaaactaggctaccgatattggctggtgcttctggagctttgggagcaacgtatggttcaccttatattactgtagatggcagctattatccccgaacttctgaacatgcatcttcatcagtttctttgaggtatgttagtctaatactctaatatgattcatgttgcaagaatttggatttcgcacacaaggcatatatactgttgagaattgagataatgttaatttaatgatgattcatccttttgttaaattctggttctgaggtatgatcacctattaccaacatgttgacgacaataaataatatgctatgaactactccctccgggttgataatacttgtcgttttggacaagggcacggtctccaaaaaaaaactttaaccattattttccattataatatgtataaaagtgtgaaaaaatatatgattttattaaagtactttttaagactaatctatacatgtagtcaccatatttgaaagacaaatattttaaaaatgattcataatcaaatattctaaagtttgatctcacccttgtctaaaacgacaagtaatatcaacccggagggagtagtagttaatgcccttacatagccctaatctgaggacttatattctatgatttccctctaccaatgtgcttgctttagctgtcttcctgtgggtactgccgtactggttgaccagccgtatcatcagaataggttttggtagataattggagtaacactactctcctgatctggagaggttgatgattactttatttaggttgaataataattgttttgctgcgatttttctgttttgttgtcttgtgcaactgcaagggggcaatttgaatggcatggggatacaatcattatgcatgcacctagcattttcctattatacgtagtctaattgaacaaatgatcgtcattgatttctgtcccagccttcatcaccaaccaccaacacaacatgcacaaacagaaaaatgttaatgagaatacaaaggatcctagtgcttcaatcatcctagtgctttcgatagtaatgattctttctgtttcttttacagagaacccagtgcctcttctcagttgaagtcacaagaaataactggtaaaggcatcttccatccctttccatttattttgtcttctcaattggtatttattttggggtatcttctcctatttttgccacataaatgtaccgaggccttttcctcttttgcagaggctttaaatgatgaacttagtcaacgccaacataaacctcggaggtatgttaaagtttatgtgttctgtttgctgtatgctttctgttctaatactatgtgttaataccatgttgtgtcttgttacagatattcggaaatgaactttggcaaatgaacatagtgacgatggtgttaatgaggacttcatctgttagatttgggtctgtgcaagacttctatctcaaggcctttctgggtccttgcaacacttcagtgtctgatctgtagcactttgggctgtatccagaatgaatgccaggtacgcatgacttctgttgttctttcattgtgttagactggtgttgttctgtggtcttgccctttcacccaaaccttgatcccttgagggtaacataaggaaaatcctttagcagtagacattagatgtctgttgtctttctattcatatatatctttcacttactatgtataataaggaaatttattttctggcattcacttcataattcttttatggtagattcacagtggcaaccaagtatggaacatgttttcatttgttaaggcttctgaagctagttcagagtcttattctattgattatccaagtttattatcacttagtgagctactaagaatttctgcagtgtttccatagatatctagtattttagtgaataaatatgagattgatattttctaattaaaggaggtaattgaatcgtagctaaaactagcttaacaacttgcaattgcttttggaagtatagtgtgtccgtttcttaatttggcatgctaagtccaaattgtggtataccctgaatctgtccttttctccatttccttcgtcacaactcataaacgaatacatgtctcctctcttctaactgcatttggttgatgagtgactggccatttttccacgagaaaagatatttcagcaagacactttaaatggctagatgtttgtattgctcttgtacctcaaccttggataggcagttgtcatgtatattgtgctcctacatgtgcccatgagcattttagaatcgtaggatatgctttgatttgacaaagttggtgctgctccttttcaggtttgacagttgaaggtgtttatatccttactatagtcatttgcagtgattattctgatgggcagttgctattgtgtaattaggtatgattttcgacaattgacgccatttgaatccttactatttgatggacgttctgaaccctgttaccctgtcaggtgagatttacatggtacaccgtccatgttgctattgatcatcttcacattggcatgcatatatgaataatgcgcgatggagaatacgtgaggtctctgttattgtaagctccttttcttggtgaaagagggggaatacaaggtggtgttgggtttgcttgtgttgctcagctgacttgatcactgtcggttaatccgttatgacattttgaagatctgctatgtgatgtgttccctttgctgaagatattgtcgcgatatactagttcggtacgtgttagtgttacacagagttctttctgttcagttcatactacttgtaactgtgtaagcaccaggtcttctgaattactacaattttaccattggtttccctttatagtggagtatgatattaacaactactacgtagaaagatgtaaaagtgagaaacttatgtgaatgttgtacatgcacgtcttataaaaaaatatttatttattttggtcattggctatccatgttgaccccccgctttccagacatgattaccttgtcttttggcctataagtttaggtggtcagggcatcacaaatgcatctggtcggatcacgttctcttccaataaaactagtgccgggtattcaagaaatcatcaggcttattacgcaagagaataaaaggacccttttaacttgtatgctacagcaataaaaagaatttcacctctaacacataaaaatggtagctatgccgtttcaaaaaaaaaaaaaaggtagctatactaatagttttaattttggcctttgttgcgcgatgcgcatgcccccaaacaagcaaatgcaagcattacaaattcatcagacgtctgaggctgtgtttagttcgtgtgctaattttttttaaagtatacggacacatatttgaagcattaaacgtagactaataacaaaacaaattacagattccgcctataaactgtgcgacgaatatattaagcctaattaatccatcattagcaaatgtttactgtagcaccacattataaaatcatggcataattaggctcaaaagattcgtctcacgatttacatacaaactgtgcaattggtttttttcgtccacatttaatgctctatgcatgtgtcgaaacatttgatttgacggaaaagttagaattttgaagagaaaagtttaaatctaaacacgacctgatttcttgtccctgacatggctgtataatttcaactttttttttcaaactttcaacttttccgtcacattgaactttcataggtacataaatgaacaacttttccattacatcgttctaattttttcaaactttcaattttgacgtgtaactaaacacagccgtagttttactactactttatcttgtgcagttcaataatactaatacttcctcttccgaaaggaattacttctatcattatcttgcatttagtacgcaggagcagtaccatgccgtacgcacaatcccttattggtttgcgtgccgttatcaccttgcacagttgcactatcccaacgattcttctgcaattgcgctggtccattggtcacccatgcatatgcctgaagcttctcttttctgatctttctgatccacaaacgcatgggcatggcaagaaaatggcagaaccatacgcggcgatctgtcactcataatctgatgcctgcatatacgcctcttcttctctgcttcctgaatttttatgtccatgccatgccaaggtagaacaattgcaatatattaaaagaaatggccaatggtctattggcagcatgattggttactctttggcaattggcaccaatgattcgacctttctatttttttgcacaacatattgtcctccattgcatcttccagtttagcttctctcctatgatggaacaactacacgattccagtatcagtagcacatcactgatcagtggccactagtgcatgtttgccaaggttgcacattgtcacatggagagcccagctgcttgtctcctcccacctatcaagccaaaacttgtcagcatccagcacggcatgctatataggcctgtttagattccaactttttttcttcaaatttctaacttttctatcacattgaatttttctacacacacaaactttcaacttttccgtcacatcgttttaatttttccaaacttccaattttgacgtggaactaaatacaaccatagtgttgtttgcaacaactctttagggtgtgtttagttcacaccaaattgaagtttggttgtaattggaacgatgtgacggaaaagttggaagtttgtgtgtgtagaaaagttttgatgtgatggaaaagttggaagttcgaagaaaaagtttggaactaaactcgaccttagcaagaaaaacatctactccatccataaaaaaatataaccatttctgttatttgaaatatatccataaatataagcatttctacagtagtattactttcccaacccaaccgtttatggtttaggcccttattaattcccaaaataaaaacttttcacccatcacatcgaatatttggatacatgcatggagtattaaatgtgaaaaaaaaccaattacacagtttgcgtgtaaattacgagacgaatcttttaagcctaattgcgtcatgatttgacaatgtgatactacagtaaacatttgctaatgacggattaattaggcttaataaattcatctcgcagtttcctgacagaatctgtaatttattttattgttagacaatgtttaatacttcaaatgtatgtacgtatatacgatgtgacaccccaaaacaaacttttttgccatctaaaccgggccttaattttcacctcatcctacccccaacaacctctcatttaataagattcatcacagtctttttttttctcttcatccttaatccctcttaaaaaagctcagaattttacttacatttgtgtatggagggagtactatctcttatcattggacattggacaaaaatacctacctgtcctttggttgtaacttttcaaacgtatttgagcaagaggagcgcactgacgaacaaatttgcctctgtactctgtggccctcatcttgctcaccctagtactgatagtactaaccttaacctggtaagtctactactagtagtagtccagtactagctagctcttgtacaaactctcatggatattcccttgcaatagcacagccaaatagcaacggtaccatcaccatcatttatcatgggcacaacttgctagatctcatccaatcttggtgatagagaagaagggaatgtcagctgccattttaaacatccctgtgcttgttgttcatagcaacttcaattcgatcacagagataaggtcaggtcatagataaatagagagattgtctctgtcactggttgtgtgtgtgtgtgggagaggcagtggatgacgagggcaatgaggaggaggaggctacgcattggcaaggtgctggactgcttctccttctccatgtgttgcgcgagaagcagcggctgcctctgcttgcgcgcgtcggaggaagacggcgacgaggaggcggccatggagaggaagtccctggtgagcagtagtagccaggtcgaccaggtgatcaggcttcgcgatcttgttgatggcacgaggacactcgggttccatctagaaccaaaggtatgcaaaatcttcttcgtcttcgtcttccatcagatatccaagtgcaattgatcaacgtgcttgtgtcattgtgtgcctgtgccattggttgatgtgcattctctgtctttttggttgtgttttgatgcagactgtggagctcaaggtgtccatgcactgcaatgggtgtgctaagaaagttcagaagcacatctcaaggatggaaggtaacaaaacatcatcatcttttagctttttctatgacgaacttctcagttcagaaaaacagtttatttcttccggacagttttcagactgtttgataggtagagaatgttaactcttctgctatcgtcttgagagtctgctctccctaccttcatcggttcatcgaacatatacgttaaccggttttatccaaatgctcgatcatttcaactaacgttagagaatccaaaacataaatcccctccaaaatggttcaggccaggtaatacctttattttccagaccaagctgaactccacatttgcactcacctcatgaactttcctaagatacactgtactttgctaccctttttcagtcacggacaaagtgcccttctttgttctttcttctttttttgcttttgcccctctccaacactctgcaaagatcagttcagttttcagagcttgccatgtaagggcctgtttgggaaacagggccttgttcacatcggatgtttggacactaatttagagtattaaacatacactaattacaaaacccattccataaccttggactaattcgtgagacgaatcttttgagtctaattacgccatgatttgacaatgtgatgctacagtaaactttttataattatggattaattaggcttaaaaaattcgtctcgcagattagctctcatttataaaattagtttttttattagtctatgtttaatattccaaattagtgtccaaacatttgatgtgatatggactataaagttttagccccatctaaccaccccctaagagtagtttagactgtaattcatcttctccagtcgcttgctaggtaaatggcctgggcattttcttggctgtactgtagtctgtagtacaaccgatgaaccgaaaaacaccgtacagaccaaggccacagacgcatggtacggtgaacattaactcggctgcttttatgcatctgtgcttcactgtccttgtactactccagatcttgatactctctaccagcaaaatactccctctgtactaaaaaaaagacaaaccttggttaccgtgttcaacgtttgaccgtccgtcttatttaaaaaaattatgaaaaaaattaaaaagataaatcacgcataaagtattaatcatgttttattatctaacaacaataaaaatactaattataaaaaattttatataagacggacagtcaaacgttggcatgagaactcacagtttgtctttttttagacggagggagtagtcaggatggatcatggaacatggatggcagcataaaatgcgaacacaatcctttcacctttcctctgttccccaatctggatggatctactcgcaactgtcatttggatcttcctgtcatcaacccatgatcctgtgatcatggccacagcagtagtaacagttcacagtgatcctcaatcttggcaattcagaattcagagacgccatagatcattagcagtacagtactcgcttgctctattattgctcctgcatactgtacgctgatgaattcgcaggctgtcatcaatttcatcaaaaaccacggtgttcttgtcaccgtcaccgatcaaatcaccctcctcttgcgtgcttctcgtgtcgctcgatcgagcttgctcgtcgcccgggtggggggggggggggggggtggatccaagtgtcatgctcgcgctgggtacatgtgtggttccccctggtgctgtggtgcatgattgatccttcgaatccacacgcgacaaccagaaaaaaaattataatgttagcatatccatttcaaacttgaaatgtgacatgaaaattgttcaacaagtctatgctgtggtttggcaaagagaatacttcatccgtatcaagatatagcagcctaatactggatgagacatattctactacgaatcagtacagtgttttatacaatactatgttatgtactccctctattttatattataaaacatttaacttttttcccagtcactttccttaaaaaaaacttttttcctagtcaaactttgttaagcttaaccaagtttatagaaaaatttaacaacatataaaatataaaattagtataactaaatctaacattaaatacatttttataacacgtttgtttggtgttaaaaatactactatatttttctataaatttaatcaaacttaaagatgtttgattaagaaaaagtcaaatgacttatataatataaaaacggagggagtattttagaaggaagggacttatatgctggtgtgttttttttagataatatatatgcgggtgtgttgaacttgtggcgtttttgttgggttgcaggcgtgacgtggttcgaggtggatttggagaaaaagaaggtggtggtgacgggggacgtgacgccattggaggtgttgcagagcatctccaaggtgaagttcgcgcagctgtggccccttcccccccaacctgctgcaccagccaccgtctcctccgcttagatctcgatccgttcccatctcaaaatggcgggggccaagccaagccaaccgcgcgtcgtgtgccaccgtaatattatcgcgctcacgcggggaaattgcagattcagcgatgcattggcattgttaccgagaccaaccaggcaaccatcgtttttactgcaccctcttgccggcttctctctgtgtttggaaataaaccaacctaaaataagttgaaacggcacaagttcaaaattgttatactaaggtaatgtctcattttattttaggttggtttaatttagaacgaagagaatagctccatatgcatacatgccacggtaatctaaggctgacgcgttagtcaatcaagctacgtttgaattttcacggcgatctatattggcactaggaataatgaagagggaattataactactagaggctgtttggtatgtactccctctgtcccttaaaaaatcaatctagtatcggatgtaacacatcctaatactacaaatctactatcagattcgtagtactagaatatgttacatccgatactagatttgttttctgtgcaacggagagagtatgtggatatactactttatagcttgtgtggaaaatgaattgtttcatggggaaggtgaaggtttctgcagaattttacgagattttctgtgctccaaataggcttgtaaacattgtactactcgtgttctgaaaaaaaaacattgtactgtttgctttgctatgagattggtcgatctatttttctgagtattttccgcccgtcgttgtgcgtatggtgggagcagatttctcacccgacaaacactttacaaggacatgttttgattctgctaggccgctttgggccatcaaaatcactttcaagaagaaaaatgaacactcctgcatctcttcaactataggtcaatggtcaccagtgtcacttctgactcacaactatacatacaagacgggaaaaaaagaaggcatttcagcaggtcagagtgcttaattttgcttgtgttgcttcgttgaacaatcttgctgctgggccctctgtatccctcgcataagcagaagaaaagccactctgatacttattatcagatgccattctgttgttcatggcgtcattcactcatgcgatgacggtcaacgcatttcagttgcagcctgcttctgaactccggcgcatccaacaaattgagctgcctcgagcttcagcaacaatggagaacttttggttgcttgtaatacgttccaatgggatctgtattttcagtcatgggcttctgaatgcattacaaagctcgggaacgccatggtaatgtccctgaaaataatcaataacacaaaattgagattgggaaaaaagtacacttctagttctaatgtttctagtgagaattcagtattttcactactcactgcaaatagggaagtgacatgttccttagtgatgccgggttcgccttaacaaattcttcccattcctcagggtctatcctgccatctccatttgagtctgcttgactgaatgtctgcaagacaaaaaggagcagcatgaggatcgagtcagaaaaatcatctgaaaattatatttgagagagtaaatgcttagaaggatctttgttaactacagtacattatcgacaattgcctcgacagcgcattcggaaagatgtaggtctgattcatctagaagtgccaagaccatctccctgagctgtttcagtaagcaaacacaatctgttaatttcttgaaagggaaacaaaatcaacctgttaattgaagttcagggttaataatgaaaagtacaaattgccgtgaaagagagtgattcagattcacctcttctttctcaatatatcctgtccctcttagatcatagagcttgaatgcaactgccaagatgaggagaaagataaactgaatacgcctatttctgaaaataataagaagatgaatgcacaggaggcagggccatacacgcagtcttctctgatttaggcgcttttgggtggaacacactgagcgaccgtacaaactccccaaattcgattaccccatttctcttcagatcaaacaaatcaaacacctgccatgaaaaacatgcaacagaatgatcattctttgttcagagaagaatcaaacaagatgaccatttggttggccatctcctgcctgctgacagaatcaggactgaacaagaacaaaccctgtctgcgaagagattcgcctttctgctgttcctgaacaaggcaagctgaaactcctcctgctcaacaaaaaacacaccatgatcagcgcattcagaaggaacaatggtagtacatcatcaagaagattggcatcccagaaacgccattggaggcagctatctaatcaactctgcttaaatcaccttgtggatgaggccgtccttgatgatggaatagctcatcttgttgtacagctcgcgcagcgcctccacctcgttcaccgtaactgcaagaacactgcaaaatcatccacaatgcagaggcaaaacaaacacacagccgttgtaacttgtaacaataactgcttaactatcaatggtgttgcatatgcatcggtgatgtaattaaagtatttaacgagtgcaataaagcttccattatcttgaaaaaaaaaacgcataggtgaagaggtgctcacaggtggtttgggcggcgaggacggccggctcctcgtaccccggcggccgcttgaactgcttcgacgacgcgcatcccatggcgacctcgccgtgaaatccgaacgatgccttcgccgacgagaagaaactagcctactcagctactctccctctctctccttgtctccttgatatcatccatacacacacgtattcgcgcgaggtgaaatctgaattattctgacctgagattacggggagaggagaagacaagaagaggccgaaaattttctggagaagcgtgcggaaaaattttgtgggcgacacgcacgcctccgcctcggcgcctcgctggagtctcgctgtgtcgcagcttacgcaagcccaccgttattttttatagcgagttctccggcgctccaagtcaaattcgctaagcatatgtcgccaaaaaaagaaaaaagattgcgttttttcctgcgtgcatttggcgatcgtgtggactgtggacctctgcgctccgtgagcgtgacagcttatagcaagcgtaatatagaccgtgtttagatccaatttttttttcaaacttctaactttttcatcacatcaaaactttcctacacacacgtaaacttcaaactttttcatcacatcgttttaatttcaaccaaactttcaatttcagtgtgaactaaacacagcctataatcagctactagttctaaaaattaaaacatcatttataacctacttacacaatagtactagttagttatagatatatactatattattaatacataattcatctatttctcacatacttcctctgttttatattatataaatcgtttaactattttctcagtcaaagttctttatatttgaccaagtttataaaaaaaatcaacatctataatacagaattagtttcattaaattcagcattaaatatatctatctattatatactaaaaatccattagactttttacaaacgctcttaagttgccacgtgagatttctataaacgcttctgtcggtgatatgggaccgggagtattgcgcccggaggcttgaggcagatggaatcgcccacgtggcctggcaccttcggggacgtcgggcccgagggtgaggtgtccgccctcctcctgatttccccgagggggggggggtcgggttgctc

SEQ ID NO: 10135 - DNA, 12883 bp, Oryza sativa
actaaaatgcctttaatcattgaaaaaaagtagtaagagtaataataggtaggtaaagggtattaaagggagttttatctctaaagagtaggtaggatggtaggatggtaaaagttggtttttttatgggacaaaattcaaactctagaagttgagttttttttttgacggaggaagtaggcggtaaaagtaaaatgataattttcgtaggagatagagaatggcataattgttttcgatattagttccaggtacataggtgcatacaatgcctcactaactgtgtgcccggtaatttacatgacatgttttttagatttacattttttcctacgaatatggtcacgcagtaatcctctagattttcattttgttttaggagcacgattggttaaaatatgatcgaatgtttgccaggttattttgatatttacattttatcacaaagaacatctaaccttggtaaaaagatcagtggttagtaggttcatgtgtaattcatcctcaatacgatatatttatattgtttccacgtgtttgcgtcatctccccgatgaaatttaactaaaatgtcttaagcaattaaatagcttatttccttacagttattttgtaatgtatcgggtaaaatggaaatcacatgcatgcttggatagcatgtattgttgccattgaaaattaactacctctttgattttaggatttatggatttagaataaggtattcggatatatggatcaacgtgcgcctaatctacagatttgcgaactaatcatctatataaccaagcataaggaagataagtaccgattcttttttaatacgtaccggttcaatcaagaaagatattcacatcaaacaaaattaccgttgttttactagttacttaccctactgcaattggttataataattttatttcacatcttgcccttgcctttctcttagatcaacgatccacattgcaccacctctcagtacctctacatatctcacaaactccgtaaaagatcttaataaacttagatgaatgtgaggccataggccacacgttttccttcatatccccgaaaactatatcgtatcatgtaacaaatagtctataacagctaactatgcgtccaaacaaaactacagcatatgcatagcaactcgttggtatcaaaggtaccaggaggtaaaaaatttatactaaaaaaattatattacctttatggacgtgactacacagctagtagctagtggtagttagtttgtctaaaccagctaccactccatttatgagagacattatccacatatacttcaaatacaattttctcttaaactacttatccgatttacgatccgattgcaccgttatgtttgtaacaattaaatctttataacaagatctcacatgattatattctaataaaaaaatataaattacttttataatatatctaaattacttttagatttcactaaattacttcttaacatgtaaaagtaaattaaatgaagtctaaaagtaatttacatatgttacagaagtaacttgtaacaaaaagaaagtaactttaatgaatgtgtcgacggaggatacccgtagactggatatagagggtattgtcgacgggggatacccatagaccggatatagagggtattggggtctgttggtacgaggatctacatagtacgacatcaagcaaacaaaagacaaggattatactggttcacgccccttagcaggtaatagccctaatccagttggtatgggattatatgatggaaaccccagattacaaagggaatagaactcggtgatatcgacgagaccgtagtcgagttggcccgactagatctcctagtgacttggctcttgtaagctccggcttcgtaggctgtggtgggtgtgttggcggtgagattcgatgccatagatcctgccagggggtcccttttataccgcggttcagtcgatctccaagtagaacttggagatatcggacccctcacgatatggtaaagacccagtctcgtccgagtaggactctttccatccgtagattctgttcctatcatgggatagatttccttaatgtatacggaaactattcgtacacgcgcgggtatactgtatcggtacccatcgtatatccaaggatagagggcataccttatccgtaaccctgacatttaattggatgtgactacacagctagtggtagctagtttgtactccatctagtatctcctttcaacttaaaaaatacaacagtatcttcttttctcattctacatgaaaaacaaaaatgaaagggaaaaaacaatcgatgattaaacagattcatagagagttacttttgaaccatgcaaaagttacttccaattaacattgaagttacttttaaaaattgttaaacttatgtgtgttgatccatgctgattaaatttaatttctagataaagtcatatttttatccctacaacgaatttactcctattgtcgtgacaaaattactgccgttttgttttaagttacttttataatataatatatgtaaattacttttagactattaaatttacttttatatgtctaagaagtaatttaatcaactctaaaagtaccttatatatatatatatgataaaagtaacttacatataaaatgaaagtaatttacaaatataaatatttttttcatcgtaatataatcatgtaagatcttgttgtgaagatttaattgtaacaaacacaattatataatcgaattatagattggataagtaatttgggagaaaactttgtttgaagagaaaaaggacgtacatgtatattaaaaaaatgcatgcatgtagtactatgtagtagctagacttctccacgtaggcgtcgctagttaagacaaaatcgagaggcctctccaaatagattttatgtacctttatacttcctccatctatttttgatagtcattttttttaaatctgaaaaatttatttttgatagtcatatttcaatccaacaacatatactcttaatgactttctcggatttaatgtatgtctcactattcttccacatatgattggctacatggccattgagaaatataaatattaatgaatcgtttgtttacgaggaatgactagtagcatgtttaaatggatgataagtagaattacttatccttgttctgtgtgacaagatgaaatatgactatcaaaagtagatggaggaagtatttgctctaataacctctcgatacctcctattgaccataaaaatccctataaagaaacttttactacaaacactggaaaacttgaatctttcttgcggtaaagacattgattgtagtatgttagtaccatccaagtctagaacgccactgattctaaaacaatttcatgtacgtccaaaatatataagtaaaacgaaatatgaaaaacaccttatgcatgttgtacacgcctctgaaatcatccaactatgcgttgtaaccaccttatactcgatgttatattgtaaccttcctcactgaaatgtcttcaacacctcgaaattctgaaaaacaattctatattgacatttgccaacatgtcaatttaaggtttacacaaacacatgattttctacgtaaagtggcacacggattaaataaataaccaggaaaattcatattagtttggagtatgtttcctagaatgatttacaataaaaatcggttgacaacttgtttttcttaaaacccatccaacaacgggttagagaaccttcatgcaccagaattttggcattatcatcaccaactttaaatacagaagcaacttgtcacgcagactcttgacaagttcacttgagtcggcatcaattttgtgtcatgttttaggatcaattctgaacatcagatcagaggtgtactttccagttgaaattctacagtaacagaagttgtctgcactacactggaaacaccattgctactgctgtagtgatttactacaattaactgtagcacaagactcatttcagtattgatgcacctctgcagtaaggatcagtttccgttgacactgcttcctctttttttccctcaaaaacgcatgagagcattgctcccatttttatcaaggtaataagctgcatatggtgtcacttcagctaacaagaccaacctttgcagatcaaccagtccaattaatcaggaaatgggccatgctaacattgaagtccaaaaaaatctcatatgactgcctgctacatcatctcaatggctaatgatcatcttgttctgctaacactacagatataaattaagtgaaaagattcaggactgaattttacagctgcagaggggcacttgtatgtcttaccagccagggtcagatgcctcccagctgccatcccatggataactgctagaaaataaaatgtacaactctgattccttatccgtttgtgctacaaatagatgtcaagtcaaaggagtaaaattataaacacataaccatggaaaaatcaggggaaaacacagcagtccaacaggaaaaaaaaatgagtttaactacagccctcagaacaaacaatggcacaagatatgatggaaatatagaggcaacacatggtcttcaggagaagttaagtgcagttcaacccagggtataaatgatccacatatttctcataatataaaaactaaacaggaataacatagctcctgaagaaaacgatttcagaatttcaggctatctgaacagtataggatatagtaaaatctcatcgatcaccaaaaaatccaaataaagcaatagcagatattctcatggatagtggtaatcttggacaaatttgaagatcattacagcatgactccaagcatatatacacaaagagacatgcacagaacacagaagatccaggatattatattctaactcagaacacacatagtttgtctaactaaagaaagcatcaacggattagatagacacactagtgagaggtttctgatgtcaaagggtggttcactgaactttacaatctgcaatcaactgtagaacgaaattgctagaattaatctcttctacatttgaacatacctggcatcaagtgtgacatgtgcagtagtatagcccttcatggaatccaaatagaaaaacactaaaaaggggaagagcttagacatagtcaatcaagaggataaggccattggattgtgaatgtgattcatccatgcaaacaagatttgctatggtcagtactcagtaaacactaaacaatatggaaataatgtaggctaagcaagttgttaacattgtgaagacgtgtgacatccaaaacctgaaaaatcatgatggatttaaggcaacaggaatatatgctttacagataatctgacagcatgctttatgaacattcgaaatacaacatcaccagtggcggattcactgttggggctggttggtgtgccagccccacctctaatccctgctcttaattagtcattaacaaatctaattagtcattagtgaagaaatttcccgaatagcacaggctaccttagttcttctactgcccaaactgataaaacagaacatcctccgagtataaataacaatatattcacatatatttgtgaatattttaatatagccacaaatcaaaatagagagttttttttatcatatgcacatttggttttcattggaaaatactttagttgatatacctttatttgttttaatcatactccctccatccctaaatatttgatgccgttgacttttttaaatatgtttgaccgttcgtcttattaaaaattttaagtaattattaattcttttcctatcatttgattcattgttaaatatacttttatgtatacatatagttttatatgtttcacaaaagtttttaataagatgaacggtcaaacatgtttaaaaaagtcaacggtgtcaaatatttaaggacggagggagtattatattttttacactagcacctcctcaatttacaccctggattcgccactgaacatcactgaaactatagtcttatgttatgtccaaagcattttgtggattcaacaaacatcacatttgtgaggcatctagtcaaatattttttaaaacttcaaaatcatgtgcatagaaaatatgagttttcagatactgacagttgctgaaaggagaagcactctaatcaagaataaatttaacaatcagtctagcgctggcaaggggacaaagaaaacggaatccatgcgaggatagtaatgggactgggttcgcccagggagatggctagagagtaggcagaattttctgggagcaaagtcattaaaaagactttgttaaacgcattaaattgatggacttctgatcaaatcacgaatggccatgatgtcctgtatcatccagcaatcatatatcagaaaattttaaattgatgcctttaaagcacaaattatttgttttggggagatttggaggtaaggatccaacttcaaatatgaggtgtttgatcaaatcaagcgctagctaggactacttgtatcaacgctccatgtatagccaaactgatgctggtgctgttataataaagtatagatacacatctaaattttggtcaaaaaattggaatatccatgatggcatgatgttcatgttgctatttacacgtcaaacagtagtgttgcatggatctctccacttctggcatatcaggaagcatgtgcagtaactaaacaagttgatgaatacaaaacacagaactatttataattgcaattcccaagctgataagatcaaattggtgaaaatttccaattgcttttatttacaatcaatgaagtttactaagaacttatgtatatctgtaaggaatcagtaccacaatttctaaagtgctgcagaacagaagcaggtgaatctgaattgaacagtacgcaggtgactttcttcacctcaatattagacaaacaatcgttactttattgtctaagcaattctaagaaaattatatcgcaaaaaggtccaaatttggcatatagtaacgcagtgaaataatttcccatcctgataaagattattgattagtttccatacctgcaaaggcttcctatgcttgcagtgcatgcatttgtcaggaggcaccaacaaggacagctactgatctttgaaagagctagctacatagctacatatgtcagatggtacaagaagcaaccacaattagattgacatgcaaaattcgattaggaccaaaagagtttacaaataccaaacctgtactgcaacagatctgaaagctacaatattactccagaaaaagcagaataatataaatatctgtctccaattctccatgaaatacaaagaagtgcttgaaatgtttgcagcatatatgacatatttttattccatatataacatatttgctattccatatatgatatatttgtaattccaaacgatagataagccagctctttccatacctaatcagaaactaatacacaaaggtagttagcaaactgagtaactggttttggagaatacaatggccagccggcactgagcagccatatttctaaggcgttgttcgtttaatccccaagagagagggattggaagggaataaatctccttcaaatccacccataagagggattaaacgaacaaggcctaaaggggtttcatgtatgtaggtgtagaacccatagggcccatgagttatatatactaccgccatccttaaaaggatgacatcataaaatgcatgcggtcaaacctcaaaatgttaaacgattaatatatggaaaacatattaggatttgaatatgaaaatatatattagtagatttgctatgaaaaactattttatatagttatacttttattaagttttataaatacatagtttgaaaaattaatgatcgaacatgtgcatggaagactgacgatatccaaaatataagtaaaaaagaatggaggtaataatatggtggtataagtctcacactcttacatgatgagtttaataaataggttaaggccagagtataaaattaacagttccaaaaaaataactccggttaatgcaagtgtaagtagggtaaggcctgatagaagggctagagattagtgatcaaagtattgtctgcaaatatattgtgatagaaattgttatcaaagttatatttaggagaccatgttgatgcccaaaatgataagttttcatggctagagtataaagaatctagattacatcagtattccttactgtgggaaaatatctagtaatacattgttaactacttagtttatgcttctacctctgatgctttcacaaaagaaaccctcaccaatagccaccacatgagcatgaaccattcttgaaatgatgaaaacgactggggtcgcgcactacgatctcatggtccacaatcttggaaatgtaggtgaatgcgctatggcaatcaccacatacacgcaggttctttgtgatccttattgggcaaccagggaaagttgtgaggagaccatatgcaagagcaagtttctcactgtgctcaacaagaagattatttttctcttcctcatcaacatcatgtaatgcgaagtttgtctcaggaacatatcccatagctttgatgcgatcaattagactctccagaagagcataaatttgtggggatagtgggtgtgatcgatctccgacaaagaaagatgctgtgcccttttgaccctggacccagctgcatcctggcctcttcttaattcctgatttcttcatcaagtgcctgatcctcgctacatccttccaccgccctgcagtggcatatatgttggagataagcgtgtaagatccatcattttcagcattcatctcgaccagtttgttcagagcatgttcagcaagttcaacatttgaatgtactctacaggcactcagtaatgcaacccaaactactgcggtgggctccattggcatatccttaactgttttccatgccttatctaatcgcccaaagcgggccagcaagtcaatagcataggcatagtgctctgcccgaggtgtcaaaccataatctgcactcatgctgtcaaagtacgatagaccttgatcaaccattccacaatgactacaagcataaagaacaaccaggaaggttatatcgtcaggaacaaagcctgctttccgcatcttgtcaaatatgtccagggcctcactaccacgaccgtgcattccataccctgtcatcattgatgtccaagaaatagcactcttttgagacatgctatcgaatacatgcctagctgtatcaacatccccacactttgagtacatattaatgaggcagttcgccacaaagtatgcagatgagtcatattggtgatgacgaagcacataagcatgaatctgcttacctatacgtatggctgccaaatgtgcacaggccatcaaaatgcacgaaattgtataagcatttggggctactccatatggttccgaaatcatctccacgaaaagcttgagggcatcatttgagtccccatattgtgcatgccccccgatcatgacagtccaggtgacaacattgcgttcctccagaggtatatcatcaaatatggagcgtgcagctttgaagcttctgcactttgagtacatatctattagcgcgttgtacaccataagatcctcatcctcaccaccaaaatcattatccaaggttagaagacagttctttagggagtaggcatgaatttccataccctgagaaaatgctcccaaagaagcgcaggcagacaacacagagatgattgtgacacaatttggcaaggacccagaaaatatcatttgacgaaatacattgagtgcttcatggctgcatcccctctgagaatagcctgcaattacagcagtccatgttaccatatctaatgggatattttccttgcgcatgttcttgaaaagctcaaaggctgccttaaagttgccactttgggagtacccagccaccattgcgttccaagaaaccacatctttgaattccatcatgttgaaaacctttaccgcattttccatcaaaccacacttagcgtaagcatcaatcagggcattaccaacaaaaacatctagaaatgtgccattacgaatagcattaccatggacttctttagtttgaggtactgcctttagagaaccacatgcagggagtatgttgacaatgctaatgatgtctgacctttcatttgtaggcttctcatggacaatcaatgtcatctttgaaaacagatccaatgcagtccaagcattactacttttaacatgggctgaaacaatagagttccatgagataacatcatcaatacccctctgagttatttcatcaaagatcatgctggcttcctccaaagaaccacaacgggaatacattgccaccaacgcattacatatgaagacattggactcaaagccattgcagcatatcaatccatggaatgcactaccacaacggtatgaaggtagctctcaacatgcttttaatacatgtggtagagtaaaatggtcaagcctagttccagcacgcagcatgcggcaaaagacattaattgcactgtcaaggcggccttgtttaatgtgttctcggataagtagattccaccacacagctggtgacggtgtaacacgttccaacaccaagagagcatagtcggtagcaccacaagcaagataagaagctacgacaccagtacccagagatcttggagatataaatggttcggatggcaatgctggcagtgagactgacaataatggtgtgggcaaagaaagaagaccagaagcaattatctgttggtgaatttgatgaactgtatttgcagacttgcattccttcaatagggatgcaaagtgactaggataaacatctacaccaacgcatgctgcccttgcaccttaaaggaaccgtactccaattggttttaccgccttaggcaagttcaaaagcatagctgcagtagaataccattatgcataatgaatcctcaaagaaacagccattgcatcactgtatgaccaaaaataactgaattagcaaaagccatcatacatattacatcaatctaatgcaaaacaatgtaatgtaaaggaagaataagtcaaagatcacaaaggggaataggcatgctatccatcagggttgcagaatcaaaggtagtttgtagtatcctaccatcctgtaaaatccttcttatctggattattggggttttaacaacctaacatcatgcaagatcaattgtcaactcccagtgacaatattcatgcccaaagcttgtactatgtagcactaaagcattgcgatgcttacaaattatccacctgagcatgtgactgtaaatgtccatttcatcatttcacttcaaatgtcaatctcaggacacagtggaaatactagccctagtaggaaaattttgactatttatgtgtgataagggggtataacatgaaaataatttgagctgcaacagatgcacacatagacatgactataggtttaccaaattgtcagaacgcacgagagaatgagaaaggaagaataataacaaaggagcaactgtttgtaccttttgtattcacaaacactgcagttcaaatcaaccatgagaagcaacagtggaatgattttaaatcaaccaggaatgcaaactaaattgttctttatatcatatcaacgcctcctaaatctatgaggagtatgtggaaaaaattcgaagttcagtactacaactaataagacaaatcgaagccattgaagggtgtcaacttttctcactataccatgtcccatccattttgattcaattctttgaaaaccttacaacaaccagaacacaatggaaaaaaaaagataaaaacatgaatggttccacttcttacgatctaaatcttgaagtcctggtacaagttcccttgtttcaatttagaacaactgaaatccattttttaaggaaacctttgataattggatttgcttgtactactctctatctgtggtctgtactattgattaaccataagcatttattttgagcaataaaatctaaatctggcataataattcatagtaacagtttttcaaaattaattgacaacataaataatgatttcatttttttgttgggcttaagcggtatatggcataactatcaacactggaagcagtgggagtcggcaatgtataattgccaaagaagaaaacatgaataaaggaaagtaaccatgaaacttcatcatccttcaatttctatcagacacgattaattgccgatgctgaacccgtcccactacaatgtatagagattttctttaaatacagtaagctatatgtttcagtgacaaaaaaaaagagaagaagatcaaatggagcacatgtgggagagccaccgccacagcaccagcaccagcaccagcaccactggagttggagaggagctgggagaaggaagagctttgttattacctgtcctccaggcgtccgcgcgcaagaagaatacgtcggagccgcaggcacggaggtggcggacgacggagggcgccgacgagccgcaacaggccaaggcacaaggcagtggccggaaggcaatggcgtcgagcaagcgagggaagggccagcggagcgtcggggcggacgcgcggagaccgggggagcggagctgcagggcaatgcggcggcggcggcgtggcttgtgacggagccgcccggagtctgggttttggagcggcccaatctgtagccacacgtacggcccataatgttatcacttcctgcaactagatcgacaaatcttaattgataaagtcatcataaacacttcc

SEQ ID NO: 10136 - DNA, 3396 bp, Oryza sativa
taaaacatcaattaattctgttttttcaagtctctctggctctcgctccggcgtgtgcggcgcgtgttaacgctgattcttggtaaagatgttcgtcttgattgagggcaaggcgattggtcatactgtaatgggggattaattatttgcaatgtgtcctcttggtgcctgaaactctgaattctttaagcattgtcatcctcctagtaaattatatattccatcgaagatagatagtagattctaggacgaattcgatttggacatagcaattttctgatatatctagtaaattatatatttaattccgaaatgttgggtgatacaggtatttgcctttcaccttgagtcggccccaatttccaatcttgatcttgacttccgcatatgaatgttgcttgatctgtattcgacctatgcaggtgctgttgatcgctttgtgaaatggagctcccagttgctgatcctgggccggtgagggctgaaggattgcttctgcagtgtccctattgtgattcagaggcaatgcacaaactcgcgcagttcttgctccccggcttggctgcggtatgcattgactgcacgacaggcgatctcttcaggaagccatcagttgtcgccgttgacatgaggaaggaaatggtggactacgtcacgcagagaagcgagacattcatatccgattcgcttatcgaatcagaagcaagtcaggatcaagagaacgagatgccggaggacccttttgagatcgtgtccatcttcatggatgattttagtagcacgaagaggaacattatcggccatgtctctgggtggttgatgagcgacagccgcgaagataagattgatgactttgtccaagaaatggagatgacccgcttctggccgctggaaaggagagaaattattgctgaggtcctcctcaagaatgtagacctgaaaaccaagtaccactgccctgagaaatatgaaaatgaagaacgtctcgctgatcataaggcccagtgtagcttcagacctgttacctgccccaatgatggatgccgagcgaaagtttctgttcgctgcatgcaagaccatgattcagcttgcctgtttaaaatccttacatgtgagcagaactgtgagaagcggcttctgaggcgtgatatggataggcactgcgtgactgtgtgccccatgaggcccatgaaatgcccttttggctgtgattcctcctttcctgagcgtaatcttgagcagcactgttctgagtttcttcaggcacacctccataaactcctcaaggctattcataagaaaggttttacagatgaggggctcaaggaccatgctctactgctggaaaaggttaggctcctgatcttgttaatttacaatgtgtaacatacgcttttcaattaaaatggctgccttattttcttgatttggaaacattgctgtcaaactattgtgaaaaagaagacatacatggactgcagcaatatgatttactgaaataatctggttttgttctgcagcatgacaatgatggtaaactggctaaatctcgggatgtaagatctcttactaatgttgtaaagaatcttgaagccaaaataaaagatgattcgagttagagtggatggcgtctccagagcaaaatgcaagttttttttgaggcagcaaaatgcagcatggatattgaatggtatagctgaagagttgtttccactcacagtatacacagaagagtacaagattctgcacgtttttcctttacaactataattttcccctcatgatttttcttttctcaaaatcggttagttttttatggtgtaaaagtataacattattttatccttgctattttgtccaaggaactcttttttttcatataaattgagaataatttatcaggaatgctaatttttgtttaatttatggaagggcgatgcttgaagtaagggatgtttttcccagtctaattccgttccctgtaccagctaaatactccctccgtcccaaaaaaagacaaaccctggtttccgtgcccaacatttgaccgtccgtcttatttgaaaaaattataaaaaaaattaaaaagacaagtcacgcacaaagtattaatcatgttttatcatctaacaacaataaaaatacgaattataaaaaaatttcatataagacggacagtcaaagttggacacggaaactcagggtttgcctttttttgggacggaggcccactagctgaagttaaatgctattcctcacaatgttattatttgttttttggaaactttttttttcaatgatccagatcaaggttaggaacactagcatttatcggtaaactgttggaatagtttaaattcaaattttgtttttcgatttacacttagtaccgtttacatgccctcacatgtataatgcccattgataggatatctccacctcctacaagttgtgtcgttttcatttatcatggattcgtgtatgatgtttatttcaatgtataaattattacaagaatgtcaaacatcttttttttcaactagtccctgatcggtaaccattattcaaattctttttttttttgctgggaaaaccgttattcaaattctaatattcgatttagatttacagtaaaatctattccctctatttcatattataagttattttgaattttttctagccaaatttatttaggtttgacagtttattaaaaaaattagttcggttaaatgtaacattgaatatgttttttttccaaatgttgctatattcttttattaatttgatcaaacttaaaaaagtttgactaggaaaaaaaatcaagcaacttaaagtcttttttatatgaggggaaaaaagagaattgaaaagatacgcaaaacaaggtgagctttagcgaacgattaattgagtattaattattttagattttaaaaaatagattaatatgatattttaaagcaatttttctatagattttttttataaaataaacatcatttagtactttagaaaatatgcgcgtaaaatacgagggagtttttctgtatctaccgaatcaatttctctcaatcagttttatgatatgaaacagagggagtagatcgctaattactggtcaggcttgggtgactggtactttttgcaaatactggtttcctaggttttatcctaacaaataatctggcgatattttacggtgtttgcattttaaaaagggtaaaagtctatcgctgcacaatgaaaggtaccacttaaaaggttgatatagttacttactccctccgtcccacgaaaatccaatcctagcatcccaagatagaattagtggaggatagaaatgactaaaatgcccttaatcattgaaaaaaagtagtaagagtaataataggt

SEQ ID NO: 10137 - DNA, 20612 bp, Oryza sativa
ttatccaacggtcagactcatcgacgcgctcagcccctctatccccaaacgcgcgattctcctcattctcgcgattctcccaaaaaaaaaattccatcctcaccctcctcccgtctccaggtcgccgcccgcgccgatctgctctgtaccgatctctcccactggcattgccttcctcaccgatcttttccgctccgccaccgttcctcgccgccggaagccctcaccaccatcgcactccgtcgccttcgcgattcccaaccctaaccgccgtctccccgcaggtcgccgtcaatcgccgtcgccccgcaggtcaccatcgcaccgccgccacccggtcaccgtcgcgcctccttcggtctctttacatcgcgccgcagacggatttccccgccgacggggcgccgcccatgccatccggtctagcgcgacctccgccaaggagttcggtatgtccctctcaccactgatctgtacgtactctgtactaactaatgcagggaagagttttcatattattcgttttttttatttcagtttttactattagttgtcagtcaaattctgctttgtgcagactaataattttttccttgaaaatgtaatttgaaaatgagatggtatgatgtcatgatgatgggatttacaataaattgagcttcatgtttcatgggtttttatttatttgtatatttgcaatggagaagagaacatcgttgttaaattattttacaagcagttcgagtatatatatgaaaagagtattcactacaataactatatcataataatgttacttttatttgcagatgtgtgcccatattatttactcaatcatatgtagtcatttgtttactgaaatctaaatcaggtactagactttatacattggatgagctgcagttcaatggtatcgtcactgctgcttttctgactcctgtggatctgaatttgggtgtcagacgcccacccaaacggcatctgaatttgggtgtcggacgcccaaacagccagaccctaacaacagctgctagaaaggtctttgtttctcctcaactctcatcgtgtatatatgtttccctacctgattccatgttaaaaatgttactaagtctgaaccattaattttggtatgaatcgtgtgaattttgaagagaatagcatgtgcactgttaattctgttggacagaataaaacctagacttggttggtactataatctatccaacatattcagttattatgctctgtattgtagtgtagccaatttattcaattattcttctttgtactgtagtctagccaatttattcagttgtactatttccagaataggggtatctagggtatcaaattatttgattattctatgagctacatgctagaaccattatgttaagtggtatctctacatcgcgccgcagactgattccatcaccggccggtcgccgcccaatggttcacaaactctcaaaacatgctctcagatacgttgtacttattgtccttcaatatataaactcacaatggttgagtgctcaatatatcttatctaatttgggaacatactatttgattatcattcatataaagctggtagtatccccaggtatactaattgactttgttgtggatgggtgaataactgcagatcatcagcagatgtatcaacatggggaatctcgcctaatttctaccctggcacctcaagctgcatatcaatggcctttgataactatcaaggataagaatgtagtttagttttttgtgttcaggtatgaccaccctcgaaaaaaaaggtatcacaaatggttatgagatagtagagatttatgctcccatgagactaaatctctcataaggatgccgatttactgtaagtgaaaacaagctaaagtgcatggagagtatctatggaagtaatatgagcactgagtaggcgtctgcatcaaatcttacatttatttctatctacagttaaagaatgctaattaatctgtaatttgtcaacctcctaagctatatctcgtattattccttcctgtcattttactctgccaattacatttgcttttaccaattttttaaatcttccaacatgcacaatataggccctggtattttgctttttttacaggattcctgtaagataacatgattgcaatataccttgatcccgagagatgatttttgcaatgtttacccaactttatttgctgacactattaatatccttctggtaatggttaggtttcctgttattcattcgatgttataaaatttgtaacaaaagtgcataccaaaaggttattgttgctaatatatcctcaagaattagtgtgttacagacatctgtagatcattttttcttcgtggtctttgacgagcagatcatagtactcattatcggttatcaatggtttggcaattgcatatcaaacaagtatcctgtttacgattaaacatatggttgccactgaaatttcttcctaacattttagagggaacctgatcatgctatctcatcagaggatagagaagcggtcatgggcaattatgtgtttgccatttagcttatataactgctgtgtgtgcagtattgggtatttatcctttttatgtcttttgtgctgcagaatgagagcagctcagcaagcgattgttagagaagaataggatcgagccccgcaccaagtagaggtgtttgtaaaaagtggctagcagaataggaaaagaagattacaaagctgcttgacttgaatagccttgacttgtgaaaatttttcatgcttgatacataggaggcggcaaaagcgagtgcaaaaggaacctcgacaatacgggtgaaatggtgggctgcagctcttcaatttgttcatccaattaatatacataagcctgttctgtagcttcgatgaaattcgacggatccatatgtttcaatgtttcctcccctctgaattgattccgagaggtaattttcttaattcgccgatgtggtgcttttcaaaatacattatactcatacatatgaaaaattaaattggtctgcccatttaaatatgaatacaaataaatccttaaatacactaactatcgaatgcacgccataaaaaggattgtgaaaaaaactatttaattactgcatggaaaaaaagttctcacgtgacatgaatcacattgtagtgctttaaaataggggaattcgattaatgagaaacaaaatatattttttgtctgtcaaatatgtaaaaggaaaacgtgaaaatccatcttttaatataggcattggcgatagttattaaagataaatagagttacaccgtagcgtttagcacacgtaaaatagcaaggatacaaaaaatttaagtaattattaattcttttcgtatcatttgatttattgttaaatatacttttatgtatacatatagttttatatatttcacaaaagtttttgaataagatgaacggtcaaacatgtttaaaaaagttatcggcatcaaatatttagagatggatggagtataaaaatcctgtgacactaatatactccatggagtgacaacggtcctctttattacagaaccatcccacaccgttcatatcatgccaagttgacgacaaacgagagctggcactatcattcatcaattttgtaatagggcccgtgcacatctatctgacaaccattcaatattttgggctgttcaaatggtagacaaaataaaccaaattttgacaatttgataatattgttaaaattttagtaggatttcgtatgtactaaagtttggcaaaaactctaccaaaaagtgatatgatttgaaataacatcaatataaacaagcctttcaacgtattttttctcataaaaaactaatctaaaataaaatatgctatttttttaatatacttaaatttattgtactagtaaacgtcatatttcatcatagatcgttcttttatgggacggagggaataggagccgcctaaccaccaaccgacgttccaccacatgttggaatgcatatgacagttgatcacaccgccaaagttgtacgtacggcggtagacaacgttgcgtgggggtcggccactcggctggacctattcgcgccgtcgatcgatcgtgtacgtacggcgccccactactcaccgcgcatagtactgtacacgtacgacgtatactactcctacctaagaccggtcgaactaatcggcaaaatacgacggcggcgccgcacgcacacgcgcgagcctttgacaacgcgggacgggacaccacgtacacgttcgtcgatcaatcgatcacccacacgccaccacacgtccacgtacgttgttgagttgtgatccaaatttatttgcacttaataaaagccagctccacgttaaaatctcgttttttttgtgattgatctactgttatttatcgtttgtttgcctatcgttttctaacctatgtaacatgtacttacaccacgtacgtataactgccgagccaacacgcccgggaagaacgctcgcgcgcgccggggagacgacgagagaattggagaccgggtgtgtgtgacagcgagacgccttgcccccgcgggcgtacccgtacgtatacggagtacgttcgtacgcgcgaccgcgaccagcgatgcgccgcgactcgcgggaccgatcgagcggaccactacccgtacgttctgcgcctgcgtgcgtccgcggctcaagcggctggctgtgctgcgtggatcgctgtagcgatcgatcgatcgcccaggtgtggtggtgggaacgcacgcgctcgagttcggcaagatgtggtagtatcagcgaccacggaattttcgttttcgctattcccaagtgggttcttccggtcgggtgggcgggcgggtgacgcgctacatcacccacagcaagtataatagtactactttgtactgagtacaagtatatcgtaaatttatggtctgtccactttgatatcatttttaaccatactattttttttaaagtaaagttatcaaaattttactcattcatcattcatcatgtcacacatccaacgatccaaaatccatctgatgacttaaatccgacggctccccgcctccctcccgatccgatccagatcgcggatcgcttcccctcccccgggcaaaatcaccgcgcactccctcctctttctatcgctcctgccgcctcgcctttcgcccccctccatctcgccaacgccaccggcttcggcttcgccacccccttcggccggcggccgccgcccctcctcccctgcgccgccgcatccgcaccgcccaaccccgccggccaccgaggacgcggaaaccgcacctcactcccggtctcccacgcctccctctcctcttttagtcagaacgcggacgccctcctctctcgcagccgtcgttggagcgagcaccgccactccaatcgccggcaatccccttcgccgtgcgcacccgtcgttggagcgagagccgtcgtcggttcctcctccaccgtcgccgccaccggatcaccgacgccgaccgcccgcatcgtagcctccgtgccaatccccccatctcgcgagcagagcaggggaggggaggggaggggtgccgacgtgccgtggtcctgctgcatcccggtgagcatccacatcatctttctgattcatctctctctctctctcccacccacttttgtctcaaatttacctgcattaaccctagcttctcttctagatctggatggagctcttctcttattttgtttgtttgtctccccaaaagtccaagttcgatccgcccctgctagggataaataagattcaattcaacacgaaacacacgcaaaattaatctgaagcacaagccccttcactcccttcacacgcaaaatcacatctggttcttgtagtttagaatgaacataatgctacagtatgccttgctgctcatgaactgattgacaaaatgtctctcaaggttatatctgaaattctgagcatgttaatttgtgtctcccagtaaggttctgtcatcttctgtcatccattagtgcccaatcaaagaacttgcatataataacatatattctattcttttaaaaaagcagaagctattatctgaagttcagctctcagtttcacagtaaatttacataattaacagtgcatgtaatttgtgggtactcttatataggaaaggaagatcagcacaatactgacgggtttctcttcaagatgatcccgtggttctcagttttctgctttctacactgtctacatcttatatgtgttcattgaagctacagattgatggacatagctgtcaaacctgaacctaccaggcctcctggtcatgtttctcctcagctctcatcacatttatatgttttcttacccaattccatacaaaaaattttaccaaggcagacccgttaattttggtatggatcatgtgaattttgaagagaatacgtacaccgttaatttattcatgcattctgctttatactatagtctacccaatttattcaattattctgctttgtactgtggtctagccattttattcatttttttcgcgttgccctccgctgtcgtccaggaccgtcgcccacggcgctggcgacgattcaccgccgacgtcatcgtccaacaccgtgacttggcccttcgtcctccatgtccaccgcgccctcgccgccattcataagaacaacattgcagcacccaatctgtggcaccccatcgacacatacgaccgcgtcgccctggctcatcgtggctaaccccaccgacgaggtaactagatttaccttttgcttttgttcgattgtttgacggccgagcaacagggatcgcgaccagtcggcaagctgactgttttggttaactgataagtgataactgaggaatttaaagctgtgtgtgcttgtcatgtgctttcgggtagctgttcttaaccactgccaaaagtttcggaaggtgatagaaccaaacaggtagttctttagctgcctgtgcagtgtgcagtgtgtctctggaccaaaggttgtaaatgttgcataaatgtttttttttaaaaaaaaatccagttgaggtactcttgggtccaaagccataaatgcataaataaggtccaaaggcactaatttccattgctagctttcttgtcacttagtttcattacatttgacatatacccagatgatttttgttcttgtttgtgtacaggttcagagttttttatgtaataattactctctttccatatatgcagtacatttttattacacgataacatcagtgttaatgttctatatggcattactatcattatttttcaacttatgtcatgcatatcattccatatcttttacttctcttttattatgaaaatgacatctttctgattcgttgagggcatgcggggtagtatatctgttattttaatatattcagtgttttcatcaatatattgaccaaatattcggtttatatcagtaaagggccatgttcttttcacaagatctgtttctgaatatacagactgtgttgcaacatttatagaattcaagttgtccgtagtcctgctttgcatgagtaaatgccaatcttatgtgtctgaactcttttcttctgtgtctgaactctcaagtgatgatctatgtttcccaaaaaatcttatgtctagcaaacttagtttctgtttccaaatgaaaaatcaagtagtgaataatgtacctgtattaaatgcactggtctcttatttagtaatgtatctagatacatatgctgaatttttatatatagaagcatatgttgcttttacacatgaaggtgtatatgctatcaggtttctataatatggttcataagtgaacagcatcaaatgtctacgttactttagtttgaatgtacacgctgatataaaatttagagagcattcttggaatgtacatactgttaagaaaatttagatgaattaaatccttatgccttatatgttttttctcacacagttgtaagtttgtttggagaaggggacattcacaaactgcttgaaagaggtgttttggtatctcaatatatggtggaatatttactactgcttttagtaactcctagataatctttttttacatacatgcataactaaatttgcatatatcttcatgtgcaattgcgctctctgatattacaatggtaggatttgtctttgaattggtatagtgacgtatttctgattcattaagggcaaactggggagtagaactgttatgtgcgagatattcagtttatatttctaaacttgggtgcactttgaatcaggacgaataggctcagttgaatctgtttttaggatgatgcttactggattgccaattttgaagttccattcagatcaaatattaatgatttatagattcaggtttgtctgaaaacgatataaaacaatatgctttgctgaacttaatactgggagatcactagggtggggtagacggccttcatggcgtctaggttctattgtggtccaacacatactctttttaccgatcctaatagatttggcataggtttatctacatctgactatgactactgtatattcctcaaaaatcctattagtatatgttttctgttctgactcgtctggttgtctcttatattaaaggtaaggaaattgaaggagttgtagctatccaaatacatcagcttctcaaaatagaagagctaaatatactagtaatatgcccgtgctaacgctacgtgtatgtttagtaatagaaatcatgacacatagtaaagaaaagataaagattaggaaaggagatgaaaattagattgaatacaaaaatttagggacggaatattcagtttttgttagcaataaataaataaattatgggccgtacgtgtggcttcagattgggccgctccaaaacccagactctggacggctccgtcacaagttacgccggccgcgccggcgccgccgccgccgccctgcagctccgctcccccggtctttgcgcgtctgcccgacgctccgctggcccttccctcgcttgctcgacgccattgccttccggccactgcctcgtgccttggcctggtgcggctggtcggcgcccttcgccgtccgccaccttcgtgcctgcggctccaacgccttcttcttgcgtgcggacgcctggagggcaggtaataacaaagctcttccttctcccagctcctctccaactccagtggtcctggtgctggtgctgtggcggtggctctcccacatgtgccccatttgatcttcttctcctctttttttttttttttgtcattgaaacatatagcttactgtatttaaagaaaatctctatacattgtagtgggacgggttcagcatcggcaattaatcgtgtctgatagaaattgaaggatgatgaagtttcatggttactttcctttattcatgttttcttctttggcaattatacattgccgactcccactgcttccagtgttgatagttacgccatataccgcttaagcccaacaaaaaaatgaaatcattatttatgttgtcaattaattttgaaaaactgttactatgaattattatgccagatttagattttattgctcaaaataaatgcttatggttaatcaatagtacagaccacagatagagagtagtacaagcaaatccaattatcaaaggtttccttaaaaagtggatttcagttgttctaaattgaaacaaggggacttgtaccaggacttcaagatttagatcgtaagaagtggaaccattcatgtttttatcttctttttttttccattgtgttctggttgttgtaaggttttcaaagaattgaatcaaaatggatgggacatggtatagtgagaaaagttgacacccttcaatggcttcgatttgtcttattagttgtagtattgaacttcgaattttttccacatactcctcatagatttaggaggcgttgatatgatataaagaacaatttagtttgcattcctggttgatttgaaatcattccactgttgcttctcatggttgatttgaactgcagtgtttgtgaatacaaaaggtacaaacagttgctcctttgttattattcttcctttctcattctctcgtgcgttctgacaatttggtaaacctatagtcatgtctatgtgtgcatctgttgcagctcaaactattttcatgttatacccccttatcacacataaatagtcaaaattttcctactagggctagtatttccgctgttgtcctgagattgacatttgaagtgaaatgatgaaatggacattcacagtcacatgctcaggtggataatttgtaagcatcgcaatgctttagtgctacatagaacaagctttgggcatgaatattgtcactgggagttgacaattgatcttgcatgatgttaggttgttaaaaccccaataatccagataagaaggattttacaggatggtaggatactacaaactacctttgattctgcaaccctgatggatagcatgcctattcccctttgtgatctttgacttattcttcctttacattacattggtttgcatgagattgatgtaatatgtatgatggcttttgctaattcagttatttttggtcatacagtgatgcaatggctgtttctttgaggattcattatgcataatggtattctactgcagctatgcttttgaacttgcctaaggcggtaaaaccaattggagaatggttcctttcaggtgcaagggcagcatgcattggtgtagatgtttatcctagtcactttgcatccctattgaaggaatgcaagtctgcaaatacagttcatcaaattcaccaacagataattgcttctggtcttctttctttgcccacaccattattgtcagtctcactaccagcattgccatcgaacccatttatatctccaagatctctgggtactggtgtcgtagcttcttatcttgcttgtggtgctaccgactatgctctcttggtgttggaacgtgttacaccgtcaccagctgtgtggtggaatctacttatccgagaacacatcaaacaaggccgccttgacagtgcaattaatgtctcttgccgcatgctgcgtgctggaactaggccggaccattttactctaccacatgtattaaaagcatgtggagagctaccttcataccgttgtggtagtgcattccatggattgatatgctgcaatggctttgagtccaatgtcttcatatgcaatgcgttggtggcaatgtattcccgttgtggttctttggaggaagccagcatgatctttgatgaaataactcagaggggtattgatgatgttatctcatggaactctattgtttcagcccatgttaaaagtagtaatgcttggactgcattggatctgttttcaaagatgacattgattgtccatgagaagcctacaaatgaaaggtcagacatcattagcattgtcaacatactccctgcatgtggttctctaaaggcagtacctcaaactaaagaagtccatggtaatgctattcgtaatggcacatttccagatgtttttgttggtaatgccctgattgatgcttacgctaagtgtggtttgatggaaaacgcggtaaaggttttcaacatgatggaattcaaagatgtggtttcttggaacgcaatggtggctgggtactcccaaagtggcaactttgaggcagcctttgagcttttcaagaacatgcgcaaggaaaatatcccattagatgtggtaacatggactgctgtaattgcaggctattctcaaaggggatgcaaccatgaagcactcaatttatttcgtcaaatgatattttcttggtccttgccaaaatgtgtcacaatcatctctgtgttgtcttgctgcgcttttttgggagcattttctcagggtacggaaattcatgcctactctctaaagaactgtcttctaaccttggataatgattttggtggtgaggatgaggatcttatggtgtacaacgcgctaatagatatgtactcaaagtgcagaagctttcaaagctgcacgctccatatttgatgatatacctctagaagaacgcaatgttgtcacctggactgtcatgatcggggggcatgcacaatatggggactcaaatgatgccctcaagcttttcgtggagatgatttcagaaccatatggagtagccccaaatgcttatacaatttcgtgcattttgatggcctgtgcacatttggcagccatacgtataggtaagcagattcatgcttatgtgcttcgtcatcaccgatatgaatcatctgcatactttgtggcgaactgcctcattgatatgtactcgaagtgtggggatgttgatacagctaggcatgtattcgatagcatgtctcaaaagagtgctatttcttggacatcaatgatgacagggtatggaatgcacggtcgtggtagtgaggccctggacatatttgacaagatgcggaaagcaggctttgttcctgacgatataaccttcctggttgttctttatgcttgtagtcattgtggaatggttgatcaaggtctatcgtactttgacagcatgagtgcagattatggtttgacacctcgggcagagcactatgcctgtgctattgacttgctggcccgctctgggcgattagataaggcatggagaacagttaaggatatgccaatggagcccaccgcagtagtttgggttgcattactgagtgcctgtagagtacattcaaatgttgaacttgctgaacatgctctgaacaaactggtcgagatgaatgctgaaaatgatggatcttacacgcttatctccaacatatatgccactgcagggcggtggaaggatgtagcgaggatcaggcacttgatgaagaaatcaggaattaagaagaggccaggatgcagctgggtccagggtcaaaagggcacagcatctttctttgtcggagatcgatcacacccactatccccacaaatttatgctcttctggagagtctaattgatcgcatcaaagctatgggatatgttcctgagacaaacttcgcattacatgatgttgatgaggaagagaaaaataatcttcttgttgagcacagtgagaaacttgctcttgcatatggtctcctcacaacttcccctggttgcccaataaggatcacaaagaacctgcgtgtatgtggtgattgccatagcgcattcacctacatttccaagattgtggaccatgagatcgtagtgcgcgaccccagtcgttttcatcatttcaagaatggttcatgctcatgtggtggctattggtgagggtttcttttgtgaaagcatcagaggtagaagcataaactaagtagttaacaatgtattactatatattttcccacagtaaggaatactgatgtaatctagattctttatactctagccatgaaaacttatcattttgggcatcaacatggtctcctaaatataactttgataacaatttctatcacaatatatttgcaagacaatactttgatcactaatctctagcccttctatcaggccttaccctacttacacttgcattaaccggagttatttttttggaactgttaattttatactctggccttaacctatttattaaactcatcatgtaagagtgtgagacttataccaccatattattacctccattcttttttacttatattttggatatcgtcagtcttccatgcacatgtttgatcattaatttttcaaactatgtatttataaaacttaataaaagtataactatatgaaatagtttttcatagcaaatctactaatatatattttcatattcaaatcctaatatgttttccatatattaatcgtttaacattttgaggtttgaccgcatgcattttatgatgtcatccttttaaggatggcgatagtatatataactcatgggccctatgggttctacacctacatacacgaaacccctttaggccttgttcgtttaatccctcttatgggtggatttgaaggggatttattcccttccaatccctctctcttggggattaaacgaacaacgccttagaaatatggctgctcagtgctggctggccattgtattctccaaaaccagttactcagtttgctaactacctttgtgtattagtttctgattaggtatggaaagagctggcttatctatcgtttggaattacaaatatatcatatatggaatagcaaatatgttatatatggaataaaaatatgtcatatatgctgcaaacatttcaagcacttctttgtatttcatggagaattggagacagatatttatattattctgctttttctggagtaatattgtagctttcagatctgttgcagtacaggtttggtatttgtaactcttttggtcctaatcgaattttgcatgtcaatctaattgtgggtgcttcttgtaccatctgacatatgtagctagctctttcaaagatcagtagctgtccttgttggtgcctcctgacaaatgcatgcactgcaagcataagaagcctttgcaggtatggaaactaatcaataatctttatcaggatgggaaattatttcactgcattactatatgccaaatttggacccttttgcgatataattttcttagaatttgctagacaaataagaaacgattgttgtctaatattgaggtgaagaaagtcacctgcgtactgttcaattcagattcacctgcttctgttctgcagcactttagaaattgtgttactgattccttacagatatacgtaagttcttagtaaacttcattgattgtgaataaaagcaattgcaaattttcaccaatttgatcttatcagcttgggaattgcaattataaatagttctgtgttttgtattcatcaacttgtttagttactgcacatgcttcctgatatgccagaagtgaagagatccatgcaacactactgtttgacgtgtaaatagcaacatgaacatcatgccatcatggatattccaattttttgaccaaaatttagatgtgtatctatactttattataacagcaccagcatcagtttggctatacatggagcgttgatacaagtagtcctagctagcgcttgatttgatcaaacacctcatatttgaagttggatccttaccttcaaatctccccaaaacaaataatttgtgctttaaaggcatcaatttaaaattttctgatatatgattgctagatgatacaggacatcatggccattcgtgatttgatcagaagtccatcaatttaatgcgtttaacaaagtctttttaatgactttgctcccagaaaattctgcctactctctagccatctccctgggcgaacccagtcccattactatcctcgcatggattccgttttctttgtccccttgccagcgctagactgattgttaaatttattcttgattagagtgcttctcctttcagcaactgtcagtatctgaaaactcatattttctatgcacatgattttgaagtttttaaaaaaatatttgactagatgcctcacaaatgtgatgtttgttgaatccacaaaatgctttggacataacataagactatagtttcagtgatgttcagtggcgaatccagggtgtaaattgaggaggtgctagtgtaaaaaatataatactccctccgtccctaaatatttgacgccgttgacttttttaaacatgtttgaccgttcatcttattaaaaacttttgtgaaacatataaaactatatgtatacataaaagtatatttaacaatgaatcaaatgataggaaaagaattaataattacttaaaatttttaataagacgaacggtcaaatatatttaaaaaagtcaacggcatcaaatatttagggatggagggagtatgattaaaacaaataaaggtatatcaactaaagtattttccaatgaaaaccaaatgtgcatatgataaaaaaaacatgtttgcatagcaaatcttactgaccatagcaaatcttactgaccatagcaaatccctaaagtattttactgagtactgaccatagcaaatcttgtttgcatggatgaatcacattcacaatccaatggccttgtcctcttgattgactatgtctaagctcttcccctttttagtgtttttctatttggattccatgaagggctattctactgcacatgtcacacttgatgccaggtatgttcaaatgtagaagagattaattctagcaatttcgttctacagttgattgcagattgtaaagttcagtgaaccaccctttgacatcagaaacctctcactagtgtgtctatctaatccgttgatgctttctttagttagacaaactatgtgtgttctgagttagaatataatatcctggatcttctgtgttctgtgcatgtctctttggatatatatgcttggagtcatgctgtaatgatcttcaattttgtccaagattaccactatccatgagaacatctgctattgctttatttggattttttggtgatcgatgagattttactatatcctatactgttcagatagcctgaaattctgaaatcgttttcttcaggagctatgttattcctgtttagtttttatattatgagaaatatgtggatcatttataccctgggttgaactgcacttaacttctcctgaagaccatgtgttgcctctatatttccatcatatcttgtgccattgtttgttctgagggctgtagttaaactcattttttttttcctgttggactgctgtgttttcccctgatttttccatggttatgtgtttataattttactcctttgacttgacatctatttgtagcacaaacggataaggaatcagagttgtacattttattttctagcagttatccatgggatggcagctgggaggcatctgaccctggctggtaagacatacaagtgcccctctgcagctgtaaaattcagtcctgaatcttttcacttaatttatatctgtagtgttagcagaacaatatgatcattagccattgagatgatgtagcaggcagtcatatgagatttttttggacctcaatgttagcatggcccatttcctgattaattggactggttgatctgcaaaggttggtcttgttagctgaagtgacaccatatgcagcttattaccttgataaaaatgggagcaatgctctcatgcgtttttgagggaaaaaaagaggaagcagtgtcaacggaaactgatccttactgcagaggtgcatcaatactgaaatgagtcttgtgctacagttaattgtagtaaatcactacagcagtagcaatggtgtttccagtgtagtgcagacaacttctgttactgtagaatttcaactggaaagtacacctctgatctgatgttcagaattgatcctaaaacatgacccaaaattgatgccgactcaagtgaacttgtcaagagtctgcgtgacaagttgcttctgtatttaaagttggtgatgataatgccaaaattctggtgcatgaaggttctctaacccgttgttggatgggttttaagaaaaacaagttgtcaaccgatttttattgtaaatcattctaggaaacatactccaaactactatgaattttcctggttatttatttaatccgtgtgccactttacgtagaaaatcatgtgtttgtgtaaaccttaaattgacatgttggcaaatgtcaatatagaattgtttttcagaatttcgaggtgttgaagacatttcagtgaggaaggttacaatataacatcgagtataaggtggttacaacgcatagttggatgatttcagaggcgtgtacaacatgcataaggtgtttttcatatttcgttttacttatatattttggacgtacatgaaattgttttagaatcagtggcgttctacaatcaatgtctttaccgcaagaaagattcaagttttccagtgtttgtagtaaaagtttctttatagggatttttatggtcaataggaggtatcgagaggttattagagctaatacttcctccatctacttttaatagtcatattttatcttggcacacagaacaaggataagtaattttacttatcatccatttaaacatactactagtcattcctcgtaaacaaacgattcattaatatttatatttctcaatgcccatgtagccaatcatatgtggaagaatagagagacatacattgaatccgagaaagtcattaagaggatatgttgttggattgaaatatgcctatcaaaaataaattttttagatttaaaaaaaatgactatggagggagtataaaggtacgtaaaatctatttggagaggcatcttgattttaccttaactagcgacgcctaaacacggagaaacgtggagaagtccagctactacatagtactacatgcatgcatttttttaatatacatgtacgtcctttttctcttcaaacaaaattttctctcaaattacttatccgatctacaatctgattacatcattgtgttcgttacaattcaatcttcacaacaagatcttacatgattatattaagatgaaaaaaatatttatatttgtaaattacttttattttatatgtaaggtgtttttatcatatatatatatatatatatatatatatatatatatatatatatatatatatatatatatatataaggtacttttagagttgattaaactacttcttagatatataaaagtaaatttaatagagtctaaaagtaatttacatatattataaaagtaacataaaacaaaacggaagtaattttgtcacgacaatagaagtaaattcgtcgtacggataaaaatatgactttatataaaaattaaatttaatcagcacggatcaacacacataagtttaacaatttttaaaagtaacttcaatgttaattggaagtaacttttgcatggttcaaaagtaactctctataaatctgtttaatcatcgattgtttttttccctttcatttttgttttcatgtagaatgagaaaagaagatactgttgtattttttaagttgaaaggagatactagatggagtacaaagtagctaccactagctgtgtagtcacatccaattaaaaagacattctgtcagggttacggataaggtatgccctctatccttggatatacgatgggtaccgatatagtatacccgtgcgtgtacgaatagtttccgtatacattaaggaaatctgtcccgtgataggaacagaatctacggatggagagtcctactcggacgagactgggtctttaccatatcatgaggggtccgatatctccgagttctacttggagatcgactgactcgcggtataaaagggaccccctggcaggatctaaggcatcaaatctcaccgctaatacacccaccacagcctacgaagccggagcttacaggagccaagtcaccgggagatctagtcgggccaactcgactacggtctcgtcgatatcaccgagttcttctattccctttgtaatctatggtttccaccatataatcccataccaactggattagggctattacctgctaaggggcctgaactagtataatccttgtcttttgtctgcttgatgtcatactacgtagatcctcgtaccaacagaccccaataccctctatatccggtctacgggtatcccccgtcgacacattcattaaagttactttctttttgttacaagttacttctataatatatgtaaattacttttaggcttcatttaatttacttttacatgtataagaagtaatttagtgaaatctaaaagtaatttagatatattataaaagtaatttatatttttttatcagaatataatcatgtgagatcttgttataaatattaattgttacaaacataacggtgcaatcgaatcgtaaattggatgagtagtttaagagaaaattgtatttgaagtatatgtggataatgtctcttataaatggagtggtagctggtttagacaaactagctaccactagttgtgtagtcacgtccataaagataatatattttttttagtataatttttttacctcctggtacctttgataccaacgatcctatgcatacgctgtagttttgtttggacgcatagttagctgttctagactatttgttacatgatactatatagttttcggggatacgaaggaaaacgtgtggcctatggcctcacattcatcttagtttattatgctcttttacggtgtttgcgagatacgtaaaggtattgagaggtggtgcgatgtggatcgttgatcaagagaaaggcaagggcaagatgtgaaataaaattattattaccaatggcagtagggtaagtaactagtaaaacaccgataattttgtttgatgtgaatatcttttttgattgaaccggtacggtattaaaaaagaataggtacttatcttccttatgcttggttaca

SEQ ID NO: 10138 - DNA, 41172 bp, Oryza sativa
taattcaccaactcattcttacacctacatactcattcatcaaatactacggacgagaatcatccaatccaacgccacagaatcgttccacgtaccccctcaacctccgcgcgcatttccccaactcccctcaaccgaaaatcacgccgctcagatcgctcctcctgccatcttcaacgcgctctccttccccaacataaatcgctccgcctccctctcccaacctacagcgccgtcgcatcccctgccaccacaagcgccgccgcactccccccggcaaaccctaatcgcctcctcctctctcccctgctgccacccttccgtttcgccaccagcgcgacggctcccctccccaccgaccgcgtcgcgaactcgcgatatgcctccgacgctcgtgcccccctccagcgacggcggcgccgcccctcgccgctgaccgcgcagccggcgcccagtccctcctgccgaccgcgtcgcgagacgcctccctcatgattgacgcgctttgttctgggttgggcacagtaagctgaagtacctcgtcgccagctccgtctccgaggcctgcaacaactccgtcctgctcctcggcccctgcggctgtgaggttttccttctgcttcccctttcagcagttttctggaatgcaggggtggtgttcgacgaaatgtgccagtgggcggtctacgactttatgctatctgttgttttggcctggactgatatttcaattcttcgcaggggtcgacatggttctagacgatctgaagaaggagcatcctaatgcaatatcctgactttacttgttgctagaaatgtatccatgtatttgcgtaatacacgaccaatgatttacctacgttggccgtgaaataaacacaggttacgagaaaatagtttgtttcagggcgctttagggcggaaggggacaaggctaaatgtagaaattcctttcatatttttatattctcaaatgcatggcctagccaaaaggacaatatatcataatgcacaattagttagactttgttaacttgtagtccagttggatcattgtgcaaacttttttcagatcaggctgaatgggatgctacatagtgatgacaactgtgccacgaaggttagagctttctgatgccagcttttttggttcaatttctgtattccacatgctctctgaaccagatctccctctctcttaactcctgtccaccaattcagttaactccatagttgtttctatgctttatcaactccaatgcagccatgctaatgcttctgttactttgcttttaaggaaattgcgaggcaactttgtttggaacatcagttatcattttccaaaatggtgtgtagcgtctactctagccttcactctctcaattattgttctttttaccattttaaaagaccttatctcttttaggcttcttcagatgacaacacggaattcatgattgacatgttacggtcagtgaagtgttaacatgatgagcatctgtacatcatagagacatcctttttcctgggtgaatttcacctaatctgagccatccttttacttctatgactgagatcacctttttctaattaacaacccttatactcagtttagatgtggagggaatatacatacttttctcttcatgtagcgatgatgaggaagatcggtactgaggaccggcaccagtggcatcttatgtatggtttcagatttactagggatgtatgtatggtttcagatcgtggttttggatgaataaattgagtttaggttttagtgcaaccttgtctcttgcatgcgtggggatcgttggggtcttacagaatgcatgacaaaatggattccggtagaaaaacataatatactcttacttgcaccgtgtatattatatatttacctcgagcatagtaacagattcaatttctatctcgaatggtgcttcaaacaatatatacgtggggttgtttttttggcccttatcttttttaatcttccttcctcttttctctgtgtaaaaatatacgatgcagctcgaaatgtattgttttttatatgttcatcggcctgttcttgtttgctataggaagtatgcattttgttggtatgcattaacagagaaggaccttagagaaaaactgaaaaatcatttgtctgaaaattggttgtgaattttagttctttatatccccgaggaatgcaaatattatctggtttgtttccggcttatttcggtggctttcagatataaaagaagggaaaaaaagagcagtgactgtagcaagtgtggagcaatacctgtagtcatggcatattactaacgctcgaaggtttagccaacgcttatatccatagggttataaaccatttggcatattactagtaagctgtggctgtcgcgacggccgtgtggcagaagtccaccgaccctgcctgctacgacaagctcacgcccgtcttctcgccgcccaagtgcgacgacagcgtcgacccggacgccgcctggtacgtgcccatgcgctcctgcctcacctcgccttctttcactttctcgcgctacaagaagctggcgctcgacgccacccccaagtggccgcagcgcctggccgtcgccccagagcgcattggcaccgttcccgggagcagtgccgccgccttcaagcacgacgatggcaagtggaagcttcggaccaagcactacaaggctctgctcccggcgctggggagcgacaagatcaggaacgtgatggacatgaacaccgtctacggaggcttcgccgccagcctcatcaaggaccccgtctgggtcatgaacgtcgtctcctcctacggacccaactccctcggcgtcgtcttcgacagaggcctcatcggcaccaaccacgactggtgactatttgcatttaattcattcttctactatatcatagcttaattattcaactactcattgtccttccaatcaactctactgtaggtgtgaggcattctctacataccccaggacgtacgatctattgcatcttgatggcttgtttactgcagagtctcataggtacgtacacttgcaaatcagcatttctaacttcaaattcacaagaaagcaagtaagaaatactccatccagttacaattaacacgtacttaccgtacgttgcaattgcaggtgcgagatgaagtttgtacttcttgagatggaccgtatccttcgtcccactggttatgccataatccgcgagaacgcctactttctggattctgtagccatcattgtcaaaggaatgagatggaactgtgacaagcatgataccgaatacaaggcagacaaggagaaggtcctcatctgccagaaaaagctttggtcaggaaagaacacccagcattgaaaaaaataaatcaataacttgatagcctcaccttaatcgaacctggagggatcacaatgtaaatctgctcaacgatttcaagccattgctcaacctaaggcacttcaccctcccactagacttcacactctgatacaagaacattcgtataatgattaaattaaataaaatgagcaatactccaatataggatccaatacttcctactctctgccagttatcacacaattattttttacagttactaggggaccaattaattaataccaccaagaggcagctgtaagttattactttttttttttagaatggacaactgtaagttacttttatactactatatagcgtgttcatttgtattagccatagcttgtttctacgattgtaacaataggaacggctatatatttattttaattgaatgtttacaggagtaagatattgttgttggtatatgttcctcaaattaacaagagttggctgtgggttttgcttttgcaaatcacgatcgatgaaggaagagtatataacgagtaacaatactattaccattattcaataaaaaacaatactattaccatgtgcaatcaaattgccctaacaagcatgacgaagcactgtttttctgaggcacatcagtacactaccaccatgcacaaccagcagcacttgctttggcatacttttcagtgacactacatctgataatatcaaattgtaagccaaagaaaactaaaaggggagcccttctcggagcaagaggtgcatagtagggctgtcaaaaaagctcgaggctcgcgagctgctcgagctcggctcgtcctaggctcgattcgagctcggctcgagctccagacgagccgagccgagcctctccctaagctcgcgagctttgtcgagccgagctcgagcttctaacgagcctagtaatatatcatttttattgttacttaataacttaggagatcaaatatgttatttgtatgtcttatattgacataatatatttattttattcttttttcctcttctattagtatgataaactagaaattaattatttttttaaagattatctttgaaatatatatatattttacttaaaaatcaagctcggtaatcgagctcgagccgagcctgtcggaaagctcgaacattttataggctcggctcgagctcggctcgagcttgtatcgagctcgagcctaggctgacgagctcgctcgagctcggctcgttgacagccctagtgcatagggccattaaggagatgcccaccgacaaagccccaaggccagatggcttcactgggatcttcttcaaagtctgctgggaaatcatcaaagaagacattcttctagtcttagactcaatctataatctcatatgtgcacatctaaatctgctcaactccgcgaacatcgtcctaatacctaagaaagaaggggctgagggggtcgcggactacaggccaattagcctcattcacggtatcgccaagatcttctccaagatgcttgcgctgcggctaaggccacacatgcatacgttgatttcggtcaatcaaagtgccttcataaaaggaagaagcattcatggcaacttccttttcgtaagaaacaaggctagaagataccaccgcttgaagcgagcaatgctgctattcaagctagacataactaaggccttcgattccattcgctgggactaccttcttgccttgctatagcaaaggggtttcccaacaagatggagagattggttgggggctattttctcaacgtcaacttcgcaagtactcctcaatggttcgccagggcagcgaattaagcatggcagaggccttagacaaggggaccccctttcaccactgatattcatacttgcaattgactccctgcaacgaatcctctcaaaggcaacagagctcggtgcaatctcgaagttgtgagggagaacgacccgtctgaggacctcgatgtatgcggacgacgcagtcatcttcattaaccccactcgaggcgatgtcacggcttttgcagacatcctacatcgctttggcattgccataggactcgtcaccaaccttcaaaaatcccaagtggcggccatcagatgtgacaccattgagttgacggaggttcttgagggcgttccggcgataagagcaaacttccccataaagtacttgggcctccccttggtactgggtagattacgaaaggcggatttgcaacctatctttgacaaaatctcaggaaggataacaaactggacagggaagaacatggcagcagctagaagaaccacgcttgtcaaatctatgcttacggcacaacctatctatctcctgactgccttgaaaaccacgaaggaatcccttgagcaaatagacaagcagcgccgtcgctttctctaggccggaacgggagatatcaccggaggaaaatgtaaagtcaattggaaaaagacgtgcttgccaaccagtcagggaggattgggagtcctagatctagagaaattcacgagggtcttgaggctgcgatggttatggcacgagtggaaggatccgaccaagccttgggtgggactggaaacgccctgcgatgaaattgacaggagtcttttcgccgccttaacaaagaaaacaattggagatgggaacatgacgcgcttatgggattccgcctggatcgagggacaaagacccaaagacctcatgccactggtctatgcgatctctaaaaacagagggaggtctcttcgaaatggaaaggaggaggacgcctgggttcaggacctggctctagaatcacactcgcctattatagtagaactagttgacaactggttgccctgtgggaagcggccggaatgtccacttaggcattggagaaccggaccaaattacttggaaattcacaagtagcggacgctacacgacctcctcggcctaccatgcgcaatgtcaaggaacaccgagcacaagtttcaactccttaatctggaaagcctgggcgccggggaaatgcaaatttcatgcttggctcatcattcaaaatagagtatggacttcagatcgacttgcgacaaggggatggcaaaacaatgggtgtttgtcctctgccactgcgaggctgagacggcgctgcatctcattgccacttgtagatacactaaaaggatatagggcctcgttgctggacgggtcggctaccagcagattgagccggctcaatgggaggaggcactgtcagtgcaacagtggtgggagaaccttgcaaacatgccaaatgctccgaaaaaagggctccgatcactcataatgctagttgtatgagaaatatggaaagagagaaatcggcgaatctttgaccacaaagaggtggcaacaagtttcctcatgtcgagaatcaaagaataagctaacctttgggctttagcgggggtaaagcggctgcgcgagttaatcccgcactttgtatagtgtatagctgcaggctccagatttttttttcttttgcccctaggggttgtattttctcctgctctattcaatgaaaaggcactatagtactgtttttcgttcaaaaaaaaaagagctaacagattattttgtgtgtggattagagtacatgatctgcaatttgaaaagcacagctgtctcaaaagaagtctagaactctatatcagttcagtaattaaacttgataattctttggttttttagataatggaaatggtatataatgattctttgttcaccaagagatgaatttttttgaaaggattcaccaagagatgaattaatctgcttttgacaaaatcaatgaattgggagcgaaaataaaagtaaaaaaaaaacagaagcacgttggctatgttttcaagcttcatgtaaagttttaatttaatctagggatgatgtcttaaaaaaatgagcctttgtgcttgtaagtcaagaaaggtgcagtcaatgcaagctatggaacttataggtccatctgtaagcaaggtgggtactcaacaaagtccacaggagacaccgtacgaatgcgaccatggtatgtacgataccatggtgtattggtgtatacacacacatgcacctaatataaccccaatcaagtccatgctacactgttaaactatcccaaaaaggtgcagtcaatgcaatcagtacttgaatcagttaatacaatatatattttcaggcagaaaggctagctagaatgcaatatatttgcaggttagagaaagtaccacacttagagataggcacgcgacaatggatcgagtcagcagataatatatatgcaccatacgaagagcagtgtgcaggagtgtgaatggcgaagaccctttaggattgcagtgtgaaggcacacaaaccagtgagttcgatcaggccggcttcagtgtgacagggtgtatatatctagtccagatctagatagatgaaactacagtatctaattcttgaacctatttttgaatgaacaaactgcttcctgcagaatttcagactcacagttaacaaccaggttggtgagattgaaattaaaggagacagagatgtagacacacagctcgtgtacatgcatgcatggaggcgtttcatcaaacaccttgcgcctgcgggagaggaggagaggagaggatccaaaaggaaggcaactgaagaagaagttgtaaggtgtggtctgccgtctgcggcggggcgaaatgtgtggtgtgggctaaaaaatgtaggccccctttgaattggagggaaaatggaggaaaaacaaaggaattgaaatcctacactattcatgcctttgattcgtaggaatgagaaaaggaaaaatgtaggaaacttttctattcctacaattctagagcaaaaacgtaggaaatttaacatccactctaacctcttggaaaactttcccagagtctatctctctcatctaattcctgcatttttcctgtggtctaatcaaacggtcattcctatatttttcctgtgttttgcaatcctctgtttttacacttgcattcctaccaaaatcctgtgtttttcctattcctccgttttttcaatcctacgattcaaaggggcccgtagtgtaggaagtaaggcccaaggcccatccgatatcgactcgactcttatctgtgtgggccgtcgtcgtcttcaaccctcctcctcctcggactaggactaggactcggactctccccttcctcctcctcctctctacctctacctctgtgtgggcagccgcaggaggaggccggctgggctgcgctgcgcgatggaaccggagagggaggcatcgtcggagtggggagatggtgtcggggtgctgggtttccgggtgaaggcgtcttcgtgcgagccggcggcgcagaaggcggccaatgtgctgtagccagactttgcgcttcccactgggtccacctgccaccaacaccaaggagtgggatccgtgctcgagctcaggcgtgcgtacatagacgacttgttgtttcttccccctctctaactaggagtctccttctctagccctgaatgaattgctgaatttgctgctgcaggagccgtgcctcctctcccacatccgcatctacaacaagtccgtcctcgagtgggagatcactgccggcctgcgctacaacaagccagataccttcgtcaaggttcgcccgcgctgcgaggctcccaagcgcgacatactctatcctgccaaccacaccccttgccgctacgtccgcatctcttgtatgcgcggcaaccctatcgccatcttcttcatccaggtaggagtaactactagtataactttactcttcctccggatatattccgagtaataagtcactcttcttcttcagctcattggaatccctatacctggactggaacctgacctccagcctctagtcaactacctattgccacatatcactgcacacaaacaatcctctcaaaatatccacctccaggtttgtttcttcttcttcttctaacttctgtctgtgtcttggcaacatataagtttcttctaatcatgcaatttttttgatattagttactcaaagacattgcaagcaggctaccaccatttctgccccagattgaggtaagctttccgactagcatgcatctccccatgtccatgtatggtatgttgtgcctttgttgtttccctttaatcgccgctgtctatctgagtgcaggctgacctcgctagtgtcacagacactccagacagcagtgtacactttttggctctgcttgctgggccattttatccaatcctccaacttacaaatgaaaggtgccagttccttgttcaacattcaactgcatatcaattattttttttatactaagctctgtgctgtcctagattatttttcggacagattatgtgtttgtgcaggttgctgtacagacatgtgtgcgcacacctacatgcaagcactgctatctgaaacaccttcttattttacagggattttactaaatcattaattagctctgctgattcagatgctctgaaaagtagtttggcttctactccaacggtttcttcaaactttgaggcatgtagtttttttctttccaatgtacttctaccgcctttctagtttctgcattgcactatgataatgtgaaatgttatagctgatatatgctgaaagagtgaaagctttgattaaatggtgctgttgcacttgctgctttagtaacacacaattttcatttgtgtgaagtgtctgtaagacctaaccttaatcttcagcacattgttttctcgagagactacgggaattcatagtgctaactaagggtatagacacctggctcctttagaccttaccttgaactataggaacagaagctaatggcaggatgcatcccacagtgacataataaaattagataggttttatggttggatccaatagacaaaaagtccttcatgactattactctgtaggctgcaatatctatgtaagatttgacttaatgaaaactaagaaacacaagttgtttcttttttgaaaccaaaagtagtatcatgtaaatcatccacattttcttatattttactggagctttctgtattccataaaaaccatcatgtaaaccaataagacaatttgggatggttggtcaatattataaattattccctacattccaaaatataaggctcaaccacccttaacccaaaaaccaagatattatcacatcatagtttggatcatcctaatcctatatacttatagttcatccccactaagtgtagttaatgctatttctctcttctctcatgaagccacatcacaattatttctagcctttggatgatagatctatggtacacatagtctcttctttcttctctcataaaaccatgcaatctcaatttttaggctcaaaattcataagtatcaattacataaaatatgttcaccttgcactatattggaaccatttttaggaggtcattttgttttggttataaaatatattgtggcttatttgtacatattatacaacttaatttcccacagaaagacggcggggtatttatctagtaaatatcatgcatgcacccaacagaattaaagatcttgagtatggaggatttaaaaaataataatttagtgggaaagaagtgctagttaatagcatgcattcattccttatattatgaaacatctcgaaaaagtagttgcgccttatattatggaatggagggagtagtaaattattactacctccatcccaaaatataacaacttttggttatgtatcttgggacagagggagtagttatcacctacttcctccatttcatattataaatcattttgggtttgtcctaaatcaaacctcttttgtgaccaagcttataagaaaatatagcaacatttccacaaaataaatatactacaaaaatatatttaatggtgaatttaatgaaactaatttggtgctttagatgttagtacacttacctataaacttggtcaaacttgaagaggtttgacttgacaaaaccgaagtgacatataatatgaaaccgagggagtatttaggatttatgcgtttttcatatgggcatttatcttaattgctcctttcagtttctgaattctttgattccctccaggcacaacctaggagatcacggagtccatcttctgttcagcctgcttgttttctggcatttcgatctgaaacagccgtactgctcttaaggaaagcacacagagacagagcccttggaattgtttgcctgaaagtaggttctttgatgtccttttcctttcttattgattacaaactcttcccctcagagggttttcatgacatgtatttattttgaaattaggcatcaaaggtcctgcaagaacttctggagcccgatccattgttagatgatgcttctgaccaagtactttgtacagactactctagtttgtttggagatgaatttagcttatcggagaatcgctttgatgcctctattctgaacattttggatattgctgctgttgaagaaggcattcttcatatactatatgcagcttcatcacaggttctgtctgaactctgaagttgtatctttgtatatattttcagttcctctgcatttactttctgtttttttttttctagaacacctttataacctttttggtttcaattgtagcctctgttatgttgcaagcttgctgagaaaggttcagacatgtggtctgtcttaccacttgttcaagctctgcttccaggtattaagtggaacatatatacacttgtgctttatattttttactttttgatccaaatggccaaaaaaaatgtgaatagatagaacatttgttaccaaataatgtacatattcccccatgctcattcatatcttatcctatatataccaagtgatgacaggcctttgccaactggtgtaacataatgacacctttgtttttgtgaattttctgggatttatcctttggcctctccgttggcatgggcctaaggctttgggatgattgtaattaactgcctaacttcacccattcgttgagttagagaaggggaattcctgcagttgcataagcgtacaacacagatggctttgttgactggtgtcactgatagtatgctttttctctctcgtgttcctgtagcacttcgtcctccacttagccctggttctactgaacagattgatggttgtcttagccaatggaatcatccaaatgttcataaagctctctctcaggtacctgaattggcactattttattagctttgtcatgcatcacggacatcacttaatattcctcaagttaactgtttctgcagattgctacaatgtcaatgtcatcatcagttcttcatcctcttctcagagcctgtgctggttatctttcatcctacctgtcatcacatgtttgttacataactctctcctacaaaaatatcccatttcttctgaaaattagtgatgtctcttattttcattgttaggcaaaagcagcctgtgttttgcttgacttatgcaggggaccattatcaccatgggtacccatgatcacagcaaaggtttctttttatgatttttccccacacttatttctacaatccatatctttttcacaaccttgtatactctttaaacaggtagaccttgccattgaacttctggaggatctcctgggtattatccaggtatgtacaagttaaaaaaaaaccttagcatggcataatttatgttaacctttgatgcatgtaatctggcatatttctatattgagtaagttgcccacgcattataagaacacttggctggcttgagttttattttgcatgtcgctgaagatatgtgtggtatgtaatctggatcctcttggacaaaagtacacagcgaagtcaggtctggatgcaccaccatactctactattggaatatcaatcaagtgatcaatcaactacctgcagtgctcttccctaagctcagcaattctattcctgttgtgtgtttctagtaagattttttagtggatagtcaccttcttgtcgtatgcacaattgtgcatatcttctgtgtatcctggagtggacagcagcatagatgatagatggcacatgcagaagtgtctgtatcatcatggcagagtgcatggcaatggaccatgtccgtcgagtatgctgaccctgcatcttgagcataacatatcccaggtagaaacgtgagcgatgtgaaaacatcgaaaaagtccggataatatttttgcaaatccgaagttgacacgtgctagcgttgacatgggcctcctaggtatcaaccaatgttatctgctgatgtggaaaaaatcatgcgtggcatgctctatgataaaaacacgctacctgaccagtctttttcacctggaggctcattttcaaattcttgcaccagattctacccatctgccaagttattagagcatacataatttactcttctgtatcttaccatacttctataggattgacacttttgtaccaataactaataaataaagaaatcaattcttcaatttatttattttttattttgggttgactcttgaaggcatttagatatacgatgtgtgaaggtggtatgacaatattggtcatgttttctcactacaaaaggagtattttaccatgactatgcgcctttcctttttgccatcctaagttaatatagatgatttgctttgttacttcaagtcatgatttacccaaatttatgtgggatcaaatggttttgtttcttttaatgtttttcagggagttggtcaatctcttactcgttctcgtgcagcactgaagtatattgcattggccatatctggccatatggatgatgttctcacagaatataaagtacattcatttttcctcctgaaagtgagcttttccttggtgattggtttgttttacagactccttaacttgtattatgtaaatttacctactctcaggacgtcaaacataagttacttttcattctggagatgctagatccttttattgatccttctgtaagtgttatgacagatgcaatggcatttggtgatgtgtctgttgtgcatttggagaagcaagcaagcgcttgcaatatttcgttaaatattatccgtacagcagtgaagaggcctgctgttctcccttctttagaacttgaatggcgtcgtggtgctgttgccacaaggttggtgaactctatatgtttacatgcttatcataaatttgccattaagattgatctgaacttgtcatggttgatgagaaccagaatagtactgtcattatttaattgtgacttcctctggtcacaaaattctccattggaagcatgcaattgaacttcatcattgcagaaaaaaagaataccttggaggaactagttttgcctttagctaataagaaagatatgcacccaagtttgaaccaaagaggacttgggatgtatcatagaacctggtaaaccgtgtgactttagcatgcacatatgattgacggcttaaacattaaagcatttctctagctcagacctactttgtatgctggtaaaaacatgctaaatctagatttgatttgcagtgttattctctctaccttggatccgcatatgccactccctcctgacatagatctctgcaaaagttcaatgcctgagattgatcaaatatctctgatagttccaaactgtccaccgcactcctgcagtgctgaagatgctgatgggcgtgatacatctgaaacaactcccagggcagatattcttgaacagtgcaattctttatttgctccagaagaattagagcaatctgagttgacaaagactttggaagaaaaaaagcatgagaaaataagtacagatttggaccagaacttcccagaggacacaaaaagtaatggaaaattaccagctggcctttttcagttagataatatttttgctactgattactatgatgcacatgctgattatctgcagctggtgaactatcaggactgtgaattaagagctctagaatttcagcgcttagcactgaatctatgcacacaacaagaacctacagttgaggggcataatgctggaatagatgcttttctgttagctgctgaatgctatgttaatccactctttctcttggatttccattctaattcggagtctttggatgaaattgaacgtattcatgcagaattgatccaaggaaattgtttctctgaggcgaaacatctgcgtgctaaagatattgatctcatgaaaatttataatttggagaataaacgagataaagcggtcctggatttactcatgcaagctgcaagatatgattttgaataccagggaaagatacctgatgggaaaccttttccagatgatgttgaagatggcaagcaatatatagaaatttcaccagaggctagacaccttgctgatgctgtaactttggtcagaaagaaccaggctatgctttgtcactttatcatgaaacaatttgaaaagaaaggacactctcctaacgaaattctcctccagagcttgttgttcttgttgcactcagcaactgatctattttgtccaccagagaatgtgatcgatatcatattgaaatccgccgaagatctcaatggaaaacttgtatgtctttacaattccgttaatgcaaggaataataaattggatagaataaaactacattatctacgaagacgttgggcactgctccagaagctggttcttgcttcgtctggcagtgataatactagagaacttgtcagcattaaaagagatggtttccgttttaaaagtctggttcctccatcagcatggatacataagatatcagatttttccaggtcttttagtccactacctcgattttttggatggatggcagtgtcccgttatgccaaggaatatttaaatgagcagctatttcttgcctctgacttctcacagcttacatctttgctgtcaattttcaccgatgaactttctttgatgggtggtgttactactcagaaggccaagtctgctaaaattgaacaatctggttgcaataactatgtgcttcttaagaaggaacctttgctgtcagaccaaccaagcatgagattgtttcagattttacttcctgaactgcatttcttctttccgagtatgagcaaaaagtttgatgcatttggccaaagcattttggaagctgttgggttacaattaaaatgtctcccaaaaagtgcagtgcatgatgttctttgttggttttcagaaatgtgcctgtggccttatcttggaaatattagggagcatcttgcatttgcaaacggagttaatagtttaaaaggaaacattgcagctaaggcaaaggctgttgttttctacctacttgagtcaattgtcgctgagcacttggaagttattgttcctgaaatgccacggatggtgcacattcttgtgtcactttgtagagcttcttacactgatgtagctttccttgattctgtgctgtgcctaatgaagccaatgatctcacacttcttaaggaagagtactgataatggaaatgtatcaggtgatattactgaatgcagtgattttgagttactttgttttgaagagttatttgaaacaatacagtttggtaaacaatcagaggatacacctggcaataagaaccaggtgccctttctcatattcattctgggttcgctatttcctgatctgtcctttaagaggaggattgagatattaggctcattattagtatgggtagacttcggcagttctgatccatcatcattgttgtgtagttatctacaaggctttcaggcatttattgatggttgtgaaactatactagttcagaatattgaattatttggtatgcatgtcctttctgagagaaaccagtctacagagtttgctaactccgcaagtccagatgacaccatggataacaagaaagcacaggccagtgtagcacaggtacagaggaggtccacagaatatcatgagaatggtgaaaattctaagggagttgattccccacatactgtttgtattaaagaattttgtggtgccctggagaggttagtgtcaaaccttgcaccatctattgagggcagttggaaatggcaccttcagttggcctctaggttatctttatcgattgcaaaatgtttgctgtatgcaaaatgcctaaagtctattgccgaaggaggtatgatctatagtagcatcaaacaagaggttggtactgaaatatccactgatctttcctaaaaacactgagagagtgctctccaaggtctcgcagaagccattttagtaaatcagaagaagcagtgctggcaggtggcatcagttatgctcgattatatgattaagcttccaaatattcttgcttgggataatgttcttaatgtcatgtcttgtgcaatgaaacacctctgctctcatgcacccaggatatcttggaggcttcagacagagaaatggttatcaatattggtttcttatggaattgaaggccttaagaacagtgagaattcattgattgatcttttctgcacattgttgagtcatgctgaaccagaacagcgctctgttgcattgcagcaacttgggaggattattatgagtacaactaaagttgattatgaatatactacttataagcaaaattcactctcatctggttcaacagtaacatcccttttggttactcatacctgggaccgagtagcagcattggctttctatgattcttctatgttattaaggaagcatgcattggctttgcttactgaatacattccatttgttgatagaaatcatctacagtcctttcttggatccagtaacagcatccttaatggtgcggaacaattttcttatgcaatagaacaggggtatttgacacgaatgtctttgctgttgctttcaagggcgtgtctctattctgctcctgaagatattgctttaatacctgaatgtgtttggagaaaactggaaaatatgcaaacatcaatacctggtaaatttatgctccttaacaatctgcactttcttttttgcataaacacatgtaaattatgttgtacatcctttcaagatcaataactaccaattaaccatgcatctaacttttttatgtcttactaggatgctttggtgatatggagaaagatctctggcgagcactgtgtcaactaagaagtgaatctgatgctaaaagtgtagagctctctctctctctctctcatacctaaaagttattttaatatcttaaaaatcagttctgtggttgagttgataccatagcacgacaaagggaagtagcttcagtagaattttgtacatgtctgtcagcagcaatactgcttccagggagttgccgttgtctgactaagcacaggagaacacaattactaggccgctgaagcgagctactagaattaagaagtctaatgttcgtctgagtgggcctgaatgggcttgtaagtaatagctggctatggctctgtcgacagcctggctgggacccagcaaccagtgagagagagtgtgttgaatataaacaaaacttgtaagaacagaaaggtatctttggagatcaatcgaacggcggcgttggcggcggaggcgatgcgatctcgttgatcgtatcgataattcttgttcttgagtgagctgatcgagagattgcgagagaatcctaacaacttggtatcagagcttcgtgatcctcggaaatccttgattccgctgtaaaattcttgggcaaggattggatcgctcttgagtgaatccgcgaaaaggctacccagccttgccttgcttgagttggtggaattcgggaagagttgatcacttgatctgaaaccctggagaaaccacgatttgtgacgaagcagacggccaaaatcatggagaatgaggctaagcttgaccttctgttgaagaaaatggaggagacagagcgcaagcgagaggagggtgagaagaagcagagtttggagatgagggtcttcaaggaggcggtagaatcgtggatccctgcggtggagaagaaggtggatgtccttcagtccactgtggatatgctacaaacccaagtagcgaaactctctgctccacctccaacaaattcggcgactccttcctcttcgtcgccatccggagcggcaggtgttcgagcaattgactctaccggcttaaatggccaaggcgctgcaaattctacacgggaggaggctgatggggtattcaataccccaaagccacccccgggcaatggtacgcttgcgtcacaaaatttttctccattccattgtcgagttgatgcttctgccatgaattctttccaatctggaacatctgttgggttgactggtggggtagctcctatgacttgcccaaaatttgatggagataacccaatcatgtggaaagttaactgtgaatcttattttgatctctatggaatccatccaattaactgggttaaggttgccactcttaatttcactgggaatgcagctttttggttgcaagctgttagatcacaattagagggggtgacctgggaggagctatgtgatagggtgtgcactaggtttaacaaagatagacaacaggctcttatcagacaatggtttaaaatttgtcaaactggcacagtagctgattatgtggaaaaattcgattccatcatgcaccagttaatggcttatgaccccactttcaaacctgtttactttgtcaccaagtttgtggaaggcttaaaacatgaaatccggtctgcaattcttcttcaacgtcctggcgacctggatgctgcttgcactcttgcatttttgcaggaggaggcgcttgaaggtgataagggcattgacatcaagaaaggtgaaggctctggttctgccaagcactctgtgagagttgcattgccattacctacccctccaactgttaaagggggctctccttcctttgctgaagaaagacgaatttctgacaatggtagatcccaaaaccgtgaaatggatagattggctacactgaaggcttatcggaggtcgaagggattatgtttcacttgcggggagaaatggggtcgagaacataagtgtgcttcttccattcaattacatgtagttcaagaactattggctgttttgcagggccctgacatcagttcagaagagtttatagttcagtctgatgatagtttgatggctatttcaattcaggctatcaatggtactgaatctaatcattctattagattgaggggctggttacagggtattgaggtgcttatgttggtggattctgacagtacccactcttttgttgatcatcagcttggattgaagctaactggagttaaatctatggcttctcctgcaagagttaaggtggctgatggtgggcatctcaattgttctctgtatgtgaataactgtgattggttaactcaaggcattcatttcaagagcaatttcagattgctgtctttgggcacctatgatgtcatcttgggtatggactggttagaacaatttagtcccatgaaagtggactgggttcaaaagtggttagaatttcagtttcagggatctactgtcagattgcaaggtattcagtcccatatttctagctgtcttcctatcacccctgatcaattgactgggttactgaaatcaggcagtgccttgttcttgatccacttagacagcaaccatacatcccatattactacaattcctgcacatgtgcagccactactggatgagtttcagtctgtctttcaggaacctactgaattaccacctaagaggttgtgtgatcacaagattccttacttcctggatccaaggcagtgttcattcgtccatatcgtcataccccagctcaaaaggatgaaatcgaaagacaagttaaagaaatgttgcagaatggcattatacaacatagttccagtcccttctcttctcctgccctattggttaaaaagaaggatggctcttggagagtatgtatcgattacagacagttgaatgccattactaagaagggaacctacccaatgccaataattgatgagttactggatgaattagctggagctaagattttttctaaattggatttacgagctggatatcaccaaattagaatggctgagggtgaagaatttaaaactgcctttcaaacacacagtggtcactatgagtataaagtcatgtcattcggtctcactggagcccctgctacgtttcaaggtgctatgaatgataccttgagacccttgttaaggaaatgtgccctggtcttttttgatgatattttgatatatagccctgatatgaattctcatctagaccacctcaaacaagttctgcagttgttagacactcatcagtggaaggttaaactgagtaagtgtgactttgctcaaactcagatttcttatttggggcatattatcagtggtcaaggagtctcaactgatccttctaagatacaaagcattgttgattgggcagtacctactacactcaagaaactcaggggttttttggggttggccggatattataggaaatttgttaaagattttggtactctcagcaaacccttgacacagttgctcaagaaggatgccccttttgtttggtcagctgaagtgaaccaagcttttcaagctttaaaacatgcccttacttcaactccagtattggctctccctaacttccagcaaggtttcaccattgaaacagatgctagtgacattggcataggggctgttttatctcaaaatcagcaccctgttgcttttgttagtaaggctcttggtcctagaactcaaggtctttccacttatgagaaagaatgtttagcaatcatgatggcagttgatcattggcggccatatttgcagtttcaagaattcttgatcattacagaccatcatagcttgatgcacctcactgaacagcggctccacaccccttggcagcagaaagcatttaccaagctttcgggattacaatttcagattgtttacaggaagggtaaacataatgctgctgctgatgcattgtctcgacatgttcctgaggaaacctctgaatttttaggaatctcaacttgttctccagtctggttgcaagatatccttcatggttatgatcaggacccattggctctttctttacttactgggttggctgttaacccctcttcttatcctcactactctctgtctaaaggacttattaaacataaaggcaaggtgtgggtcggtaacaattccaacatccaacaacagatcatttctgcccttcatgatagccctttaggaggtcattctggatttccagtaacttacaaaaggatcaagtctcttttctcttggccacatatgaagctcactgttcaaaagcaattagcttcttgtgctgtttgccttcaagccaagcctgacaggtccaaatatcctgggttattacaacctcttcctgtgcctgacggtgcctggcagataatatcaatggatttcattgaaggtctgcctaaatcataccaccaagattgcattctggttgttgttgataagttctctaagtatgcacactttatgcccttatctcatcctttctcagccttggatgttgctaaagtattcatgctgaatgtttataagcttcatggattaccacagatcatcatttctgaccgtgataagatttttactagtgcattatgggagcagttattcctgaggtctggcactaaattgcatttatcttcagcttatcacccgcaatccgatggacaaactgagcgagttaaccaatgcttggagatatttctgcgttgttttgttcatgccaccccagctaagtggtctctttggttacaccttgctgaattttggtacaactcttcttaccattcggcattgaataagactccttttgaagtcttgtatggttatcctccttctcactttggtattcgagctgatgcctgcgtcatttctgacttggattcttggctgtctgaaaggcatttgatgactcaactgcttcgacagcatttgaacagagcacagcaagttatgaaaacacaagctgacaaaaagcgcagttttcgctcttttcaggtgggggattgggtttttcttaaactgcagccttatgtgcaatcttcggtggcaaaaagagccaatcacaagctctccttccgttattttggtccttatcaaatcttgtccaaagtgggatcggtggcttataaattgcagttaccagcagatagcatggttcacccggtttttcatgtctcgcaattgaaaggaactcagaactttaagcactccattcagtctcaattgcccaacattacagatcatattcagtatcctgttcagatcttggatacaaggatacagaagaaaggtaacaaagttgtccgtcaaattcttgtttgctggtctaatttgcctgcagtggaagccacctgggaagatgaagaagagctcaagcagcgtttcccttctgcactgccttgggggcaagtcagtcttcaaggggtggggtttgtcagcagcaatactgcttccagggagttgccgttgtctgacgaagcacaggagaacacaattactaggccgctgaagcgagctactagaattaagaagtctaatgttcgtctgagtgggcctgaatgggcttgtaagtaatagctggctatggctctgtcgacagcctggctgggacccagcaaccagtgagagagagtgtgttgaatataaacaaaacttgtaagaacagaaaggtatctttggagatcaatcgaatggcggcgttggcggcggaggcgatgcgatctcgttgatcgtatcgataattcttgttcttgagtgagctgatcgagagattgcgagagaatcctaacaatgtctctaatactgattactgattgcatacctgttcccttaggtcgtaaaagaacttctcacggaatctactgcgaaaccagtcgaaactgattttaagggcatccgtgaatcgattcttcaggtcatattctttagggcactctattgttggctatctttcttctttctggcttgatcctctgccttcaaacatcactgcttatagttcaaaaactcaaactaggttgtcagtgctgactgctgactgtgcttgcacagttaaactgtacaacataaattgcaatacttgcaaattagctaactagttctcctaattgagccaaatgagcatctatttttagaatttgataatgacaggatcagtgcaattactttgcccaaatgaataattcttgatgacaactattattgttgtggattttttattcgtcatgcaatcaataggcacaactggtccactgcagtgtgcttgtattatagtttctttgttcaaaaggttattatctctataccagaagatgctgtaaattatatttcctgatcttgtcagtgctggtctatctcgattcatgattctctcttttataggtgctgtcctctttgagttctgttgaatcatactttgagttcttctcaacaagatctgatcaggaatatcaggttagaaatgcaacaagggctttccttttgggcctttgttttgaacaccttatactgacacttggttaatcataacattaaggaacttgaagaagcagagatcgaattggagattgttaaaaatgagaaagcacgtcacagctttattgtacatccccaggacaccatgattccggacatgtcatcatgtaagactaacgacttttaaggcatcctttcattaacgatgtacttttgatgtgttatgatattattctatttccagactataaggatggtaatgaggttaataagcagctccagcaaattcaggaagatatacggtccttgtaagtcctgaactcctgatttgtttcaactgaactatttttctgtcatggtaatagaccagccctgccaagccctttagggggctatggcctatgggcaataatatatggtcctgcccagtcagcatgtcatgcgctcatgcctggcttttgatcgttccttttgggtatgatgagtctcaagtggttggatattggttcaattgttcaacgtctaaaaatactgataagagaagaaaccagcctactaatgagtaaataggctcaatttgtcccatagagtatactttcatgaaaatagaaagtacattactttcctatattatacttcatttggatttttttttaaaaaaaataactatacatgttgtagaccactaaaaagctaaaaaaaaataacacctgtgattttctccaggaggcacggattgtctgctaaggtgaactaaagttctactaatacatgtttgctttctggattttttttttggaattgctcgataagcttctatataatactgccttagctctagttccttgtaaaattctttattatctttgtgaaatgtcctttttttcaccaatttgaattctagaagaatttcaaatttagtgctagtcttatttatagacttatagtttgtgttcttcttcaatagggaaaggtccaaactcagggaggaaattatagcacgcagacaaaagaagctgcttatccgacatactcgtgaaaaatacttggaggagactagttcaagggaaatggagcttttgcaagaacttgacaggtttagagttgttgcctttgtcatttagcatgtcagaaacaatataaatgttcctatccctatttctttgttgtgttatctgtatagggaaagggctcatgagatggaacgtgaaatcgaaagacagcgacaactggatcttgagcgcgttaagtctagggaactgcaatttaacctcgatatggaaagagaaaaacaaactcaggtgccagaatagtttactcttatgcacatatttttagatgaacaagaatctttgtatttctctttgcactctgtgcttagtatatgactatgggcctgttcagattgtagcaaaaataaactttaccaaattttggcgatgccaatactttggcaatttggcaatattgccaagtttttgtaggatttcttatgtatttactagagcttggtaaaaaaaactaaatggatgcacatattttgcagctttaaaaaaaattggtatggtttgaaatggtatcaatctgaactaacccctatatgtatatgtgttcctatgttgtggtgggtgggttcacttcatattgatagcgcatgtttatttgatgtttcgccacatcctttgtggctagtaatttagggtgaagtatcgtaggttttgacgatactcaacattttgcatgaatttgatatttcttgccatgtcatatactgattgcttttgtagagagagcttcaacgagaattggatcaagttgagttggggcggtcatcaaggcgggagttttcagccaatactaacaggtgtgttatgctggtaggcggttgcctccctcattgtctcaccatactgcttctgatgaaacttcacttgacatgtttgttacccttgccatgtgtgtgatgtgatgggtgtttttgcagccggtctagggagagataccgtgaaagggataacggtaggggacagcaggaaggaaggagccgaggtggaggaggaggggtggaggccggtgggtctgcgacaagatcattttcaggcaaccttcccacaatactgcagcaacctcgagagcgtactacgagtgacgagcgtactagcacaggaggaaattattatgaggagaatgctgagggaagtggtgacgccagcagcgtcggagatccagaatcagcggcggctttggaagcttgcacgaggcatactctttctcggggcagcaagtagttgtcctcaacttcaacttcaacctcaaggcaggttgtagtagaacgcagggagcgtcgagaagggaaatgggagaggaagcattcttgagcaggttgtggtcaaattggctgccagtacgaacgaactgtatcgattatctcctggttgccctgtactgtacttttctctattatgtatgtgtacgcggagcggctaatgaaaatggctatttcgatcggtggcttcggtgttctttttcatcgctcgttttcttcacggatatttgtcgaaccgataaacggtgtcttttttttactagtaatatgcccgtgctaaacgctacggtgcaattctattgtctttagtaacttgaaatttcattttagcaaaaaaaaattatatgatctatgtcattaagctttagttcaatttatgtcgtacatcaaatatattccacacaaagttcaaaaatatgatattgcatgggcataataaatcttgaccagaattaactaaattaaattgacatccagttccacgccaactcacatcatttattttcataattttacatatgacaaaataataattatccaaagaaattattatggttaagcggttgacagatctaaataaattgaaacgcaatgacgactgcgtactgcccttacatttggaacttcttgatgaccggactgcattcatatcgacaggaagagtgtctttatttacgtgagtacatcatggtatgaagtacaagttaaaatattacatattattgtacactatactatgaatttggagctgatttaaaaataacttgtattaagcaaaatagaaaattagaaattaataggtctaccgtctatgcatgaaactgaatcatttgcccgtgctaacacaacgaaatcatttaataatgtaaagtaaacaataaaaagaatatatatgtttcaacaatcaaaaataaaatgagatatgattaatattaaagaaaagaatgatatcacgagttattacattattaattacatagccacatggctaaaaataacatcccaaattttccatctttcgaaaccatgcaaaagggcaaatccatatttctttctcacctatggtatagagacactggacagcttcgacaatcaacccaacactttttggttggtacccccgtgccaaaaaggtcatcatctctctggtgcttatgtcatgtgattttattgtgccctaaaggaaatgcaaaaggatctccaattagtcaaaatagaagaccaaatacatagagcccttagaggagaaaaatgttcctctatatcacaggacaaaatattatgtttaaactgcataatacaattgattctgtagatgttccttgatcatgcttttcgactcagctggacaaataacaaaatacaataaatagcttagaaactgtcatgccataagattctttcaagttattcatgagataaacatttcataagtatgatatggaagcaattccatacttgagtaaacaaaatataagaaatgatgactatagcaattttatcatgcaaagttatttgtttggagctcgtagagtaaattatttggaaggcagacatattaatcatggtagacatattaaacattcctagtttaaaacatattaatctccagcagaaaataacatacgcacttaatcgtggcaatgattttgattgctgagcaccagcatagtactgagtctgaaattaccattgattccaccatgttcaataacaggaatagaaaacacacagtaataaatttatcttgcaaggactacaacaaatagcttgcctgcacacgtccaccagaacaaaatgctatatatatgagtaccaacaatttgaattaatctaaccaaaacaagaaaaaagaagcatggtcaatgctcaccaaggatcgacatctaacttgctgcatgctgaaggatagaagcactgaagcagctcgtcgacccatgacaggctcgctgtgctggacattctgtaaatctcatctactggaggaagctctctagcagaagatgcaaattagatttacattataaatctccttggtggaagaaaaatcgttatacttatgaaacttcttcaagaaagtatattcatatggattgagctacgaacctcttatttatacatcaatgggtacatgtgcttctcaattttgtgcaaatgtacttaaaaaatggtcatggtcaggtccgcgactccttgccttgctataacaaattaaatcgaccaataagaatacctgctgttgacgtgctgcataatcccaaattcagtagtgcatatactgacaacaaactgcattacttttcctcagagattatactacgttgttatacccattaattgcatcagctatggttgtagtcaaaatcactgtgcaatcaatttgacaacggagaaaatcataacttgatgctgtaaccataagcagctctaatgataccaagattttaccatgaatcactaacgaagtgaagttgaggagtacaaaagtctataatattatgtttccacgaaaatacacagcatattcaaagagagatgtaaaaatgaatggcatccacagctactactcatagcaagttcagaaatttacgagataaatagcacagattgttcattccagttttgttgaggagctttatttattatactcatgcctctgataataacttttctttttacctcttattgcagaactcttggaaatcaatggattcagtaggatctgcacggcatataaagcgagatcagcaacacatcacttttagtttcaggagagttttacgcaatgcaactattgaaatcttcctatgcttcaggcctcttaattatttggtcacaaatgcaaaggtgtgaatgggctaaatgtcatctcttctgcaaattagaagaggccgaaaatgatcttatattgctaattgtgtcgtagtgacgacctgcgtggtaatactcttctatcatttaaaagggttatctaccatttttttgctattccatttatttacaagtagtactcctaaattttcaaaattattcctgcaagcattaatttactaatttgaaaagagtacaaatatttttcttgccctcacaattttatccgccgatgcaactggagagaaggtgacacagcttcagctccccgtccaccttgtcccttgtatgtaggagacaactaaacgaatcagtatagatatcacacatatatagaagtgaaaatcacaaagcagtttccaaaatagtatatccacagtgctcattgataacatatagaacacaacataggatgtgtggcaatgtgccatgtttcggaagacccatagaataattaaccatgatatagaacataatgaatctaaaccccggaaactgatcacagatgcatgacaatattaaaaatataaaggaccaaaataaatctgatggtctccacttcacctcttcaattcacaactcacaactacttatcattcatgcccgtaccttaatttctcagtagtataaactattcaagtacagttcactaattagaactcaaaacaaatgaatccgtcatgcaatattaacagtttggaatattgtgagggaaaaaagtatgagccaagaattgctattgttgcaaacctcagacgtttagcaaaaagcaaacataaccattgcacccatcctaatcattctctgtttcttccactgaaacagacagcctttatactggcataccttttgtgtcataatggaaattcagaaaagcaaaatccaattatagaagttatatcatgtagatagtgcaattaagcatttatttcatttataatggccatgatcaagggataattcatcagctgaacgaaattctccatttctgaaataaccacgggacaaggtttccaatactcaccttggagagagcagagagcaggatgagactgatggagagtggtggtgatggggaagatctaattttgatttggaataaatttagcacagtatcgacctaaatgaaatgaaaccaaatcagcgggagagcttaaaaaataaaatactgatggcatcctatattttggcaattcagctgaaccaacaacactatatactaattaattttaacatgaaactgaactcaatggcactgatggatgctatagtgcaacagaggaaaatatatcaaaaagattagattcatttttattttgaattttatgtctctttcagtcactttcgaacaaatttgtatcttcagacaaaaattaaacaggtactcacaattagagttcggttcttcagtagtttagctcgaaggtctgagaatcaccgtacttcaagaattagttgcagatcaaacactctgcactaatggtgagacagttagcatttttcctagcttgacaaaagatcaggcctgctatctctttctcacacgcgcagataataacttttttttatcacacacacggacaataatttattttctcacaggtactacttcagcttattcaggaaataatcagagaaacatatagagtgaaactgaattgatcaaacatcaatttcagtgataaaaatgcagatcatgccaaccattgcatcacatctgttggtaacatcgcactgaatggttatagggaggggtgaggaggagggtttctgtacctcctatcggtggcggatgggatttggttggcggcgccggcgcttgatgcgtaggaggtgacagcacgttggtggaggaggcagcggcatgaccggcttggcgacgacgagcccggcgactccggccaatggtgaactggtgacgcaaaggcgggcggccaggcggagatcggtggcagcgaagttgtgggtgttccggcggcgccgatcggtggcggatcggtgcgattggcgggagggtggcgcggattaaatcgtcgttggtgggcggaggcgcagcgggcggcgccccgggggggaggggggtgctgccgacagagggcggggaaacgggatcgcgggctcgcggcggttcctcggatgggagaggagggggcgtaaaggcgcgatctgtggaggctgatccgggagtggcgtgggggagagacgcgatcaggatgaggcagtggggagccgtcggatgccgctcatctgatcgttttccatcgttggatgtgtgatatgatgaatgatgaacgaataaaaccatttgttcaactatagggagaccactagggttcgcccccggtcgcccgcgcgtggacgacttcttcggtgttcccttatacaagaaggtctcggtcgtcttctttgcctgcaggcgtcggcgtcagcctcattgttcttcttcttcctcctcgggctcctccttcgcgtcaggcgcaatgggggcgcggtggagagcgatgggcggcggtgacgatggtgggcaccagcgcggcgttttttcgcggtagggagaggcgcgcggcacgatggtggtgcggactgcggaggaggagcgcgtcgattctgtgaaaaatccggcgcacgagtgcacgacggtgcgggggcgagagagcgcgaggaggaaatgcgtgggagatgcgggagaaagaggagggaagagcgagacacaggacggtggatgcggcgtgatttcgccatttcaggtgcggaaaggagaggagggggagaggtggggtaatctgaggcgttggattggatgattttagaccattggatatgtgatatgatgaatgatgaatgagtaaaaggatttgttgaactatagggagaccacaaacacatggtcatttgttcaactaaaaggatggtgatgaaagtagtgtgcacttaattattttagaactttttaataattaatacttaattattcatgtgctaatgatttatctcattttgcgtgttattgaaaagcttaactaagtcagtggtgatatggttttgagagtgttatgtttatcattttcaagtgatttcctaaaatcagagttattgtgatttgtgatcacaaagtttagctcgcttttagtttcattgcatatgtaagacttcaatatgtttgtaagatgtgaatttgtatatcaactttgttgtgtgtaccttggccggttctagacaagggttttaatgcacattagaattatggttcatgaatttctgtacgtgacaattgtactatgtggttttcttcgtaatcctctataaactgggttagggctattaccttacgaggggcttgaattagtataacctatggttgcgttcgggaggcacggaaaacggagcagcgattagcaggtgattaattaagtatttgcttttttttaaaaaaggattaatatgatttttttaagaaactttcgtatagaatttttttttttttgcaaacaacacaccgtttagcagtttgaaaagtgtgcgcgcggaaaatgagggagagaagttgggaatatgtgtttgatgtggtattgtgtggatcctcgaatcaacatgccctaataccttcagaatacggtctgtgggtattccccatcgacaactgttcatcgttttccctagttgaaggccagaaacaaaagagggggaagatgggcgcggtgctccgggttaacgacatcatgagttgttgtccggcaaaatccaccaccatccattcaatgaggtcttggtcaatgagcttggtgcagctagatgaggttggttttgttggatctagcctcttcctcctttctactgcttggatttggtcttatttggttcaccctgtagctcccgatctctcgcgcacagccaccgcagactacgcttacacgccaccgtttgcctctctgtctccgcctatgggaacaaccatcagtgaggatgctgccgcctcaaccagcccacttgtgttggcagccgggcacctcttccatctataaagtttgctgagaaattgaagttcccctccttttccaaggcgacacatacgaacgattcgtaggcggaccacggacgtgaacatgtgagaaccacaggcggacgcgaagacgaacacactcttgaattggatgtgtgcaacgcctaacggtgcaaaagcgaaagctacgacgagggcaagcaggggagtcagatgatgtaccaataaatcactcagtttattttgtatcgcccgatccaatggtgacttgaatgatggacgaagaggatggaagaagagggtgtgagtacataatcatctctaatttttataactagaaaggaagcccgcgcatatgcgcgggcatctaatttaatgtgcttgaaatattattctacacatgtgaatataatgtttgtatatgcgtgattgttccagattctattggcaacatgttttttttgtcaatattttgtttgtgaatattttgaatgctaattatcctcgcaacacataaattctaaactaaaattacttacaaacatgaaatctttaattattggaaagtattatgtcgcaaaaatgaagttggttcctatgaactgtcatctaaactatatgttatttttaatacatatcaaatctttgttttggagttctaaactttgagaaattcgtgttcttaagaatagttattgaactttaagccaaaaaaattcaaatgatttcttcaatttatattgggctttggattcaacaaaatttgtttaaatttagcccaaattttgtctgaattccagtcatcctttctgtttttttgggaatattggaggtctatgttctatcaattgttcttgaaatgcttttgatctcttaaaattgggatgtaaacataactatgttgagtgtacaacttggtatgggataaatgtgtcctttctaatgcagcgagaatatacatatatatatatatatatatatatatatatacacaccctaatctccagttgaatcaagagcagcatcaatattaagatagagatctcatccagcaaagtatataggatcgcacacatatgatcgtttactccagatagactgaactgaatagctccagtagcatcaaatttaaacagacagatgattcagtttataatgaataaactaacggaacctgtacataaactccacccatgcagcaagaatgatagccgatcagagcaagaagactttgtcagaaatcagaacatgcctaggaccaaattaaccaacgcagcaacgatggtgccaaaacgtatggaatcgccatctccttcctgacctaggcggtggcggcggcataacacagaggaaaacaaaaaaccaatctcctaatacaaggaacatggcatatataggtggtacaaaggcctagccagctgaacggactaaagcccaacatggactcctacataccgatccaaataacagaaaaaaaaccttattaatgtaaaaccctgattacttggtaatcctgccgctaagcatggaaggaaagcatccacatgcatgcgtacatgcggacgttgtgggagaggatttcgtttttttgtgggtcctcatctcctctcctcccaccacgtgccagcttgagagcgcttttaggatgccacatgtcagcttgagagcgattttagaaaggttaatggacttttagtatataatagaagataggtaaagaaaagataaagattaggaaaggagatgaaaattagattgaatacaaaaatttagggacggaatattcagtttttgttagcaataaataaataaataaattcctcaataagaagggggtttctcttttctttggcgcgtgcgttcctctcctcaggtggtgactcggtcaccccttgcctccttcggccaccctctcctcctctcctctcctctcctcttcctcttcctccctctcctcgtcgcccttccaccaaagcgagagatcgaccgactcctctccctccgccgccgacccccctaggtgagcgatccagcctagatcctttcctcctcctcgcgttgctcgatccccactccgttgttgtttcctacctgtactgtatcgcgcgcggttcttggggggaaaaaatcctttctgattaagatacagaattgttttaaaatatcaattaattcttttttttcaagtctctctcgctctcgctccggcgtgtgcggcgcgtgtaatgggggattggtcatactgtaatgggggattaattagttacaatgtgttttcttggtgcctgaaactctgaattctttaaacattattgtcattgtcctagtaaattatatatttcatcgaagatatatagtagattctaggacgaattcgatttggacatagcaattttctgatatctctagtaaattacaatttaattccgaaatgttgggtgatacaggtatttgtctttcaccttgagtcggccccaatttccaatcttgatcttgacttcagcatatgaatgttgcttgatctgtattcgacctatgcaggtgttgttgatcgctttgcgaaatggagctcccagttgctgatcctgggccggtgagggctgaaggattgcttctgcagtgtccctattgtgattcagaggcaatgcacaaactcgcgcagttcttgctccccggcttggctgcggtatgcattgactgcacgacaggcgatctcttcaggaagccgtcggttgtcgccgttgacatgaggaaggaaatggtggactatgtcacgcagagaagcgagacattcatatccgattcgcttatcgaatcagaagcaagtcaggatcaagagaacgagatgccggaggacccttttgagatcgtgtccatcttcatggatgattttagtagcacgaagaggaacattatcggccatgtctctgggtggttgatgagcgacagccgcgaagataagattgatgactttgtccaagaaatggagatgacccgcttctggccgctggaaaggagagaagttattgctgaggtcctcctcaagaatgtagacctgaaaaccaagtaccactgccctgagaaatatgaaaatgaagaacgtctcgctgatcataaggcccagtgtagcttcagacctgttacctgccccaatgatggatgccgagcgaaagtttctgttcgctgcatgcaagaccatgattcagcttgcctgtttaaaatccttacatgtgagcagaactgtgagaagcggcttctgaggcatgatatggataggcactgcgtgactgtgtgccccatgaggcccatgaaatgcccttttggctgtgattcctcctttcctgagcgtaatcttgagcagcactgttctgagtttcttcaggcacacctccataaactcctcaaggctattcataagaaaggttttacagatgaggggctcaaggaccatgctctactgctggaaaaggttaggctcctgatcttgttaatttacaatgtgtaacatatgtttttcaattaaaatggctgccttattttcttgatttggaaacattgctgtcaaactattgtgaaaaagaagacatacatggactgcaacaatatgatttactgaaataatctggttttgttctgcagcatgacaatgatggtaaactggctaaatctcgggatgtaagatctcttactaatgttgtaaagaatcttgaagccaaaataaaagatgattcgagttagagtggatggcgtctccagagcaaaatgcaagtttttttttgaggcagcaaaatgcagcatggatattgaatggtatagttgaagagttgtttccactcacagtatacacagaagagtacaagattctgcacgtttttcctttacaactataattttcccctcatgatttttcttttctcaaaatcggttagttttttatggtgtaaaagtataacattattttatccttgctattttgtccaaggaactctttttttttcatataaattgagaataatttatcaggaatgctaatttttgtttaatttatggaagggcgatgctcgaagtaagggatgtttttcccagtctgattccgttccctgtaccagctaaatacccactagctgaagttaaatgctattcctcacaatgttattatttgttttttggaaactttttttttcaatgatccagatcaaggttaggaacactagcatttatcggtaaactgttggaatggtttaaattcaaattttattttttgatttacacttagtaccgtttacatgccctcacatgtataatgcccattgataggatatctccacctcccacaagttgtgtcgttttcatttatcatggattcgtgtatgatgtttatttcaatgtataaattattacaagaatgtcaaacatttttttttcaactagtccctgatccgtaaccattattcaaattctttttttttctgggaaaaccgttattcaaattctaatattcgatttggatttatgtccagtaaattctactccctctgtttcatattataagttattttgaatcttttctagccaaatttatttaggtttgacagtttattaaaaaaaaatagttcggttaaatgtaacattgaatatgttttttttaaatgttgctatattcttttattatttgatcaaacttaaaaaagtttgactaggaaaaaaaatcaagcaacttaaagtcttttttatatgaggggaaaagagagaattgagaagatacgcaaaacaaggtgagcattagcgaataattaattgagtattaattattttaaattttaaaaaatagattaatatgatattttaaagcaatttttctatagattttttttataaaataaacatcatttagtagttcagaaaatatgcgcgtaaaatacgagggagtttttctgtttctacctaatcaatttctctcaatcagttttatgatatgaaacggagggagtagatcgctaattactggtcaggcttgggtgactggtactttttgcaaatactggtttcctaggttttatcctaacaaataatctggagatcttttacggtgtttgcattttaaaaagggtaaaagtctatcgctgcacaatgaaaggtaccacttaaatggttgatatagttacttactacctccgtcccacgaaaaatccaatcatagcatcccaagatagaattagtggaggatagaaatgactaaaatgcccttaatcattgaaaaaagtagtaagagtattaataggtaggtaaaaggtattaaagggagttttatctgtaaagagtaggtaggatggtaggatggtataggatggtagaagttggtttttttatgggacaaaattcaaactctagaagttgagttttttttttgacggagggagtaggtggtaaaagtaaaatgataattttcgtaggagatagagaatggcataattgttttcgatattagttctaggtacataggtgcatacaatacctcactaactgtgtgcccggtaatttacatgatatgttttttagatttacattttttcctgcaaatatggtcatgcagtaatcctctgttacattatttacgtgtttgttttagatttatatttacgtgatattttctagattttcattttgttctaggagcacgattggttaaaatatgaccgaatgtttgccaggttattttgatatttacattttatcacaaagaacatctaaccttggtaaaaagatcagtggttagtaggttcatgtgtaattcatcctcaatacgatatatttatattgtttccacgtgtttgcgtcatctccccgatgaaatttaactaaaatgtcttaagcaattaaatagcttatttccttacagttattttgtaatgtatcgggtaaaatggaaatcacatgcatgcttggatagcatgtattgttcggaagtgctaatgggtgatcgatcgcccggcgacaagggttgccatcgatcccccttccccctccctccctctctccacctggtttccttttttggcaccgtattactttcctattttagtaaatttatgcatctaaagtttatacatctcaagtttacacatctaaagtttatacacctcaagtttacacatctaaaatttagagaccaaaagtttataagtcaaaagtttatatatccgattcaaatttgaatttgaatttaaatattttttttatatatagtatttctatatatacatctaaagtttatagacctaaagtttataagtcaaaaagtttacatacccgattcaaatttgaatttgaattatatcgggattcaaatttgaatttgaattcaaatattttctatatatagtatttttatgcatctaaagtttatacacctaaagtttatagacccaaagtttataagtcaaaagtttacatacccgattcaaatttgaatttgaattatatccgttcaaatttgaatttgaattatatccttcaaatttgaatttgaattcaaatattttctatatatagtatttctgtacatctaaagtttgtacacctaaagtttatagacccaaagtttataagtcaaaagtttacatacccgattcaaatttgaatttaaattcaaatattagtttatagacccaaagtttataggtcaaaagtttacatacccgtttcaaatttgaatttgaatttgaatttgaattcaaatattagtttatagatccaaagtttataagtaaaaagtttacataccaatttcaaatttgaatttttatttaaatttgtatggtgtagtagtaagagaagaaggggaggtaaagtagtaggggcaggggcgagtgat

SEQ ID NO: 10139 - DNA, 14338 bp, Oryza sativa
tctttgacatcagcaaatgagaaggtcaagaggggcttacttgacaaggttcatgctttatatatgtctgatggcaacctatcattcgataaaccagttaagaagagttgctatatccgcagtgtaattttggacaatgaaaactgtaccacttttccaccagtcttgttgaagtttgaatttcttggatatcttgaaatccatggagttgattgcaagaaacttcctgaagcaatctccggctgttggaacttgcagtcacttcattttattcggtgcagcggatttgtgatgttacctgagtctgttggcaaacttaagaagctaagaactttagagctaaattatgttattgatcttgagagtttgccgcagtccattggtgattgtcaaggtcttcaatccttgcaactacatagctgtaacaaacttcaaggcatgccgacttcgataggcagaattgagaacctaagggtgcttcatattacgtcgtgtccatgtatgcaaaaactaccgtcagagccctgtggggagtccaacaacctggagataatcaacttatctaattgccacaacttccatggcctgccaagcacatttgcctgcaaagcattgcgtactcttaatctttacaataccaagattaccatgttacctcaatgggtaacttcaatcgatactctagaatgtctagaccttggatattgccacgagctcatggaatttcctaaaggtatagcaaacttgagaaggcttgcagttttgaacttagagggttgcagtaaactacgttgcatgccatcaggtttcagacaactgactcgtttaacaaagatgggtttgtttgttgttggatgtgatggtgataatgcaaggatctcagagcttgaaacccttgatatgataagtggtaagatgaaaattatcaaccttaaatatacgctggatccaactgatgcagataaggccagcttgaagaggaagaacaacataaagtatctggagttggactggtctcgaggtgaaactgaaaaggagttagtaacagatatggtcatggagcaagacctggctgtgctgaacgctcttgaaccaccatcccgaattgaggaaatattaatatattattatggaggtccctgtttgccatggtggatgaagaagcaaactgattcttcttgctgggaaagcacaatgttaaagcaaaccaatccatgtcagcttatttatctaactagaatgacactacatgaaattccaaacttgaagcatatgcaaggacttgttgagttgcctttgctgaattaccttgaactatttggattgcctaatttggaggacatgtggaccacgacaggaggtgcagaaatcaggggtgatgaattgcaggcaaaatactgtttccctgccctgtccaccttatggataaggggctgtccgagattgaatgtggtgccctacttcccatcatctttggagagactttttttaagagaaagcaatgatcagctgctatcttcaggcagcttctcccatctccttcctccacttgcccatgaatcttctccttgcagcaatgcgcactcagcggtgccccgactgaaggaactaactataattaaaatgacaggatcatcgtgtggttgggatttcctgcagtaccttgatgcactagagtacttcaatatttttggcagcaatgacctaacacaattacctgagagcatgcgaagcctcacctccctccacaagctaatcatccacgactgtcccacctttggcatgctgccagaatggcttggagaactgtgttctttacagtccctgtttatcaaggggaccccaatgatggacagtctccctcaatcgattggctgccttacgtccctcacgcacttgactattgcatgcgataatttgaaacagctgcctgagacgtttcaccacctcacctcccttcgagaactcgacttggcaggatgtggtgccctgactgcactgccagaaaacatcgggaaactctctgcacttgaagcactatatgtcggaccgtgctctgccattcaatgcctgcccgagtccataaaacaccttactaatctccggcgattgaacatttctggttgccctaatttggtcaagcgttgcgagcaagaagtgggggaagactggcagcttgtctctcatattcctaatttaataagtgactaaggctctgagggcagcatccgacccttggtacgttctggagtacctgtcactgatttgctacatcagcttgtgtttgctaatgttctaaggtccctgctttatttttatgtatgagtattgagtttacagtagtctcttatactggtactaaaagcacttgtatgcttcgtatttcaagtttcaacacagtcttgcctgcctctcttccctagagtgtggttctacttgttcctcccaatataacatgtcctctacaatcgcactcctgttttcttctcgtaatgatagatttcatgccgatgctaataaactacgcttcttgcgtacaggttttcagattggagaaagtgataagaaggattggactgtcgaagactgtctgctgagtacatttcttcttctgctggaccattcagaaaatgcttccgtgcttcttttgtactgtatgctgatcatcttagatctataccgtttaaagagtgtggagactacaactttactctggatctcgtcttttgtacttctgtatattggtcatcttactctgctagagtctggtctcactacacgcgtttggttagcatgtgacatgtttttgctacttactcttgtggtttctgtgaggagtcacatttgatcgatcaattactcttgagcttcctggaagcggtggtgatcaagcttcttttcctgactaagcgatatcctaaactgtacaagggaaggatatatatatttgtagtctgctttactgccatttcatgttttgctaaattgtcaattccttatcctcagattcatcgtaaaaaagtatgttttgaaatcatggaaaaaagtctaatcataaaagttggtgattgcatggccctttctttatgtatcattttaggatgcaggccgtggcaccttcgtaggtcactacagtagttcatttgaattcctaaaagcttatgaaaacattcagctagttcaagtgtgtgttcactcctataaacattgataaggacagaatgaaaaggttttactcctattaacattgagaagataactggacaaaatgcaatctgaaaaccgcatataagcaggcaagatgttctatgaagaatcctcatatcgtccttggccgattgaaccggaaacgaaaccatgccaattctatcacgcaaactcgggtagaaaatattaaatccattaaattcttcttgcttgacttgaatagattccttgaccaccttacacgggagcttggccccaacaaggccaaatagcaaactaaccaaatcttatctttaacttcttgtcttttaacttaaaacatatctatctcttatccatagcagcatatctcctaattaaataaaagcaaccagccattgcggccggtgctacagtaaccctgcagataattagcacaaagtacgcctagataaaattcattaatcccaaattgaacaggagaatattattcattaatcccaaattgaacaggagagcaagcatggtacgcatggcaatagaaagaagggtagaacggcggcgataatattggacaaagcaaaacattatgctacttactgtaaggactgaactttctgaagttctgaattaactaagagcaaacaccatatcaactcgtaacaggacaagaaggcaacagatcaaggaaactaaattggaggaatcgaaacaccagtgccaaattaagaagttttgcttgtattatatcatgtccgaacatgtaagattgggctgaatgccagttctaaacataactgaaacagaaaagatgctatttctttcgacactgtacagaagttaacccctatgttttttttctacaaggactagagggctacgaacttgtttcactgaaactgctggctttgtacacggagcacctactatcagctgaacaaatagaaccaaggtatagaattgttacatggctggatttaagatctggacagcacaatcagacatctggaatctatagcgacaaagcatatgcaaataacccatctatctaaactgatcttcatgcacaattgatttggttgagcaaactgttgcacatatcatgtatgtggaggcctcggcaacatagagttagccagttcttcattcaactttacaggaaggggtggcatctgcctcattatctcaggaacatcgcctatcctgctataaaattgaagaaattgttgttacataattgcagtttcacaggacaagtgatgaaacaacagcaactaacttaatcaataaataacatctgtatttcaagatcacatggaagaaagtgttcggttattaaaatgtagcagaaaagcattgatataacaaggaggggactaaaatgacattgcaacttattgatatagaatttaggccagttagaaacttagattccaaagtaaggggactacttggggtacaatctgaagtggagaagaaatgaatttactttagaagactcaggaatgagagaaaaaaaaaacataagagccagataaacaatcatgggaagacaaatctggtactcaaatcccgagttattcaagattgtacaaaaagcaaagtagagaatcttactccttcaggactgcaagtatattatccctagtttgacataaaagagggatgttctcctgcacctacaataaatgcaatcattattagaatattgacagcatagcaaatatcaggtgaatgtgacaggtatcagtcatacctttgtgaaacaaaacaatcatacaaatttcggaagaaaaatatttggaatacattcttttaatatagcatacattcaaatggctgctcctttccccaacgtacaagtatataaccatcatgaaatgggtactaataaagtaaaacacctacagttcaatggaaattgcattatgggtttcctggacccgtggttctattaccaagtgaaattcttctagaaccttgcaattattgatagaatgcttgtccatgcgtgatttacgggcaacttaagaaactaattgcaacactacatcttcagcgacaatgcataagaaactaattgcaacactatatcttcagcgacaatgcaatgtaaaccacagccaatgtagatcataatagccaaaatattattcatataatcttatcatgctggggctgagtgctgaaaaaataacagagaagatagaactagaagtacctgcatgtttgaaatattggtatagatctggttcaagatctgtgcattgtgctcaagaatttgaccagtttggcctccaattgctgcaatgacatggaaagcactgatcaaatataatatcttaattcaacgcttaaaatctcaacatagtgataattgttatattaatgaagatgcttctaaagttacagcatgcaacttcctattcctattatatttaaaagtaaatagtactctactactggatcacaaacaggataacatcatacagtataaatatttgcaagcatcatgttctactatttactctattttaaattttcatacatgctctggaaaacttcaggtttggacaaattacaaataagttcaataatatatattttacataataaagcagcatcaacaaggtcgaagagaaaaaaataaagaaggaacaaaggattaaatagccacatgcctggaaccataatatcaagaaaaaataaaagcaaacaaatgagacaagaaagtacaaaatatgagtgctagtactaacaaaacacttacttttgtatgacacatcatcatcatccatgggaagaactggaagagaatatggagcagcattaggtcgggccactaggtgagctggcccttttgatgaagaatcattggctctctcctacaggttagtaaaaaaatatacattttaatcatgcaagaaatttaaaaacaatgatgcttcttttaaaacatctattcatttttacatatttacatccaaacacctatgcatttttacatatgtgaaacactgactttgcatgtgccaccttctaggttgctaaaacacttaaaagctagtaatctgccttttaaaacttcactagaaagaaagaatgtcggttaccgctttcatgaaatcaatagcttgccaaatcaggaacaataatagtgataaaatagggaatcagtagacaagtgagccagatggtaaccttcttttctttgtttttcttagatgactcttccttccttttcttgttactctcctttttctgcaagagatgaaaaagttgatgagattatataacaatatttgttaggcagaagaactatagtgcatgtaatatgaaacatcagaatgtttgaaaacaaaattcactagacataactatctgttgatggcaatactggtcagtttgcatggttattacaagcctacaacttcagttaatttttataataaaaaacaactatgatgcatgacttggaaggattcatttctgaaagccgactgattttgaaacagatgatgtgattttggcattgatgtagtgtggatgtagatttaatcgtattcactagtgaagaagataaaagatgatgatcatgatcatgatcatgatataataataataagaacagtaatcatgatgaaagttgtaggtggtgctcaatatggtattagtaatggagatgctagaacctagcatctatgttagattcactatataaacctgatactccctccgtcccaaaatataataacttttagctctcaaggtttatcccaaaatataacaacttcttgaccaacattctcttctcaaccaatcacaaccctccaccattcaattttctcacctacctccacttctcaaccaatcacaaccttctcccatttaattctacctactttcttaatacctgtgtccaaccctaaaaatccttatattctgggacggagggagtaattgcacaaggaactagtaacaggccatccggaaaccattggctaagcatagcaaaaaacaaagtgaaattacttgattgatttaaacaattaagcaactaataaacataatgagaatgataaaataataatatgaggtactgaattatctcaaattggttgattggcatgggatgcttgataaacataaaagaacgatgtattatagaatttttgggtgggaaattcggatgcgctagatatattacttaataagacaagctgaagcagtgaaacataaacccatctgtcaattatcataaccacaactttcctgtatagaacgagctaaagcaaaataaagagcaaacaaatatagaagtacagcaggtgatcagaatccaacttacagccatccatctgcaacgcagggccacatctcgcactgtcttgtcaggcagattcatagcaatttttgcatagcgaactacagctgcatccgccgcatagctacaataggtgtagtcagaaagtaagattgattaacttaattgttgctacatataagtgcaggacattggaggatttgagctagcttaaatgaggacaaaacaaaaatagtacaattcaagaattcagattccgtacaacaattgtggtaatgatggggacattaaccaagtgcatgaggccactacatttattgccagaacaacaaagaacagatagtgttacatacacactacgaaccagaacaaggtggctgcacaatatcccacggtccgtcagtcccacccgaaacggatagactggtgttatgtgaaactaaatttaagtttaccctggtgtaaagtagaaatttatgcttaagtcagtgcattgtgaaacgtaagtcaatctaaacggtgcaagttctcaaaaaaaaacaaaaatctaacgagtgcaaactgtaatttactctattaaatacaagcctccaccactgcactgagtaataaaacgacaactgaaatcctactacaggccatttaagaattcatctagcaaggaaaccctaacaaacaacatgataaatgcatgcctacattttgcagaaaatgtgcgtgttccacaagtcatggtactaatttccatttgggcttccaaattaccaaccaaactccaacgccataaccgatggcagttatccgtttctatacaagcacttgagcattaccatttccttgtcctgttcgcaagtcatgcagcaactggcatgacctgagccctaacagtaacatcgccattgcaactacgacaaaaggaatttcatcctagatagattatatgacagcagctacaactgcgaaattatactcttatcataaaggacagaaaaccttctataaccacttgctcatgaatgacaacaaaaaaccttgcagatattgaatagaagatggggaaaaataacctagccaagcataactactccccataaggaagcatgcaaacattcctacccaaggataacttgctatcattcactagtaaaggaaacaagtaaatattccatcctagacgggaaagtggagaaactatagcaaacatgtagtaaaataattccattctagatgagcagtggtagattagaaaataatcactaaaaccaccatacccacgatccaagaactccccaagatcgatgccatctacaacgctcttccacctcctaaccagactatcaatcaaaagtagtagaaagaacggactattccagagaatcctccttctacgagttattagacgaagggaagagaaaccctagaaaactcacctggccagccctccttcgagcacggcctgctcctcgggcgtccaccggacggagagccccgggtcgtggcgcagcgccgccgcggtgctcgcgcccggcggctgggccagcgccggcgcgggggaagggttgcggtggtggggcccgcccagaagcacccccgtggggtcggcgttcgcccccatctcgccgcctgccaccgccgccgccaactcggcaaccccccctcaggccaggggacgacggtcccgcccaaacccgagggaatctcgcgaaggcgcgcagggattccgcggaatcagagctctgcgcggccgggcggcggcgtcggcggcggcgagggtttggattctccggtggcgcggccggcggcgagtcgggggacggggagcgaggaagggagaagggaaacgaatgaattttgggctttttattttgtggggggtagatggatggatggcctggattggaactcactgtgagtaactgccttcaatcatgaaaaaacggtaagttcctgccttcctgcttcagttgagtcttcctttcactttttttttttgctagggtaaatatgaattgaaggcttccacttttatttttccgcgtatattttttaagcgtatgtctccattatatgatatatacgcgttccggtttatatatagatcgagagttagaacacttgtactacttgcctcatctatagacgtgtgtctgattaggtaggttgatatatagacgcgtgtttgactaggtacgttggtacggagatgtgtgtccgactagatacacatgatacatgaccccacctcatcatggggtcgacgttcgcctccatctcgttgtctgatatcattgtcgtccctgggagacgacggtcctatcgagtcttacctaaatcactcagagaggcggacgaattctacttgtatgatagtcaaatcagagcttcacgcacccttggcggtggagacaatgagcgtttttagactatccgaaggtggacgatggcgaacgggggacaagaagtgagaaggaagcgtgagatgaatatgtgcttttttgggggtcttggggttagatggatggctagagctcactgcctccaatcatgcaaatgattatatgtgaatttctcgtttagtcgcatctccatttcgtttgggtaaaggggtaatgtgaatatgaaggtttacgtccgtgtttctgtatatattttatgtttccgttatacgttgcatcccactctaataggttaatatatagacgtgtgtttgactaggtaagtgttacatctaatatttgtctgattagatgcacatgaagtatgatatgcggcggcggcggcggatccggaaacggaggacttggtggccgcggatccagcgtgggggatctccggatctaccatggcatctccggtgataatgacgataacgatgggaggggcggagccagcaccagtccctctcccgtgcacatcccgcagcccctccacctacaacgacatgatggttgcaagcgactacgacgacgaggatggtgttggaggcttcgagcgacgatgacggcgacaaagaaggctgtcggtggcggctgtgagcttctactgttagggtttcttgttttttttcgattttctcttttcgcagtcgaacgaattaagcattggcatgcataaatccgatttttcgcatggttgccctagctgcatgcaaaaatccgattttcacatactttttcgtgcatgtggcaagagcaaccgcatgcaaaaatcagttttgaccgtatgccaaaatcgattttgtagcagtgataggatgtgttctaacttctaatctggagttaggttgggctatcgtttatcgtgaacatgtttcctaaactgaaaatgataagtttcgtgaaaaaaaacttataaaagattcttaaagaatcaataaatccattttctaattttataacaattattacgtaattaatgaatcgtgtgctagtggcttgtttagtttccgcggtactcccttctttttcatattatattgactttttttctagtagtttgactaaatttatagaaaaatatagcaatatttttaacacaaaacaaacatattaccaaaagatatagaatgttagatttaatgaaaccaaattggtgtcgcagatattgctaaattttaataaatttaattaaatttaaataagtttaactaatgaaagattaaatccttttataacatgaaacaaagggagtgctacataactaaatagaactgctatatcaaacttagtgctatatagtgttatatagttgccttatcagcgattagcggttacacagatgggtgaaaagagcttaatatgctgtcaatcatggaattgtttatttatttatttcggtaaggttctatcagtttcatttctcctttcctttttctttccgaggatagggaaattgtcatgtgaaactgcaattttagcttctattattattattattattattattattattattattatcttttgaccagatagtatatattattaattattggatggcgtgtgcatgtatatacatatgttgtgatcgtagagacatgtgtctatgtaggtatacgaggtgcaaaacgaaaaacgatgcataattaaggtgtataggcaagaagcgtacttgatgcatatctaattgtttgtgttatttagtgtgggtaaaatgcctaccgtacgtggttctccagcacaatccaaatgtttaaaattggtaagtgctctaaattggaatagaaaaggaaacggtgaactttatcatacgtttccaagtatttcaattaaacttggtgctattataacttataataaatcttgctagctccttgatgcgaaaaaactcaattttttaaagaatacactctctaaatatggtcatttcctattaaatctggatatatgggaagtgccaaacagcaaatagatgtatattttgaaaaaaaaatgtttcttcactcgaaggtatccatttggctatgtcctcatataactatgtacggatcaaaatatattctcataaaatctattggctattgcctcccacatggcgctaccatatttagtccgggtatttcaactcccggattcacggtcctagttgcatacccgggaataaaggggttgctaaccgggagtgtagatgtattctcccgcagtgtgatatgccccaaagacaattatagaaattataatactatatttatgtatttataataaagtgttccttaatatagataacttactattgatcaatgagtatgacttattcataatacttcttatgtatgttactatttctaaataatttctaactaaatgtcataaagtaaattgcacctaaccccacctattatatctaaattgcacaaaaccacaggggttttgtttggtacgtggcacataaccacatatattatagccataaagttctacaaaaccatactattgatgtttttgactttcatctagttctataatcatatttcaaatttatggttctttatccatcatataaataaagtgaatatatatcacatccatatgagtacagttttttcaaaatttgacacatgagtatgttaaattggttaacgatgtagttttgtgaaatttattactataatacatgtggttatgtgtgacgtgataaaatccttacgattttacgtaactggaccataataggtgaggtttttatgaaatttactgttgattgttcctcttattaaaataatctatgtaagtattatgtacagtattataacttgttttgtcagttagggcattttgagttatagttctgtaaatttgcactaattttttttattataatgaatggtcaaatgtcatgtccaaaagtcatcagtgccataaaatttaaaacaaaaggaatatatgtgtgtgcgtgtgtgttttagcattacaacacattttgggtcagatgatagaaagtaaacggtatggaaagtccatgatgaatactgttcggttttaaagtatacggatgatttttaaacgttcgtgaaaattcaggatgtaaagtagacttttcgcacatacaaactgttggcagttggtctggctgttttgcatttcagtattgccaatttgcagtcattttcggacctgttattatttgctatttctaaccttgtcaaatttttacaatagtgaaaattggccatgtcaatttaattttttttataaagatcaactagggttttgttttactactgatattttattataaaataaattaatcatcaatgtataatattgaaatccgtataaaaaaacttggacatttatatttttatattttaattggaggccaaatggtataaatgctaaaaaaaatgttaaccatgactttttttcacactctgtccaaagtttaattttaaggtttacagcctcagcatagcatgaccattaattgctctgatgagatttttctcaggtagcatagtaacaagctcggaataatacatcctcttgccaattccccgagtaatgtttcaacggcaatttccaaccacacttttttatcgccatatgtattagagtttttgccaacaaaaattagtacaggttcttatactttattaaatattttttctgccctggcgttgaactgtgatcacatgatcattgaaaagaccttcagccaaactatcatcaagttgctccctgtcctctggatcaaaatagttcaataatcaataccaattaccaaaggtgcatgcattgttgctggaaacaacatagaaaaaacagccaaacattttaatattgttctaaccaagatttgccggtgcgtatgcatgcatcaaactatatgaacatcagtagtccagatgaggtgcctaagcatccttttgttttcaaatcctctctcctaagtcaaaatgttcaaataatgctaaaaaggataaatagattagttatagtagtagtacacgaatgggttctggaagagattctccactcacttatttaatagagacttgtttgaccatcatgcatcaaccgggtgcctgtatatatgttgccatcgtgtttgttgacctggttagccaccaaaaaggcagacgcgtttaggaaacggtaaacagagatcgcacgttagtacactgatactagaacctgacataattttcataaatcaattatgaaaagatgaacaaaagtgtaaattctaaatgatttaaatttgtcaaaatttgcctgaaatgcatgggaaaagagatccatttcagctagtggcaagaagattcttctcttctttgctctgtcatcagcaaacttcaaagaactcatctacaaggattaattagtcatt

SEQ ID NO: 10140 - DNA, 1087 bp, Oryza sativa
tacccatgaattcagaaccccagagtccgcacatcctcaaatacaaagcacttccctagttagatgtaggttagacttcccgttcgagaaactctaccttctacctgccctcaatttatgcacgattaatgaatgccacctgggtggaagcgagaggtggaaatggaaggtcttagttcggaggtgggatctctacctgatagttgcattgccattcatgatgatcccctggcattcgtccattcagccattcaccattcacccattcaactggaattttggttgaatgccggaattgtgtccacaaattgtggatggatagttggttggctggctggatggctggctggatggctggctggatggatggtgaatggctggcggcggttcggttgctttgaagcatttgttgctatctaaattccatttaaggtcgtaccttatcgcccagcatcatcttattctctatttgtattccctccatctttcagatacggatgtagccttggatgtgcccgtgcccaatgaagaggaagagcgcaacatgaaacgtaagtacaaaagtaccggacacccacccagatcccaatagaatccgccaaatcctgcgggaaattgtaatcccattcaccagctcctacatttaattaacaagagaactattgtatttatctaacacctggattatctccacctttcatttgatccctatttatagattacgctgcgttgctaacgggccgcacctcctatttcctcaagggtgaggaaatgaagtccatgtacaccacctacaatccgcagaatgtggtggccaccgcccgtttcctgttccacaagaagaatctatactactccttctacacctcatcgcgaatcggtcgtccgcgtgccattcaattcgttgatgatgcgggtgtaatcctggaggagcatcaactggagaccaccttggcgggcactctcagtgtctatcagaatgccacgggcaagatctgcggtgtctggcgacgagttccacgtgattacaagcgcatcctgcgcgacgatcgtctccatgttgtcctcctctggggcaacaaacagc

SEQ ID NO: 10141 - DNA, 9190 bp, Oryza sativa
catctcgaagactgtgtcgagatccaaaaatgcttatattttgggatggagggagtattgtttaattttcttatatagtcatattgtatatataggtgatggactcaataaatatatttgggtcagatcttcatgggccaagcctaaaggtttttcaacacttttgtccggttgagtgatacttatcggcctcaataaatatattgtttcctagtgaagctactttctagaatttctctatagtggaggtgaattttcatcccacgaggggacatccccctcgttgtttgcatgtcatcttggcattcgccgccgccgccgctttctcttgccgacggagtggccatggacaggaggaaacagggtggcgtacatgatgcccatttgcgccatgatctgatcgcctcctggttttcaagcagcagacgactggatttatctcgaaaatgctttacaacggacgttcgatacgacgcaaaaaaatcggacataccaccgagtggaggcgtcaaccactcattcttctctctttctatcccctcaataccgtagcactgtatctcactcgtgtcttcccccttcttcgccggacgcacgcctcccctcctcctcctcctcctccacatccggccatcgccgcctcccatcatcctcctcctctagccgccgcacctcccccctccccctctccttcggccgacgccgccttccctcctcctcctcctccggacgccgcgccacccctcctcctactccggctgccactcctcttttcccattggcggcggcgctcccttcggctgggcgtggccggcgagcttccgtcctcttcgctggatggggtggcacgtgtagggcgacgagcttggggggcgtatctcgcggcgttggctctccccccaccggcgtcccctccctgcaaatcgaggcgcagggcgacgtgatcccctgcggcggcgcaaatcggctgcagccggcgcggggcctatctcgctctccagatccggccagacgcagagcggtggtggtggcagcgggggtgttcgctcgccgaagccatgccgcgcgaggacggcggccggagttgagggtggtggccggagttgaagacacgaaggtgggtttagttttgtgattcactttgttgtatttaaggtgttttattttgttttgattcgatattgcatatattgattttacatgttgcaatcgatatgttttgattgaatttggttgaaacactttcgtctatgcgatgaaacatttttctctggttgatgaaacatgtgaacatttttcaatgaaacattttgcaacaaccgtatgatgtttcagctttttatattttttgttgcactttattgtattaaggtgtttcattccattttgactttgatgtttgcatgaatttgatttcttggtgttacaatgcgccagtccatattgttgaatattgcatttagttgaaacaatcttcctcaaacgctgaaacatttttctctgggagtgaaacatctgaaacattttcattgaaacatttttttctgagggatgaaacatgtgaaacattcctcgataacatggtgcaacatcgtccggcgatttgcaccagatcggacatccgatccatagcagcctccggtttatctgctatctatctgcacatgtacaataaatagaagagaagagcttcaatcgcaatcggaatcggaatcgagtccgagccttacggcgtaccggagtgaggaagagaaaggggaagtggcggcttctatctctactgcggtcttaattgattgatgcatgggcctctgttccagcccatacacccgacctgctgagatacaaaggaataagctcatttgaagtacctggatgtggattttcttccctcgatgggacgtcccctcgttgtttgcatgtcatctaaatagttattaaaaaatttgaaaaaaattgatatatttcaaattaatctatgttaccaaattgtttttcatattttttttatgtctatttaggtgacatgcacgaaatgagaggatatcccatatattccctcgagtgatgatttcactttccggaagtaccttaacttctacagtgagaggaggaaaaagaacaaaatcgaacaaagctgcaaagtttgacagattaattaaagaatcatcattactgcgatgcgaccattagcgttgagtattacatctctctagccagcgtcgccgatcatcaccggcggtagcactggacgtgcaggaagaatcctccgggaggatggcccttgctggccatcacctcgtgtgctacaagtgctacagtaatctacatttactaatgacggattgattataatcttttgtgtatgtttttctattataaactcttctattataaaattttaatgtgtttctgtaaaaaaaaatccgtatttttttccatcgtcgtgtcggtttatttcccacacgacgcaaccgcgctcactcagccaatctacgcattcgcttacagatacacgcgcgcccagctgaccatctgccccttaggctcttggctgccgcagctggacaatggccatgcctcacctgagccaaatggtctaatgggtttttcttttttttattattctctgttttcacctactcactttgatatatcttggtataaataaactggatgagatattatacaatatgtatggtaaatcccataactttatcaagccatgcatttttcatgtgacgtttgtggtgtgtattttttttccactgaaccacttttagctactccctccgtctcaaaatataagcatttttagcatagtgccaagtcaaccatttttaattttgactattgaaaggaaaaaaataaaaaaatatcaataatgtaaaattgatgttactagatttataattaatcaaactattataatatgcaactctttttatttataacattttatttttatagatattattggtcaaaataacatctcaaagaccgtgtcgagatccaaaaaatgcttatattttgggatagatgggatggaaggagtattgtttaattttctttcactgattcacctattgcatatgtaatacttctttttaagaaaatagctggcacatatttttcttaattatttttcttttttgttttccttaatttttggtgcatcttacgtttgtcgtcggcacatcccctcttatcatcgtaatattttctctcttttctcgctctgtccataagtcttgtatcagttttcttccagagttcttgtggacaacacatgaaaagagatgtcctgtacataaaaattacaactatgcctataaaagcccaagcattatgggcaagaatatgtagtacattttgattttctatactcactgtgatgatgcaaaaattgatttccctttggacttaattttggaattcaggagagagtgccatgtccccgcaaaaaaaaaaagaaaggagagagtgccatggaaatggtgtccagtgttgctcaatgctgatagtgttctttcaacggcaaaatgtattgtgtctttttgccagaggtcgacgaaaaccatgaggccaggagattggtgagtgaggttgatgacgttggttgtgcgatggtcgaagtaggagagacctagcaatggtggcactgttgccccaaggttgaagtgggtggtggtccattgctaggtgtgggagttgtagaggtggagctcgtattcccctggtggcctaaacctgttgacagaaagcgcggtgacgatgtagcgttgtttgttgctgatgaggggttcgttaatgtcctgaggttcagggatgtagtgcaggatggagacctcgtggttagtgaaggtgatcatagggccgggatgggtgatgcgcgtgagagacggcgggatatcatcagcaatggaggccgcctatttattgtatgtgtagcagatagatagcagataaatccagtaggctgctagctacttgaaagccaggaggcgatcagatcatggcgcaaatgggcatcatgtacacctccctgtatcctcctgtccacggccgctccctcggcaagagaaagcggcggcggcggcggatgccaagatgggtactcctcgacaagctcgcctacttctctgacgccgacgtccgcaacgccaccaccgacctccaaaacaagggagggccatgaaatccaggtcaccttgtgcaccgccgcttgcccgccgctcgtctcctacgtgtgcgtccactctcccaccctcaaccctaaaaccaattacttcgccatggagccccagatcatcgccgcacacgatgacctcctcctcatccgcctcatcctcggcataggtaacaggttcaccgatccctcgccgactacttcgtcgaagtaacagagcttcaatcgcaatcggaatcggaatcgagtcggacggcgtccgaaaggggaagtggcgggcttctctctaccgcggccttaattgatgcatgggcctctattccagcccatacatccggcctgctaagatacaaaggaaataagttcatctcaagtcccttaacaaagttgcaaagtttgatactagattaattaaagaatcatcattactgcgatgcgaatgcgaccatcacacaccattgacatctctctaaccagcgccgccgatcatcaccggcggtagcattggacgtgcaggaagaatcctccgggaggatggcccttgctggccatcacctcgtccatccacaccctcccgccgtctccgtctccgtctccgtcgcgcgccttcaccatgaactgcgccccgccgccgccgccgccggcgaaccaccagtcgtgcacgtcccacatcacctccaccaccgcgccgtccccgagcaccgccgtcctgttcccccggaagttccacttcacccgccgcgcctccaccaccttcttcccgtcgatgctcaccgccacctccccgtcccgagtcccccactcctccccgcggcacaccaccgccacctcgtgctccgccccgtcagcccggaacctgcaccgcgtgctgtgcgccaccgccgccgccgccatcgccgccggggaagccggcgccgcgcggagctgctcccgccggcttagcaacgcgcgccgcggcgcagcggcgaagcggcgtgcgagctcccgcgccgcctcgcccccgcccaggaggaccgcgagctccccgtcggcgacgacggcgaggtagtagtcgcgcgtcggctccggggacgacgacccggcggcggggtacttggcgtccgtggtgtcccagtagatggccaccaccgtgccggcctcggtgacgaacgaccgggtcccgcgcttcttgtgcaggaactgcggcgagctcgccagcgcgacggccgaccggcgaggcgtcgctgctgaagctgaaccagcagcgggcgagggggacgaccgggaggcctcgtcgacggcgacggcgaggccagtagcaccgccgggcgcggcaccggcgacggtcctggtccacatgaccctgacgaggatctccttgcgcgaagacaaggcggccttgtagacggtcgccgtggccgcctgcagcgagcggtcgagcgcggcgcccgccccggccgcggcagctgaggccgcgaggctgacggcgccgtcgccgaagcaggagaagtctcgcattgctgccagctcgacggcgacagcgagctcaattcggagagatcgatggatggatggtcacaatgggaagggagtctgcagcagcatgtgcagcgcaagaatgttgatcctagtacttgctactagtaaagaagaagaagaagagaagaaaagagggcaaatttaatggcaaaggctcatcttttgggcggatttgtgtgacttggtgattttggatgtttctgccatgattatgcccatgcatcagcatcaccgtgtttcttctctttatttttacctttctttttcaggtgaagttgcaattgcaaatgcaaatgcaattgaagtcgatcggggtagaagagcagatacaaggtatggttggttgggggagaaggcatttaaggtgagcatgtgtgtgcaatttgaccagataaccactactaccatccgacccgctgttgctagtcatctgcgtcgtggcagccaggaacctctttttcttccttgcaaaaaaaaaaacaaaaaacaaaaggatggctttccacttgattaatcaagataattgtttgcatcaaaacgtttattaagttttgcaataaacagaagaacaagtacaacaagggaaactcgactgtcatgtcatgatgattatcttaggatcaaatggccacgatcgatcgtgtgaatggaccacgcaatgcaaggaatggaacagattgaactggagcaagtactcctgctatctgaaaactgaaggggcatccatccatccatcatgggcatcacgaagtgagccaggtgtcgatgggtacagttgcaggtcacaggtgtaggcaggctgatggatgctgcattcggacacgcatgtcgcatgcaagagccgacctgttcctaattaacctgtacattcttatcatggatgttacatcatactcttatcatggttgagtatatgcttgcttgcctgatcaattcttatcatggatgtttcatcatacattttatccatgtatgtaagatcacactactctttgtaaatggatgtagtagtagtagtatttggttgaccgggtctgaccgggatgaaaatggaaattgaccgaagagagaagtaattactggtcgagggaggagagagtcaagcacgaagcagacgtcgatatggtcattagtgatcgtcgacgacgatgatcctttagtccactgcagttttaattgttttggcctaacacaaataaatggtgataggagagtccaggtctgacgtgttcatgcacgcgatacaatgccggtggtattgcagccccgtagactacttcacacttggacatactcgtgcctactcctacacaaacatggtcgtcattgcagtgccgcggttatctcctcgtcgtcgtcctccattaatatttaatcatagtaatcagtgacgtgaataaagtataagtgatgtgatcaatagtccagagaaatatacagtatttgtcaagaaaaaagaggaccaagagtaaagtattaagctaaattaagcataactaagtatgtaatgtgttgtttttacgaatttttgggtggggaacccctatgtctactagtgatagtaactaacttttaaatttaaagaagtgcttgtttaaatttgtagtttaaaattattatatttcgtgactggtggtggagtataaagcagcatatgcatgcgttctgatgcaaagttgagtcctcccttgaaagactgaatgaagccaatggcatttacttggactgaagaagcatcagagcacccgcaatggtaaagtaaggtgctctctataaaacatgtacatctcagcaatagactcgattaatagtaaaccaccttaatagtatgtctacattggtatctatagctctctcatacattgcctcgtttttctctatagactatctctaaattagtagatagctttgctctctctcttcatttaatacctttcaagtagaaaaatatactgacatagatctcttgtagagagcctatagataaccattgtgggtgccctcagagatttcagtactaactctacagtagtacagtggagtcaatgaatggtcatctccgttcccttggaagtgatcaatcaattcaattattcgatgcagatatataaatgtttacatagagtcatagacgtagagacacgggatggactatgacactgttacgctgtaatgctaaacaatctctatctttgacactgatgaccattattgaacaattattatggatcgagtactagcttaattacctgacagttaattagctaggggaagaggagtatacactacagttagaatggaatggaagttaattaggagtagtagcttgatcatttgggcaacataattaacttgatggcaacggttggctcgattcgtaatactcaagttgcgacggccggaaacgtggaatagtggaaagagatggtagcaaagcagccatggcggcggtggcggtagcgcgcatctgatcttatcaagatgcaaacaaagagcagtgcccgcgaaacagcttgcatatatctctcccaaaaacatcagatatatcagaatcagcagctgccgctgcatgccggcttccaaaacacctgctacaattcttcatacctcttcttcatctctccaccaaaacccttttttaccctacacagttccgaagtgcctcagtcagaaaatgaaaggaattagtttttttttctatggaccaaaggaactagcttcttttaagcatagttacgttcttatttttttctagttgattgtccatgcttttcacttgtactagtactccaatactacttactccgttttatattataagactttttaatattgtttatattcatatatatgttaatgaatttagacatctataaagtcttataattttaaacggagggagtactgtacattcatgaaggttcttgtgttaattactggctggcttgcatctgcacgctcgtatgataagatcgagtaacctgatcgatctttgacagcatacaagaacgtttagttatgtgatgtcggtgtccgtgtggtgccagatgtgaatcggtgaacagattagggagaggaattacaaaactacagtgattcttccaaaaataaaaattaggaaaaaaaatctactagtactactggactgcaataccattaattaggtgtctatctccttcgtctaactagtccatgagtttgttctagctcctccgcacggcaacaagccagtagcagctcagctggcctctagcagccccatcgcttggctgataacggaaaattgcgaaatgagatatttacaaataaaaaataatccatgaatgaactattatatactgttcgtaatgatctaaaagaaaaaaactaaaaaataagctacgatgaactaaaatcaactctaaatatatatttcttttaaaaaaaaaataaattttggctaataagtataagtataaatgaaaagataagcatatggaaatt

SEQ ID NO: 10142 - DNA, 1986 bp, Oryza sativa
tcctgcagccccgtagccgatgatgatggcgtcgatggtgcgggtgccctcgatccagccggggagagggtccctgtggacgctggtgatgatgctggggcgggcgatcaccacggggatcccgtggcggcggccgcgccggcgaccagctgctcctgaagcatcatctcccccatggccttggtgaacacgtaggtgttgggccacccgaagtggcgcgccctggctaaacccagatccttcatcgccttcctctccgccttggcgtcgccggcgtcctccagctgctgcctctgctcgcccaccagccgcagctccgtctcgatgtccaggtacgtcccctcccgcagcgtctccccctccctcaacgccctctcctgcaccaccccggacctctcgccacacacgtacgctgcaatttcatatatttttctcactagcttagcttaacttgcatgttaatttgtcgagtgtccgttctaatctcatcgatctcagcttacctgtggagacatggaggaacacctcgagattggcacacttcttggcaagctggcacaggtacttcacccccatcacgttcacatccagagccacgtcgtacctgaacatcacatatatatggattgatcgatcgatcgaccattcatgttcatgtctgaataattttcagatcaaacaacgaccgacctttcgtagaagttggtggtggcagctccattgacgatgatgttaaggtccttggcgagctcttgcaaggtggattcctcgaggcccaggttctgatgcatcatgtctgcagccaatggaactaccttttcatcgatgaaagactgaaaccccttgccatgctgctccttcagaagcccaaacagctccttccctatcacctgcaaccagtactccatcactatgcatatgcatgcctgtagtatacttataactacactagttttcttcagctaattatattactcttcaggcatatatatgattaattacacacacaagcaagaaagcaatcaaattaattagagaggcaaagcaattaagaggatatcacttgatgctctcatatgggccaagctgcctgcagaggtttaataacgatggaggcatgcatgtctcttggatttctcataggattcatttggtacaagtatcaaacatgcatcctcctaaggacacaaaatgaatatgacactactctggacaaaactactacaagtaaaaacctgcagtaatataatgcaattttacagcatttcactggaggacctaccgagtaaacatactgccctggccttctttttggggggtggggttggggggtctaaaatttgtagtacaaatgtactgaaaagaataataatgaatttatatttctgtccatcacattcagaaaagagtcctgctgctacggcggcaccatgttttcttctgaccacaatatagccttttggttctgtattacctgtaggctacagtagactgaattaactgcatgcatgatttcagccacaaatactacacccttcgttcgggaaaaaaaaaactactactacattgggcaggtgttccaattactatccagtaaattgtagtggaagttcagaacacagcaaattagacacatgtatcagcaaattaggctcaatttttttcttctagtcaacaattaataattcggtaatactaccatagatcaatcctttagttaacaacgtctacataacacttgattatacttcaagtacgtactccacttaaatttttagacttatatagcttgctcttattaatcttgtagcaagctccggtgagcatatgcactggtacatgtctgaaccgtgtttcccagccagaattacagatgcctgcatctgctccacattgaatttgggtctgcactgcacatcgcaagaggaggccggaggaggcaggcaattactcctgaccaaacctacgtcacacaataactactca

SEQ ID NO: 10143 - DNA, 1808 bp, Oryza sativa
attcctgcagccccgctgaaattagtaaacatttcataaccgatcactgccgttagagagctttacgaccggaataacttcttgcccaaaagctttttcatattgttatgttttatcatcgggatataattatgttccaagtggcattacgatggttcttttctacctatagacaacttttttttttcatttgcattggcaaaatcctattaaagttagcaaataatactcactctgtttcatattagtataggatgttttgaatctttttctagttaaactttttaaagtataagtttgaccaactttacagaaaagcataagaacattttcaacgcaaattaaatgtaatatcaaaatacatatatttaatattaaagtttgccttatagaaaaaaaagataaaaacatcttataatatggataaaacggaggtggtacatatgatcccaaaaatgatggaaccaaacaatcatatgagacacacaggtccatcacatgagacacaatggcaaagcctgttccaacctgcggagccgtacacgtgtaccacaggccgtggaatcaaccatcctgaaaaagaagagaaaggaaaaaggaaagcgagagggaataatgtaagaaaaaaaagaaaaaaaaagctttggaatgaggaggaggagtggcgtgatccgctccaccaccggcgtcgcctcgccgtggcctcttcctcttcctcttcctccgcgtataaatagattcccctcttggggccttgcctttcgctgtcagcctcagccaaactcttctcttctcttctgcctacttcccacgccacccccaccctcgccgccgattccgattccgattgcgctcgcccatggcggccgccgctctccgcgaccagctcaccgctctcctctcctccatgttctcccaggtgaccacctaccttctccctctcctctcctctcctcttcgccagacctactgcttacggttgcttgcttccaattctagctctaattaatcggtgctctcgtcgcgatctagggtttggtggacgagcagttccagcagctgcagatgctgcaggacgaggggggcaccccgggcttcgtctccgaggtcgtcaccctcttctgcgacgacgccgacaggatcatcaacgagatcgccaccctgctgtgcgtgcccccccccctgttctttcttgcctaattcgatttctccctcgtgctgccgtgctgttaccatgggattgagtttttcccccctccagcttccacccatgtgtttgatcggtttgattttttttttttaacatttgtgcagggagcaacccgtcgtcaacttcgataaggtcgacgcctacgttcatcagctcaaaggcagcagcgccaggtgatcatccccttctacttctactctacatttggtttctttctgtacaccatttgtctgatgatgcatatcttgcctgcctgtggtttgtgtatcaaatgttcaattgacatgaagttcctgcggtgcccttttttcatgtgtaaagtagcagcataacaaaccttttgtttcgcaaacaattgtggtacaaaaccgtcttattgtttgcaaccatcatactggtagggataagtggtatcccactgctcgagccaactgttgttaagcgaacaatggtatgcgtgatagataatggctctattggtctatggctatggcatttcaactaaaattatttttgctaatcatggcaaatgatttcaatttttcattttctggtgtcttttcatatatattacaaaaaacaatagggctgcaggaat

SEQ ID NO: 10144 - DNA, 3518 bp, Oryza sativa
taagaagcatgattaatctaaagcgagaaagggacgtgaaaagttcaaatagccgaacataattattcaagcttttatagaactacaaaattgttgattaatatcgatataggtacgccgtacactacccaaacttggtgcagctgtgataaacatcatttagatacactgaattctaacttgtgtgttagctgcctacctactcacccacactttctttactagtatttttccttttctgtcccaactcaccagcaccagctaaatctttaggcaatgggtatgcagactagagcagaaggttagtatgttaggctattggaacattcaacaacacacacttcagaactcagtattatggaccaagcagttaataaaggagaaaacatgcacgcgctccataagatgcatatccatcttaccagtagccagatacaagtagcttccccccgacaagtttgggaggtttaccccaaataagagctttagggttcttcttgaagatatgtttttgtttgttggctcctctgaacacaagatagctgtgggcccaatggaataaaccattgttaaagagattagaatgcaataaacaggccatatattatataatcgaaagcaggttctggtaacataggaagagtacccaataacgaaaatgaagcagttaactacagcagccaaaagggacagctccactttgtttctcaaaagccaccatccctggtcatcaccgttaaaaaaataatatcttgaatgtcaaccacctgacttactaacaaaagaggcatccatacttttagttgacttgaaaacgtgataaagcttggaattaattgaatatatagccatatgatgcatgaatggtaattctgactgaaacagtgacatgggtcaaacttagcaattgcagaactaaaaatatatggatacacacctgaatggtgaaggtaaatggaatgaacactagatcaccaaagaccagcatgaaacccagcctttccgcaataatgtcccatctggaaataataaaaaaaaataagctgtacagaaaaacaatgaggtatgaactccgtccttgctgatcgtcacatgcatttcagatgatcattcaggcacactggattgatattaacatatctttatattataggacaaaatgatatacttacgttgaagtcatgaattcttcatgaacgaagtaatctacaatataccactgcatgaagaaacataactagtatcatgaactatggagtatatgatgatcaaaagaagaaatgtccatgtccaataccgcacaaaagaattggtagagaatgactgaaagattggctgaaccagctaggtagctctttgcaaacaaagataggttgataaataaccatgccatcatcccagctctcacaaaaaagaacctgcaaacatggtgaatatttttttgaaaaaaaatcatcataacacgatcccactggagaaattaactcttttcccgaaaagagtgagtcctccaattattttatcatttgaaagacaaataataggaacaacttgagaaaagggaaaatagctggttatggatatctactttatacatcacactgacaaggattcatagtaactcaccacaaattcgccctaacaaaactcaccacagattagttacgtgactttagtagatgatgaattaaaaaagaaaagaaaatgttatgcagcgcatctaaattcatgtacaattataatttgcttttgtccacccagaaataaaaagcctacatgtcttactattctaaatcaggtgggacgaaacaaatagctgtgacagggtaaactcaagtttcagcagaccctaacattcctgaagagcttatgcgctcaacaacactacttcctcttttagaactagtcaactgcacaataaacaagtgttccatttgaaccacattggcattgtgcatagactgtatgcatcaaataattcgatgagaacattacaaaactaatcaatctgttggggcataaaaatcaataggaaatggaataaatacttgcaccagaagcaacaagccaatagcacaattctcacaataatcatgctgctatttaaatatttgaacgacatatccaaaatggagcaagaaaacaaagacgttgctgacatacttgaggtcaactcccatgaaatgaggattgagctgcactcccaaccacctagtagacaaagtgatcaatgtaaaaattatcagtattaacttatatgattaatacagaggatagtttcctgaacttttgaagatgactaattgaaatgagatacataagcttctaattggtaaattttagaagttgaaatggcaagaactgatgaaatatctcgagtgcaaaagggatgctagacgttaattttcactcattatggtttttatacaaatatagagtttcttagaagtaccaatcttgtatgaagttcccagtgatatgcggtttcaaggaagaacttttatgatgggaccttaatcctgaataatacagtaagaaggtaacctgaaatacaaaagcacgaaatgagtcgatgaaaagaacttaaatgttttttgaccatatgttagtgaacactaaacgccaacagtttaatggtgctgacaaaatttggttgacagcaaaactagtaggaagatttcactatgtgtatcatctttttttgttatttcttacaaattctagacatatccagtgtgactaattcctttgctaaattttagctgtaccaaatgatagaggtagtaactggggctaaaacatcaaacatgtcgatggccgtttatttcttctgaattagttatgttcagttggtacttaaacttagattattcagatttgcacctaattttaagtctgtaacttcattaacaaacagtacatatgaaaggagggaggtcagatgagtgatgccacctacaataacactaaaaatgaaggttgtagacaacagctcgattccacggtcagcaatgacctgcaatcataagcaaacgagatgttgatcaattcaaggaagggagcaactgaaagcttggtacatgaggcagagggagggagggagtaagcaagctcaccctaagggacatccataccatgtagacaccgagcgcggagagcaccatcaagaggaggatcgagagcaaacctgctcgggtcacgcacgcacgcatgaggtggctaaaaagcactgcatcaaaaaagcgtagagtatcagggctagtgctgcggcggcggatccgttagcagatgtatgtggaggcgggacgagtccggtaggacagttccagagacgagcttgccggggaggacagcgccggcggcggcgaggtagcctaggtaggagaagagcaccaacacctgcagagaatggagccaaaaaaaattccaatccaggagcttccgatggatgtatggatgcaggacgaggaaggaggacgcaccgcgctccacgagggcaccagcgaggcggcgactgc

SEQ ID NO: 10145 - DNA, 1069 bp, Oryza sativa
cttgtgctattatatatagagagagtacgagtaggtgtagatggaaaagaaaataaaaggatccaaagtaggtacgtatacacgactttgaatgatcgatacgatgatattttaagtgtgacaatagaagctctctcaggtcgtttcctcctagcatatgattcgatcaagtggttctgttggatggaattgtcaacagtgcttattagcagcagatatactcctagtcctagttaacagtgagtgaagtacagttggagttgatccccatttcgtccatagaagctctcctaaaagagacaacaagagcgagtgagcgagcgaaatacccactgccattcattctaccaaaccaaatcaaattctcgcttcttcttggacgccgggaacaccaaaccaacgaacaaacggcgaatccaagtttcgattcgattcggttcggttccaactccaatccgcggcgccggcggcaacaatggcggcgctccacgcactccagcgatctcagtggagaatgaggactgaggagtagtgatctcgaatcgtgcagagcagggctccgcctccagggcagaggcatgtctctcgcctgcgggctcccgctgctggaatgcgtctactgcctgggatgcgcgcggtgggcgtggaagcggtgccttcactccggcgaccgcgacagcgccacctggggcctcgccttcgccgatgacttcgcccccgtcccgcgcctttgacgcctcatcatggccaactacgaccaccacccctgccaccccctcgacgcccgctgcgtcgtccgccgccgcacctacgccgacacccgcggccgcgtcaccccctaccttctttaccttgaccaccccaacttcgacatcgtcttcgccctccgcggcctcaacctcgccagggagaccgactacgcccttctcctcgacaaccgcctcggcaagcgccgcttccatggcggctacgtccacaacggcctcctccgcgccgccgcttgggttctcgacgccgagtgcgacctcctccgggacctcctcgccgaccaccccgactacaccctcac

SEQ ID NO: 10146 - DNA, 7516 bp, Oryza sativa
cccagagagcaagaattgaagcaaccgcatgtatcccttcccaccacatccttgatcaaggaacggaagcactcaaatctttgctcctacgcatgcacccatcaattcatatactctattgatccaatgctgtgttgatttgcccgatgcttaatcgatcagagacaatgaagcaacacgcgggctagctagtattagatcgacaaggaggaaaatgaacaagtgcaggtctagcagtagcagtagcaatagcagggccttgtatgctctcctcctcacttctcttatactaacagtaataatattgtacctcccgcctccacctgatcctctttcccaatcccaattcgaattcgaccaactaaagcttgacgatcatccgccgccaccgcagctgcaccgccgcaggacgaagcggtgcgccgagcacctcaggtgggcggcctccctcgcctctcaacacaatgccaccctcctgctcaccgtcgatcgcaaccaggccgccggctgcgccaacttcaccaccatccagaaggcggtggacgcggtgcccgactacgccgccacacgcacgctcatcgccgtggacgccggcatctacagggagaaggtggtggtgtggtccaacaagacggccctcacgctgcacggccgcggcaacctcaacaccaccgtcgcctggaacgccacctccaactccaccggcggcagcaccgtgtacagcgccaccttcaccgtcctcgcccccgccttcgtcgcctacaacatcaccttccagaacacgtcgcccccgcccgagcccggggacgcaggggggcaggcggtggctctgagggtggccggcgacgaggcggcgttccactggtgcggggtgtacagcgcgcaggacacgctgctggacgagtccgggcggcacctgttccgcggctgctacatcaagggctccatcgacttcatcttgggcaacgcacgatccctctacgtgggttgcaccataagctccgtgcccatggcgagcgctacgggaaataaagcaagtgacggggagcgtgacggcacaggggagggcgtcgtcgccggagagaacggggttcgcgttcgtgcggtacagcgtggtgggaacgggacaggtgtggctggggagggcgtggggcccgtacgcgacggtggtgttcgcgaaaacgtacctcgtcaacgtggtgtcggcggaggggtggaacgactggggcgaccccggcaggcggcagcaggtgtggttcgcggagtacgcgtgctggggccccggatccgccaccgccgccaccggcagggtgtcctacgcgcggcagcttgaccagcgccaggccgcgcccttcatggacgtctcctacatcgacgccaaccagtgggcgctgccaccgtcgacgccggaactctacggatcgagatatactcccagctagctaggatcacacacacacacacacacgagttttaatttaatttgatattgatttgtaagacaaggatgataaaaacacaagactcaattacaataatctgactcccctgcaagtgcaattcgaatatcatataaattattaatagtcgtcatcgccgtagtcgtcgtagccaccaccgccgccgccgtagcggtcctcctccacccgctccgccacgcgatcctcaaacttgttctccaggtagctggcgccgcccgccagcgccagaccgccaagaacgccggccgccgcgccaaccgccagcccaccccccatgcccatcttgctcttcttctttgcatccacaggaggcgctccatagctgacagcggcaggttgaggtggcgcggcggagccataggcaggttgagtaggagccgctcctccataggccgacgggtatccagcaggaggggccgcggagtacggagccggaggggccccgccataggcatagccatagccaccagttgtagtgttaccgtaggcgtaggggtcacgggacgactgctggtggtagggagcagggtacgccggcgaggggtcgtagtagcgcttgggctcgcggacggcgacgcggacttcgaggcgtccatgggggcggccggaggggcgcttgaggcggagggagcgggaggctcgggcgcctatgccggtgtcggcgaggacgtctcggagcgggaggcgctcggagcctacgaggggcttgaccccgtcggtggcgttggcgtggacgacgtcgaggtagaggacggcgtcgtctaggcgggtgtagggcgggagagggacggtgagcttgtcatcccaggtggggttgtcggcgttgtcgaggtcgacgcgggtggagcacttggcgccgtcgtcgatccacacgacggcgtagggcttgaggtcgccgttgcgccagttgacgttcttgaggtcgcgcgccgaggccaccgtcacctccacctcgtagcgcgacgctgccatggctagtgcttttgctttgtgtaataatgcttgtgctccccttgctttttaatggtaaggcaagtcaggagggcaggtcagcgaggcgcgtgggtgggtgatggcctgatggggaagaaccgaacaagaggtggtgactggacgcgatttggctggtggaggagctgccatgtttgaccgactgcagcgtgggcctgcttccacttgtcaatgcttgctcacctcaaccttcgctcttcgctccttccttcctcccttctttccttgggtcatccatcaatcatccctactaaatccaattaaatatttttttgttagtttaattgcattttggactatatacataatattaccaaatggcagttttcttgcattgtttgtttccaacagcttagcccttaaggaacgacaacacccccactcattcatcgccggtttggtgagggcgtcagtttcttttttttttaacgaaaaaataaattaaggctcaaatttgactttaccttgttgaaactgtgttttttttcccactcatgttaaccgggactatgtttttttacccggaaatgctagagaccggtataccgttggtagtgatcggaacgggatcatccccattgcactatccgtacgacacacacgcgcatgcttgactagtattcgctttatcacgatcacaagacgacgttgcttactcaatgctggccccgcccatgccacgcctacacgttgcaccctttcgaatcccgatggcatcatcttgtggtttgtgtgtagtactagtacgattgttatgttgcatggcatggtaaactaggcaatgacatgttgactaagccatgcttggcaatcttttttttcttttttccttttaatcttttttagttaaatttgcttgattgcttcatttagtgtaactttgaaaatttactctgaaatatttttcatcacttatacctacaagtattatccatcattgataccttgtaagtatcatcacgatacctatcaggtatcatttgtgtacatgaaaataaatcgtcgatacactactaccctataagtatcatcccggataagtacaagtatcatcactcactgatatctcctagatatcatcacgatacatgcaaggtatcatttgggtacctatcataaacgggaatgccaggggacgggataccatcccccaacgggatagctcctcttccaacgcaattcctgctcactcgctgccgttgccgttccgcgtcgccatcgccgccacgcccatcccacaccgccgccgttgctgtaccctgccaccaccgcgcccatcccccgtcgacaccgccaccgccaccgcgcccatcccccaccgccgccgttgctgtcccccgccgtcgccgcgcctgtcccccgccgccgccgccgccgccgtctccgtcctcgtctgcaagggacggctgcaggggaccgactgcgcgtgtcgagatgctccttccccaacgggatgcccagctatatctagtaggaatcacctgatacctggtaggtatcatccaatacctcgcaagtatcacgcgatatatggtagaaatcgtctgatacttgacaagtatcacatgatacctcgcgagtatcacgctatacgtggtagaaatcatctgatacatgacaggtatcacatgatacctcgtgagtatcacgcgatacgtgattgaaatcgtctgatacctgacaggtttcacatgatatctcgcgagtatcacgcaatatgtggtagaaatcgcatgatacctgataagtatcacatgatacttgcaagtatcacctgaaacgtgtgtagaatcgtctgatacctactcaggatcatcctgttgtgtagaatcgtctgatacctgataggtatcacacctgatacctactcgggatcatcctgttcgaaaacgggattccgttatatagcagcccccttttttacctcaggttaaccgggacgatggaaattgctttatcagatttttctttttgtgcatctcttcaagaaagtaggtaggttttgttatgtaagttttttttattgtacagaagatgcacactcactatgtctggattcaaacgtaggattaggttttttgggacagagggagtacatcacattacactcacacactttttttattacatggtagacgcacacgcgaaacaaactccaccacactcgtaaatacgttccctatcaggtacataatattcgtgggtggatttaaaccctggtggatgaagtcatacatccacgtctccaccctcacgccacttgtgctttcccatcataagttttacaccatcaattacgaggcgattactttttattttgtttcaattttcagttatgtctaaattgtttgaagtaacataaacatcttactaagggtgtgtttagttcacgccaaaattggaagtttgattgaaattgaaacgatgtgatgaaaaagttagaagtttgtgtgtgtaagaaagttttgatgtgatggaaaagttggaaatttgaagaaaaagtttggaactaaactcagcctaagtttaaatgctttcaaataaaaacatttctaaagattgcatcatcatatttgatgatttcagaacgcccaaacccaaagcacggcaggaagaaaacctgaaggcgcagcatgggcacggtcgatggaggttgaatgcacgccacatttctgacatcttgtattgccggacgaaaaagaactgttttgcacgaaaggagagagaaggcagaagtggttagttgggggaaatgggctgggcttgttacttgcacagcccaacaaagtccctcaaaagggcctagcccattaagcccattggacgaaaccctaaactctttcctgaggtctttttatgccgccgagccgtccccttcctcttcctcctcatcagattgtttccgccgccgacgcgccgatctcctccttccagttccaggtgggttcttcctcctttgcgtgctgctgctttaatttggtgcgcacatatcgaaggcttttaggcgtcgagtaatcaaaaggcctaatgagctcaaagcttgtgcaagatcgatcgattttgtcaattctccatccacacctttgccgcctccattaggcatctgggatggatggatgttgtccacacttcacttgttcttctttatcaatctttgtttgcttctacttcactagtaatagcatgttatggagattgtatatatgtaatggagtagtaggagtattcgttcgatttgattaactgaactgaactagcctccaggctaagccatggcgagcaagaaccccaaggtgttcttcgacatcctcatcggcaaggccagggccggccgcgtcgtcatggagctcttcgccgacaccgtccccaagacggccgagaactttcgctgcctctgcaccggcgagaagggcctcggcgcctccggcaagccgctgcattacaagggttctgccttccaccgtatcatacccaacttcatgtgccagggcggcgacttcacccgcggcaacggcaccggcggcgagtccatctacggcgacaggtttgccgacgagaacttcaagctgcgccacaccggcccaggcgtgctctccatggccaacgcagggccaaacaccaacggctcccaattcttcatctgcaccacgcgtaccacctggctcgacggcaagcacgtcgttttcggcaaggtcgtcgacggatacaccgtcgtcgagaagatggagcaagtcggctccggctctggcggcacggccgagcgcgtcctcatcgaggactgcggccagctcgccgacgaccacgccaactgattatattagattacttacttactagagtatattttcttccttttacaaggaattttgtgacattgttccgttcttcttcttgtatcaataacaatccaatgttagaaaacatttatttataactatgctcttagccctcaatgttatatagctattgccttgctctgaaactgactgattctagccgaacaacaacacattacacactcacaatttgtgttccttgtgtgttaccctaagaagaacgcagtagctactacctgactagcacaacgagcagattcctacttatgtgttcctactttcacacagtaataattcttccaaaacttagggagaattagtccctactttcacacagtaataatttcttccaaaacttggggagaattagtcaaagtaactacaccagctgcaatgtctttcactgcatgcaacaagatagtgttaagcatttcttctctattattcttgttttttcccttacaaacacacacacacacacacacacacacaaaactgtacaacaagctctattcttctatttcccccaaagccggcagactttcgcctttacccatgggagaactaaggagcaacaaaaatatgctttcctctattgtatcgagatgacaaactacagaatagatggagattatcctgcaaaaagcttgaaaaggaacttctacttgtcatcctgattcctggggcggcagagtcttgagcacatccctcagggcgtaatatatgctttcacatttgtgatcggatatcagattgccagataacagtatcctctgaaaattctccccggcatcacctctccagagtgtatacgactcatcttctacaccgtttatatcctcaatgtccctcttgaggtaatacagagtcccaggaaggaacagatcttctggcacaaatacatcctctttactatccggtgacaatacttcactggtgctcagggggcgatcttgatctttgatggcatctaacaacacaagaaagaccaatgcgattcaatacaatactaaccccccaaaccctctcaattttccacttttgcagaaactgacgattgaaataaataaataatagtaacttacaaaattattaaaaaggcaaggggcttaccagaactagttgatactgtgacaattttagcataatcagcaagcttgcgcgccacatcttgaattgacgaaacta

SEQ ID NO: 10147 - DNA, 9487 bp, Oryza sativa
tcaaggattctattggccgactacccccaatgacgcgggcgacctggttcggcgatgcagagcgtgtcagttccacgccaagcaaatccatcagccggcccaggccctgcagatcataccactttcatggccatttgctgtctgggggctcgatatcctgggaccgtttaggcgggccccgggcgggtttgagtacctgtatgtcgcgatcgacaagttcaccaagtggcccgaggcttatccggtcatcaagatcgataagcactccgcacttaaattcattaagggcatcacggcccggtttggagtgcctaaccgtattattacggataacggcacccaattcacttgtgaactcttcggcgactactgcgaagacatgggcatcaagctctgcttcgcctcacctgcccaccccagaagcaatggtcaagtggagcgcgccaatgcagaaatcctcaaaggccttaaaaccaagaccttcaatattctcaaaaagcacggcgattcatggatcgaggagttgccagcggtgctctgggcgaaccgaaccacaccaagccgagcaaccggggaaacgcctttcttcctcgtctacggcgcagaagcggttctcccatccgagctcaccctgaggtctcctcgggtcaccatgtactgcgaggttgatcaagatcagcttcgtagagatgacctcgactacttggaagaacgaaggcggcgtgcggccctccgagccgcacgctaccagcagagcctgcggcgctaccatcagcgccacgtccgggcccgatcactctgcgtcgacgacctcgtcttacgccgcgttcaaacgcatgctggattgagcaagctctcaccaatgtgggagggtccgtatcgagtgatcggcgtcccccggccgggctccatacggctggccacgggcgacggcacagagttgcctaacccatggaacatcgagcaccttcgtcgcttctacccctgaggggggggtcgggtgtcaggtttcgggctcgggccaaccccgcaccccccctcgggtgtgcagggttggccgggggctgccacacatgcacattctcatttctctcatttcagtatttcaataaaagcagtttcaatttcctaagggctgtatctgtgccgttttttcctttttgaagaattttgacttgaaatgaggtcactcgtgctcaaccttgccctcgggggctcggttcggtcagctaaaatcgccaaacggggcccagaaccgagccgtgccccggggcgtggtgaactccggggggggaatcggcaaaaacccacaatcgggtcacccataaccctcggtcaccacgttcccggcctggccagtctcgacatgcggatctccccaggcactagccccgacccgcgcttttcgaggactgggacttggacacgggcccttaaatcaagctaagacacaaaaagaggaccacggcacagatcatcctcatctcatccgcatagcaaaataaaattaacacaaagaattttttcatcatttttgattgcagattataagttgatctatacaaaaaacaggcctgaaggccttagaagaaagaaaaagaaagaaattgaagattggcgggggcctgggggctcaatccgatgcgcccgggtcgccggcctcgtcttccacgtcgtctgcaccgctggcatcgccctcctcgtcggagttgggggcgaacgcaagccgaggggccgagccctcgaagctgtggacgatgtggtcggcggcatcccggacctgcgcgcgcgcgctgtcttcagtcccaggtgggaactcgtccagcgccatccacggagagaagttggggtccctggcctggtagctcgccaggacgagctccaccgctccttgggcgaggtccctcgaggatgacttgatggtcttctcgagctcctcagggagctgctggagagccccggccatcttcgagaggcgctgggcaaggcctcccaggttggcggcaggctttattgtctgccctttccagaggcccgcctgccgaccggcgcgatccagacgggagactgcatcccagagcatgccgggccctatctcgcccgccaaacggagggcctcggcttccccggcggatgagtctagcgcgcgctgcatgtcggcgacggtgtgttcggcatctgcgaggcgggcggctaagtcgctttcgcccgcagccgccccgccgatgcgcgccctcgcgtccagctccttttcccgcgcctcgaggtcggcagcccgctgctccagtgcggctctctcggcgcggacggattccaaattgcggcgggcctactccgtcagcgctgcctcacggagggacaggctgtccgccaaccgttgcgcctcggcctcggcctttccgagagctcgctcccgctcggtaagcgcgtcctcgcggaggcggagtgcggactcctcttcggcgcaggcagactcgtgcgccgccagcgttgtctcccgggaggcgacggcggcctcgtggtccgccaggtccttctccgcgacgcaggcgcgctcctccagcgccatggcgcgcgcctcgagggcctcttcacgccgccggagcgccgcttcggtctccgtcgctcgctgctctcgggcagcggcggcatcaaggaccccctgggcggcgtcgagctttttcttcagctccgcctcccagttcccgtgctgaaggcggagggagtcctgcgcctcgttcatcacagtggtggcgatgagggcagccccccgctcctcctccacctctcgagcgatctccgccagtgccgccttgcgggcctcaagatctgagacgtgccggcggtgtgccttgcggcccgcttcaaccatggcctccaccgagtgccgcccctcctcgacacgtgcccatgcggcgtcgagctccgcacgctccgcctgcagggcctccacctgggcatttaacccatccaacaccgcggtatttgcggcggctaaggcctgcagaaggggctctgcgctcagcggggcgacggaaggcgtggggaagggctgccttggagaagatgccgcgcggctcggcccgccaatagacgcgccggccttatcgcgggccacccccggacctgtttggtcctgggcgtcgcccgaaggagtgggcccaagcgacgcacccgcggcctcgtcgcgagccgcccccggacctgtttggtcctgggcgtcgcccgaaggggtggacccaagcgaggcgcccgcggcctcgtcgcgaactgcctcggaagccgccatcgcctcagcctggcgaacccgggcggcctcctcccgagcggcttcttcggcttggcgagcccgggcggcctcctcccgagcggtatcctcagcctggcgagcccgggcggcctcccgggcggcctcttcagcttcccgtaggcggtctgcggcctctcgccggtcagattcccgcctccgtgcctctgcggccgccggatcttcggcctcggactggccggacttgggatggtgggaggaacgcgatgagatatcactgaagcagaaagaaaaaccagaaggcaaacaagatgggtaagagaaaacttgcttttgggatagaagaaaagacggtcgcaatgagcgtgggacgaacctgcgagggggtcggttaaatgaccaccttggaggggaaattaggtttccccgggatggttctgtctcccccatcttgcgcagccgcttcttcttgcgctccccctcgggctgcgatgctggcgcggccccctccgggcgcctgctgctggcgcgcaccgccccgccccctcggggaggagatgggggaggtgttcctcccagcttcctcttcccccgggagtcggtagggcggctgctccccgagcccccgacgcggggcccagaagcacgaccccctccgggggtagattgatcccctcggcggctcccgcctgcgtcgtcatggcccttaggagcctgctcctctgaggccccgaccgccgtcataatggtcaagatggaggcgcgatctggatcgctgcagagggggaggataccgtgggggatgagggacgcctccacggagttgagatttagcacccgttggaccagtatcttgaagtcctcgggagcccaatcccatctgactccctggtgggtccgcatgtagtcttcggacccggtgtactcccaggcgccccgagcgcgccgctggagcggcgcaatccgacgacggaggtagtcgccgtacaccatggccctggtgagcccctgggatcgcaggcccgcgaggcggtcgaggacggcgtcatagccatcccccagatctaccggcgcccgccagctggaggcctgcgccgggggctggctcggaagtcggaggcgcgcttcgtcggcgaggggggtatagaaccagtcgctcttctagtcatcccactttttgcggaggacgcaggggatgtagcggttcaacaccggcccccgcggcaggaaatagcagccgccgaccaccgacggtggcgataccgactgcacggtgaagaaccaccggaacagccgaagagatgggcgcaccccaatgaacatctcgcacaggtgtgcgaagatgcccaatgtcatcactgcgttgggggtaaggtgcgccatctggagatcgtagaactccaggacatccatgaagaaagaagaaaatggcggaaccagccctgccattgcaaaggggagaaagaagacggacctccccgggtagtctggcgccgggcgtccctcgcccagcatgactatctcacggccggtggcagattccggcataaagcggcgcggcaacccagcctgcttctcgctcacgatgcgggaaggcggcagcacgctaccatcaagcagtgcggagccccgtgccatggcgccggacgaagagaagatggagagcgagcgcgtgtggcgaaagaagggcgcagggaagaaggagttagggcgcaagcggcgaaggcaaggggaatgatggcgaaaggaaggaaacaaatcctatcctcagtgcctttatacccttgccaacgctgtgcccggctcctcgtttctcgcgcccattatttcgccccctcgtttctcgcgcccacgcttccactgatcccattcgcccgcttgcggcgcgtgaggtggatatgcggttgcggcagtcgagatagatcgtatcgtgcgcgcgttaattacgctcgccgaccgaagcgacattaccgtatctccaggcgaagcaaatcggctcgcccagattcattcgccgctcaggtgatgtggcagtcttgaagagaccgcccattattgacagccaaattaccataaccggtgtgcatggtttgagaccgttgggtttctgcccaaccatggagaccggtcccacctgtcaccaggctttaggagtggcgtcacgcccggccgcttcccataagaagggcgatcgccctggcataacgccgggggctactgtcggtaacatgggaccgggagtatcatgactagaggcttgaggcagacgccatcgcccacgtggcctggcaccctcgggggacgtcgggcccgagggtgatgtgtgcgcccacctcttggtctccccgagggggggggtcggaccactcctgcctcgcccccgagggccgaggcgccccgacccctcgcgtttctactccacgtgtatgggttaggtgagcacagcggggctcacctaaccgcatttattgcgcctcggttaagcgtgtcacgccgcacgaagtgcagtgcagtgcactcgattatccggtctgtgaccagtcacagaccggtcaaatcgcgggttaggtggcgacaggcggtctgacgcacgcttcgccccatcccgtcaagacgagagcttctaggcactcgtccccggctggagctagcgtgttacatcccagagatgacacgttagccccgatcgatatatgccaggcttcatcctaaccattacaagcaagatgttgtttgaagaagggcaagcatgcacgttgctaagccgacgcgtggtggacaagaatgaccgatttgtgaccggtctgacactgctcatgtcgtcagcacacagccgccttcccacgacgtgcccgcctcaggcagaagtggaggtaggtgtgtgtcgtcccgtcaggaggatgttcggaggacgaccgtgcaaatctccgtccatttatgaagagaagaaaagtccagtttggaaagagaggggtgcatgtggtatccccttgaagtataaaaggaggacctggcccatagagaaaggggatgatcttttccagattcagaacctagaacgagggagaggttggctcacactttgtagctccttcatacacagatccaccaaaacacaggagtagggtattacgcttctcagcggcctgaacctgtatacatcgcttgtgtttcatgctcttttgggaggtcgcgatcttcccgcatacacggagagcttgagatctcaccctgagcccccggccgaaccggcaaagggggggcctgtgcggtctcccggtgaggagcgccgcgctccgtcagacaccgttaactttttagcacatgtttgaccgctcgtcttattcaaaaacttttgtgaagtatgtaaaactatatgtatgcataaaaatatatttaacaatgaatcaaatgataggaaaagaattaataattatttaaatattcaaaaacttttgtgaaatatgtaaaactatatgtatgcataaaaatatatttaacaatgaatcaaatgatagaaaaagaattaataattatttaattttttttgaataagacgagcggtcaaacatgtgctaaaaagtcaacggtgtcaaataaaacgaaacggagggagtacttaacctctgggtgaatgtgaatttatcaatcttttcctatctaatctaatctgatctaacaacacacgtgtgtgtgtgtgtgtgtgtgtatatatatatatatatatatatatatatatatatatatatatatatattagcaaaaatgcccgtgcgttgcaacgggtgaaaaattctaatgataatatatttttttcatacataatcatgtcaatgacaatgtttgtattttaacgaacgacttgtttttctataaacgattttttttcttgcgcgattttctcaaaccattttttaaaaatggcacatttctttctaacagttttttcctagcatgttctttttgtttttttactgacgacgaaaaccatatttttctcccttttttgcttttcttttctcgtgtgtttttttgcatgttttttctaacaattattttctcgtgcgttttttacttttttttcgaatgttcttttttgtttttttccaatacaggagaatatatgacgaaataaaaaccgtgtaatagatgacaaaaaaaaccgatggatcctatccggctcaagcgtccatcaatttagcgttttttcgacagatttttcagagcaatttgtttttaatagaagatttttttcttgcacggttttttcaaaccattttttagaaatggtgcgttttttcctcgcatgtttttttttaaaacaaatttctgatgaaataaaaccgtgtagtagatgacaaaaaatcgatggatcctatccggctcaagcgtccatcaatttagcttttttttctgacagatttttcagagcgatttattttttaatcgacgatgtttttttcttgcacggtttttttaaaccattttttagaaatggcgtgttttttctgacagttttttcctcccttttttttaagtaatttttttaccgacgatggaaataattattgtcacgcggttttttattttttttacggaagatggaaaacctttttagcgtgttttttttgcgcttttttctaacttttctcacacgtttctttgaactgtttttattgtcatgcattttctctttttaaatagttagattagattagacataacgaagattagaaatcggaatttggttcgcccttttcattttttttctcgcgcgcattatttattttatatgaaccagctttttattttttacgaaccattttttcttcttagagaatcggacgaacttttttagatgttttttgggatttttttcatctttatagcaattagacctttttttttcctttttaaaggaattagatctagcatttttttcaccactttttttttgccttttataggaatcggatctacggtttttttttgccacttaggagaaacggacttttgttgttgttgttgtttttctttctttttctttattttcttttattgtgcggtttttctttttctttttatgcacctttctgtctttattcttccccttttattattttttaatcaaaaacgaccttaataccttatttcaaacttatatggactcaaatgtaaatataaaaattacagggactcaaatgcaaaagtatagatccaaaaattaaaatcatataaaaatggaatgctctcgaccggtaggtttcgtttttgcaaacagatctttaatccggcacatcaattttatttttcgtttttaagggtgatttagatctagagtcgaactttcttttttcctttcttatagcaatcggactttttttttatttttttcgctatttttttttgacggacaggaatcggtcgagtcggactttttttttattatttttggatcggactcttttttccgcccggtttttttccctcgtttttttttcaccagttttttttcgctccgtttatttttgttggatcggacgtttttttctttctcccggtttttttgggatcggactcttttttcgtccggtttttttcgctcggtttttttctcgtggtttttttgacggacgatggaagcacctcttattttttattttttattaagtagtagatatatatatatacacacacacaccttccgttctggttttgggtgagaagaagaaatcggatcggattgaggaatttagggaaacggagtgtgacctcggtggccgtgctgtgctctcgacggtggagtggaattcaattggccggggaagaagagaagatgaagatgatggatagccagcccagttgcccgttaaaaggccggcctgctaaaaagaaggcccacatatgctactagccgggagcccactatcccgttggttagagccacttccacgcaccagatcgaggcaagctgtgatgctgtctccgccgccgccgccgcgctcgctggccgtcctccattccattgcagtggtgccgcccgccacccttctctcagccctcttcgtctccgggcgagcccagctccttcttcgatcaggtgagctcacgcctgcctctgctcttgcctcttcattttcttcttctttaacctctcacctcgtcgtcatccatcgggaaagaacgccgtgggtggcggatgaggcataagcagaaagt

SEQ ID NO: 10148 - DNA, 3177 bp, Oryza sativa
agcatcactgcactctttccagcgtggaagaaaactctcttcattggaggttgtaccccttcatgattgaaacaaaaaaaatagtattagaaaccacagaaacaagacgatacaaagacacttttgatgagtagattagttgtacaatagtcaccccattctggaagacacaagcttggctagctggtttatcacatccttcatgtcggcagaactggacaagaagctggaagcgtaattctccagcatacctaaatcgaaatcggttcttctatcgatgagaatggcttgcatggaagaatcatctgggcggacagacttgagtgaatcaatagaaggtatgcggttctcctcgagtagatcagtgcagagtgaccagacaaaggggtccatgccatgaatcaagtaaaaaccatctggtatggtattgctgtacgataacgagccattgacctgaaatgttaaaaagagggcatcgaagagcttgagaaatgagattgatatagcgggtttaggagctcagcagaagagatagaattgctgcaggctactaggatgggtcggatagagcaatcatgcattctgatctctaatccaaatcaagctatgtgtgatggtgtgtaaacaaatactagaaatagatgggagtggtgaagagatgaggtgatcacccagaagcgatgcgagagggagtcggcagaaggcgtcgggggtgggagcgggaagggcccggcggtggcggtggcagagtggccggggtcgaggaaggcggggtcggcggcggaggcggcgtcggcgcagaggcggagcgcgagggcgagctggagctggtacgtctcctcggcctgctgcgcccagctcttgcagggggagcccccgggggccccggcggcgggggcggcggcggaagggaggtggaaggggaagtcgctggaggcggagagggagctgccggcgccgtagctgctgccgctggactggcgctggagcacggcggcgtcgtcggggaactgggagaggagggagtaggaggtggtgcggcggccggtgacggcggggaggtccatggcggcggcgaaaccctagccgtggtggtgataggtaattttggtgggaaatgcgtcgggtcgggtagggagggagagaggctggccgatggtgtggtgtggctgatcgtgatcgcatcggtggtgcggagccccgtaaagtgaggagaggtgaaagccggcgcgcgcggtcgctgtttgtctcgaatcgaatcgaatcggatcgtgtctcgctcggtcggatccctcccacaaagacgtacggctgcggtgcggtcgccttgcaggaggcagggaggaacgggtgcgatcactcgctgactctcttccaggttgcaatccatcttaggccctgtttatagtttttttttaaaaaaaaaattcactctgtcacatcgaatgtttgacacatatatagagtattaaatatagataaaaaataattacataaattacgtgtaaattacgagacgaatattttaagtctaattacgccatgatttgataatgtggtactagagtaatcatttgctaataacggattaattaggcttaataaattcatctcgtaatttacaggtggaatttgtaatttgttttgttattagtctacgtttaatactttaaatgtgtgcccatatatccgatgtgacacgtaaaaacttttcacccctgaactaaacaggtccttatatgaatttgacacatatattgttttctagtgaagttacttcctagcatttctctatagcaaagttggatagaattgaagtattctatagtgatcctaaactattttgctacctaatacacgatttgattgaatattttctagtacaataaatttaaacaaagagcaaggagtgtccaatcatataaactaggtagtaacattttcgataaatgaggtgtttgtttaattttgaagtaccaggttgagagacacctttttaatataaacatccaatcacataagtacaatgagtaatccaaggcacaatttttaacaatttgaccctttacaaaaacttattacaagaataaaccgtgtcaaaaacttatttaaaaaatgaaccacgaactcagtgccatcggaagtggcgttgagatccaacatctcagcgccactatttttggtgctaacctccatccgaggtatcataagctagccacatcatcaagggtcagcgcgatagattagaagcccttcagaatgaagtggtgcaatgtctcgtcagttttgagttgatatttccaccttcatttttcaatataatgacgcatctgctttgtcaccttgtgaaagagatccgtattctcgggcctatgtacctacacaacatgtttcctttcgagaggtacatgggcgttctgaagaagtatgttcgtaaccgtgctcgtccagaggcaagcatcgccaagggttatggaacagaggaggtcatcgaattttgcgtagaatttatcgaagaccttcgcccaatcggggtacctgaatcacgccatgaagggagactatggggaaagggaactctcggaaggaaagcaataatgacggtagacaacaatttattccgtaaagcccatttcactgttctgcaacactcttcattggtagctccttacatcgaggagcacttggctctagttcgcgccaggaacatcggtaagtccgatgcatggattacacggcatcacattgatactttccccgcgtggctacgacaacatctcatgggtaacgagttgatcaaccaacaacttgccttcctggcgaggggaccgtctgggtcgatcacgacattccagggatatgagatcaatgggtacacattctacacgagagcccaagacgaagagcacgaaccaaaacagcgctgttcgtgtcgatgccatgggacacgatggaacaactgccacgtattacggtgccatcgaggacatatgggaacttgactatggtcctctcaagattcctctgttccggtgccaatgggttaggttgactggtggaggcgtaatgattgatgacagtgggatgacaactgttgaccttaacaaggttggatactcggacgaaccttttgttcttgccaatgatgtaacgcaagtctttttcgtgaaggacatg

SEQ ID NO: 10149 - DNA, 11298 bp, Oryza sativa
aattaagccgctttattatgagtggaacgcatgagcaaatgcatatggcgagcatgcattcctgaaaggcaagattctgcgaccaaagtgtacattctgaattttgtttaggtggatgaaacacatagtatatttcatgggaaggagggaaactggaaaacggtgtgctgctgctaggcctgactctttgggcttggacgcttcttctctctcgcttctgcaaccagagcatataccccaatctgccacgcgtgccggccgttactaatccctcatcactaattgtatgcatgatctactgatgcattgcatctctgttctgttcttgaccagaccgtactctcgttttggagaatgagaggtcaggaattgaagcagctagctagagaaagaggctgcaggggagagtccaaattaaaccaaccaccacgttgttatgtgttgcttgcttggtgctagagtgctagtaatgcactagtccaaattaaattcttcatgtattttaggatgtagtatatgatattattaagtttattgatggtgattttctggatggttgaatgcatctgcaaactgaaagagtggccggtgtgaatgcagtgcttaattggaatccgacagtgggtaatggaggagatgggccagtagggttggtgactgttagacgctagcacatccaggcgattaatacgactactgtcatacgtactgtacatgtcatgctacattatatcgatctgtacattctcttggtcatgcatattacagcgccatatcccatatatcgtacctacgaccaaaattaaactaaacgctctctgaaaaaccaatcaacaaaatacatacaacctcatgttcatgtaggggtataaactataattaatgttcatacaaggagtatcactatcgatcaagctgctgctatgctaggtggaggatggcaatattgcattgatgtcgcccgggttcgttgggccagtggctgctaaccgaatttaattccatcctccgctgctgctgcgccagcccggccagcctcccaagaccaaagtgaacatatggccctgtctagttccttaaaaaacttttcgcaaaaacattatatcaaatctctgtacataggtatagaatattaaatatagataaaaagaaaaactaattgcacagtttatatgtaaatcacgaaatgaatcttttaaacctaattaatccatgattagtcataagtgctacaacaacccacatgtgctaataacggcttaattaggctcaaaagattcttctcgcggtttccatacgagttatgaaattagtttttttcattcgtgtccgaaaaccctttccgacatatgatcaaacatccgatgtgacatctaaaattttcatttcatcaactaaacaggcccatatatgtactggagtacgtgccttttatacagacagactactactagtcactcattttacaacctgcacaatggaaatttaccactcaaaatttttcataggcagactgtacatcattttcgtttctaaccaaaatatatataggtgatcacaaaaatcacaatgataggcaaataggagtaactaactaaaagaagaatctttgcattatattggctctttttcgcggatggaaattgactcagttcatcgcatctggataattcattcatcattcattcattctttgtttgttttttcatgccgacttaactgaccgcacatgcataaaagcctcaggctgcagctagtccatgcctgcactgcatagtgacgacgtctgtattattctctttctttttacctaccctataataggtctccaaattagcacgccctgtcctattgttactgttattgctctcactcctcgcttaattaggcttgacatgtacatgtccaaaacataaaacacatttatcaatcgaaccgacattttggttgcaaatctagtgaacaactaagcaagttatggtgaggcgtcacaatcaactgtaccctgcccttcaaaacaataactaaggctgtgtttttcagcgcaaagtttggattttggttgaaattgaagatgatgtgattgaaaagttgtgtgtgtatgacaggttgatgtgatggaaaaggactgaagtttggatccaaactttagatctaaacacagcctaactgtatatcagtaacagtcctgtcgcgcgccgtttctgaagagatgatatatagatcctctgtgtttaatttgcattcagcatttatcagttttatctaattaattgttgtcttaaaagatgtactaaaattaaactggctagtatttgatgaactctctctttttctatacaagtagcacttgtttttagaggtaagttccttcctagtgttcttcagactagtttaagaggttgagcagcattcatgtttagttgcagcctagctattggaggcaaactaaactaaaagctgaattcgctctcacctgctctactgacgtgcgtatgttccataccgcatctcatgtgccggcagtattttatttatttttaatcactctctcaacaactagtaaaagctaatgtatcctgcacatttgtagagagtaattaaacagcacgcgcgcgtgcgtgcatctatcatgtcagataatgtgccatacaattatctggctgaaagctaaccttaaccattaaagtattttgcagtgtttatttgtttgtttttataacagagataatagtaataaggttttaactggtacgtagtatggttgaatttaaaatattggcgggtgcagcttcggccgttggcatcgcgacgccggtggcgtacaagctgcggcggcgcggcgggcacggcggcgaggtggcgtcgcgcgggatgaacttcgcggtgggcgggtcgggcgtgctggacacgggctacttccagcgcaacatcagctcgcagatcgacctgttccagaagcagctgcgcggctgcggccccaccggcgtcgcgctcgtcgtcgtctccggcaacgactactccgccgtcgtagacaagaacaacggcacaagcgtaagctgcaattgcaatacaaccacaccggccatctcgatctatatatcatatctcctctctgaacatgcatgtatgaacaggaggcggcgatcgcgtacatcccgacggtggtgagggggctgcgggagcaactccggcggctgcgcgacgaggtagggatgaagaaggtggtggtgaccaacctccaccccatgggctgcaccccgtacttcacgcggctgctcaactactccggctgcgacacgctggccaacgccgggtccgaccagcacaacgccgccctccgctccgtcctccacgacctcgaccccgccaacaccaccttcctcctcctcgacctccacacccccttcctcaacctcatcaccgccgccgccgacgacaagttcccggtgcggctgcggccgtgctgcgagacgttcacggcggacggccactgcgggcaggaggacgaagccggcaacaagcagtacacggtgtgcgacgacccggagcggcacttctactgggacgacgtgcaccccacgcaggccgcctgggccgccgtcgcccaagccttcacccccgccatccaccgcttcctctccacctgaacgaacgaatgaatactcaccaaccagctttctcatttccgacgaaattccgcgaaatttcgacgtttctatatggctcggaattaagtttcgattcgaatttcgaaggttaaacagtagatttgatcgaaattcagtagatttgctccttgcacttcttcttcttcttcttcttcgtcttcttgaacaactttttttggggcctatctaatttattattacctttggatgatgatttgttgcaactggatagcagtattactgatttttttttttgagcaaagggcgagagccctccatttccattaatagaaatgaaaaagtatctaccagtctacagaaagcagtaatactgatgccggaatacttcaaccaattaaagaaccctataaaaaaaccccaaaaacattgccttttggaacccataagcaaaaaggacattaagttaatcgtctgaccttctacagatttactgttacacaatcgatcaccaggaggcctccctcgctcgctttctttctactgttacactctgctcgcgttacaactaacgggttgtttggctgaggtctcaccctttgctattaagaagaagatgaacacaaaggctctagcagctacataaatttaatcaaccatgggcaattctcaaaacacatgatagttctatgttgtatgcacttgattgtcctatgcttacccaagggggtgtcagtaataattctccagcaatcccaactgctatgaggcaccattattgttgccttctgttgctgctgctggtggtggtggtggtggtgttggtgtcacgtccatttgctcgacgtttgtctcagcagcctcgtactccgaaaggaggtccatgaattcgtttaacagccgttggaccttgcggttcgtagccatggaaggtagtatatcttcccttaggagtttgtgtttcttcattccctgcagatttaccatacttgagttcacaggctcaaagtggtaaataaacatcacgtccaagaaaacatagaattatcaggccatctatcagacagagagccttacaagaacatcaggatcccatgatggatttttcaaatcagcagatgatgcagcgtcaaccatgcccatcggaggaccaagaaagctctcacaaacttcacgtagacgagattcatctgcctctctgaacgaaacaaagaacaagcaatataatcatttccgcacagcatcatagactgttctcatcagatataaaagaatcacaaactttctcagccaattaaacatatagagctgaggttgcaaaaaagaaatgttgctaagcctcagaaaaggagactctgtagccattgtattgaattgataaacaaactaaccttgccagaaatcttatgtaggataagaggcattggcgatattcctgtggagacttcaaagccaatgaagctgccagctgggtctctaaatgggagcgtgtctgcaccccatcatcggtaaccctgtagtgccaacagtcaaacaagtatacatttagagcaaattctgctatgttagtacactagcatgtcatgattctagtttcaaacgctcataagacaagagcaacaatggaagtgtgcaaacctgctccaaataggctttctagccatgaattttcctatatcgatctgcaacttgcctagctctccaccttgagtagaactaaatgagctagcaaaatttgatgctggaaagcaatcatcagctatccttagccagcatttcaggctggtgtcataaagaaaagcatggcgactggcaagcacaactaagggcgagccacatcttgaaaatttagcagatataacctttactgtacctgtcatataacaaagcaagatcaacttgcaagaacaagccattttggtcaacatcaatttagatgcacaaaagttcagattaacactacatatgaaatatttaccggtatcttttccagctgcctcatctggagatgttaccaaagaagccaaagaatcatgcaaaacgcaagtcctggtatagaggtcccatatgtacatcaaacccctccttgttacaagaagcaatttccaacactcatcacagtctataaaaacagctgctgatcccatcatcatcgctggcattgctcgccttccacattttgtgtaaacctgaacaattagaccagttgattcgagtgtttaggctaccagattgtcagaaaaatgaatgcacatgaaggaataaataaaatcatattccagcaattattgatagattttgtaactattccaaactaaaacatgaaataaatctacaaggaattccactaaagggatattagatacctgcaggcaaccatcttcacagccaactgcccagaaattcgcattaccagccaagacagtcaccttggcagagatgcgatctgaccaaagagtttctgttcctcttgtacatgtaatctcagtttcttttgttgaaaaagcaccaccaagcccaatcatgtctcctgcagaacgttctacaggctttgcttcaaggcggaccggtaaagaatcctcattgtctttcttattgaatacatggatagaaagtgaagagcaagaggccaatgagcctggaactacagatccagactgttctatgctcaaccttccatcactgccagcaccagctgaagctttttggattacaagactctcactaatgttagttcttgcagtaatgccagagcgttccctaactccacaattattacagttaccgctagcactataagatggtcttgttccattctctccaaggatcattcgctgatccagggatgaaaaatccacaccttgattctgagaacggttggacatgtcctggttggaaggaaatccaactgcctctggaataatccttttccggccatcaggacgccggtattctctttgtttcactggactagataaacgaggtgctttatttatgtcatcagcagtggaacctgcagttttcttctcatcttcaggtaaagcttcaggagctttctgatttggaacgcttgtagacgggttaggtgcatctgtagaaactttggggggtgattgaaattgctggacactggaaacctttttgcttgcagattgtttggccgatgcttcttctagcagtaactgagcagggctttcagctatatttgattgcctccctctaacatcgccatatctattcttcttcaattcatccagttcagcatcccttaacctgtatccaagctcctttgcttcaaagtgaaaggtagcaactgaaccatccaaagagcaggcaaaaagtgaatagccatcaggactcctgtcagggaaaaagagcagttgctattgagcttgcacatacacgggatactaattatagaatatgttatatggtcaaattcacataccaagataaatcaaccacactttgagtgaagaaatgcttggcaacaaacaatggccgggcactcgctgtcgtccagacagtaatagttcggtcctgactcccaatagcaataacattatatggttgatgttctttagatgatgcttttgatgctccattggcccatccagctggtgcagcctttgcgtcttggccagaagataaatgcttacggaacattgagtggttaaacttaaccactacaacaggtgcgttatgccccagaaaatcaaaggttgctgaccattcaccccgttcaagcacaggggctgagtgcctaggtttctgaaaaccatgagttgtggttatgaagtggccacagggagaccaagcaagtcgcctaaaaaatgtcgaaccaagctgcaaacacacacacacacatagaaaatatttttcagtaaggaggctttctgcaaacaagatatgtgaaccacagaaatgtaatgaccaagtccaaatacacaacaatataacaaaaacataccgattttgaccaatggccttctgtcctgtgagcaagactccagtcactcgtacgccatatgataacagtcttgtcatctgattggcttgcgatgaaagaaccgataggatcccatgtaacgcctttaactaaactggaatgccctcgcaagacagcagtgcatatgccattggccatgctccatatgtgaacagtattatccaaactgccgctagccaatgtcgagtcatcaggggaccaattaaggtcaacctactttacacataagaaatataactgtgttcaacaatgaatcgataaggatcatgacagttttagtaagagatctaagtaacaggtgacagattaaaatctaattatgttaagcatgacatgactgagattttggcagataattaccacatcggcagtatgccctcttaaggtcataacaaccttccagttttctacatctggaggttctccacttccaaattcagatgttccagtgccagcttttctttcatgaatttggataacttgatcgtccgatcctgaagcaagatagcggccatgatgggcccatctcacacagtttactgttccaaaatggtctcgaattgtagccagcaacctttggctggaatcatcactgtcattgtctttggccactgatttcatgctccatatgcgaatctattgtgagaacaaaaatgggatattagcaaagagcaggctgcgggttcctcaatgatggcttgataacaaattaccagcttccacactgacgagcccagacactaaaaccactaaagcactgatgcaaagaattccctctaacataattatgaatatagtgaactatccttgatacatcgaaatgtaacggtgctgcctaaattccctaccttgtacaggtcaactctgagaaggtcaatttatcacggggaaaaatagcttgacagtaaaccagcaaaattttacacttgacgagagttataaaaaaaaaaaatcttaagtcaccttctggtcgccgccgccggtggcgaagcggatgccgcccggctggatgtcgatagagaagatctgcaggccctcgtggcgaatccagctcggcttctccgtaatcatctcctcctctaggtggcttgccgctcgtcactgccgccgaaccgcagggcccatgccccgagcaaaggacccaaaaccctagaaatcgcgcggccgcccgcgggaaccctaggccgcctcgggacggctcctggtaggggggaggaaggttcgagaagcttcgggagggagggggcggggggggggtggggcgaccgatccggcggcgcccggcggcggagcgaagaacacggcgaggagggggatgaacccaaccgctcgtgttccttcctgagagaaaacgaaatcgaatcgaatcgaatcgaactcgaactcgaactcaaacgaaactgaaacgaaatttaaataaaaatctcaaaaaaacagaaacgaaaaggggaaaggaaaagaaagattcgagagcagcggcccagatttcatcccccttttgtctcttcgtttgcctgctttgagattcgtgccggtttaattcgttttaattttactgaattgctcctactggagtagtactacgttgttgttgtgttgtgcctgcaactgcaactctgcagccaatgtgcaagtctggttagtgtcggtcagtcctgcacctttgttgccacttgaaacaatttgagttcaaaattctgaaacttgcttgtcagctttatgaaatcaagcgtacaggcagcctagcagagtggtcacagcgtttacgtgcgattcatagagtgctggaagaagaagagccagcagcaagcaattggtttgtttgtttcttactcatccaactggaagagacacattatccactcatccaacttcgtttgaacctggagtagcattcagaattctcaggtctcaaactgacgactcttcaaatcaaccgcaaatattttagattttgagatagtagttgcagcagtagtagtagtagaaaacaaaaattcagtagagatttgttgggacttaggaggaaggagtgaaactgtgggcggcgaaactgataaacagtcggcaacagagtcagagagacaagtcagaaaggcgtttcttttcatttcgttttctttagcgggagaagcactcacagcttgggcctcattatcatatgggctcaaattttacatttcggcccatgtttgcgtgggccaaattatgcaccagcccaattccaagtaagtaaccaaattgggtaaacgaggtttgcgttattctgataagtgacaaaattgttcttcggatgctcaactgaagcatttttcactcaataaccaatcaaggaaatccaggattatgctgtgacaaacgtatatacgtgtacttacgacagaagaaataacacagatcatacaggcagcaacaagagtatggatcgatgttatcgaccaagagcaatcttaattaataataagagaaatgtttaacaagatgacttgatttgtttcaacaataaataaaatacctcaccaccactagcagcagaagcttataaatcgattctgtgatgaattataagcataacttaacacgtacgtacggtacggtgatcaatcaataatgttggatggatggatggatcgagtatacaatcagctagctagctagcttcttcattgtaagcagcagcagccaggtagaagaagaacaataatcttacgtatgatggatggatggaatggatcacttgttgaggacgtacttcatgacgccggggatgtggatcctgtagaagtagtcgtcccagtcgatgttcttggggtcgaggttgaagagggcggcggcggcggacgacggcggcgtggccatggacagccgaagcttctccatgttgaggtcgtcgaagcaggccttgaagagggcgaaggggccgtagaggtcgacgagctgcatgacgaaggagtacttgcgggagaggtcggcgtagcggcgggcgaagaggaggccgaagcagaggagggagaggaggcggaggagctggagggggagcgcgtaggccaccgccatgaacgccctgaaggaggcgatggtgcggaagaagtagacgggccgcgtgcgcaccgccaccccgtccttccccaccctagggttctccaggaagtagcgccaccccgtccggtacagcaccgcgtacgccgccgggtgccgcatcgacgacgtcacgtggtacaccgccatctccgacgatgaccccctcgagtgcgccaccatcgccgccatcatcgcgttcaccaccaggtcaccaggcacctgcaatatgtatcagcgtcagagatcgatcgtcagagatgttgaaggatgaattgaagctatggatacttactacgtccatgatgaggtcgaggtcggcgaggaagcaggagaggctctgcttggcgtagccgatgatgatggcgtcgatggtgcgggtgccctcgatccagccggggagagggtccctgtggacgctggtgatgatgctggggcgggcgatcaccacggggatcccgtggcggcggccggcgccggcgaccagctgctcctgaagcatcatctcccccatggccttggtgaacacgtaggtgttgggccacccgaagtggcgcgccctggctaaacccagatccttca

SEQ ID NO: 10150 - DNA, 20141 bp, Oryza sativa
  unsure (1)..(20141): unsure at all n locations
tttcctctcttctcactctaccgtggccttggtgcatgggcctgaattccggcccatgcaccctggcggatccaaaccagcgaggcccaggagggctctagctctaagtgacagcattcttaatatacatcatctattttattgaatctgatggactataatgaacttcctccctctgctttttatattataggccgtttagaatttctttttctaataaataaaacttttaaagttaaccccaggtttaatagaaaaaaaaatcaatgcgacttataaatatgaatttgagaaagtaccaccaccggttttatatttttttcatattttatacaatgacaaggatttcaaaatatatcttttgagtatgtttttctattataatctcttctattataaaaatttaatgtgtttctgtaaaaaaacaatccgtatttttgtccatcgtcgtgtcggtttatttcccacacgacgcagccgcgctcactcagccaatctacgcattcgcttacagacatacgcatgcccagctgaccatctgccccttacggcttgtttggcaacttaagggaaggggattgggagtttacacgagggaattgatggtgagattaagatgggaatttgatttttcatcccagtctcttgtttggaagaggtggtggaaattgatatggagtttaattggagattaggtcattaatgaaaacggatggctgagatttgtttaggcgaagtaaaggaggaattccctgccaattaccaacccctacccaggtattgaaaaggagggagttcattcctcaattcctcatctctatcccactaaaattcccatgtctcccaaccaaacaaaagagttaatagcctcatccctctaaactcccaatccctcctaaaaactctccccaaccaaacgggccattaggctcttagctgccgcagctggccaatggccatgcctcacctgagccaaatggtctaatgggtttttcttttttttcttttattctctgttttcacctactcactttgatatatcttagtataaataaattggatgagatattatacaatatgtatggtagtatggtaaatcccataactttatcaagccatgcatttttcatgtgacgtttgtgttgtgtatttttttttttccactaaaccacttttagttactccctccgtctcaaaatataagcatttttagcatagtgccaagtcaaccatttttaactttgactattgaaaggaaaaaataaaaaaaagatcaataatgtaaaattgatgttactagatttatcactaatcaaactattataatatgcaactctttttatttaaaacattttatttttatagatattattggtcaaagtagcatctcgaagactgtgtcgagatccaaaaatgcttatattttgggatggagggagtattgtttaattttcttatatagtcatattgtatatataggtgatggactcaataaatatatttgggtcagatcttcatgggccaagcctaaaggtttttcaacacttttgtccggttgagtgatacttatcggcctcaataaatatattgtttcctagtgaagctactttctagaatttctctatagtggaggtgaattttcatcccacgaggggacatccccctcgttgtttgcatgtcatcttggcattcgccgccgccgccgctttcttttgccgacggagtggccatggacaggaggaaacagggtggcgtacatgatgcccatttgcgccatgatctgatcgcctcctggttttcaagcagcagacgactggatttatctcgaaaatgctttacaacggacgttcgatacgacgcaaaaaaatcggacataccaccgagtggaggcgtcaaccactcattcttctctctttctatcccctcaataccgtagcactgtatctcactcgtgtcttcccccttcttcgccggacgcacgcctcccctcctcctcctcctcctccacatccggccatcgccgcctcccatcatcctcctcctctagccgccgcacctcccccctccccctctccttcggccgacgccgccttccctcctcctcctcctccggacgccgcgccacccctcctcctactccggctgccactcctcttttcccattggcggcggcgctcccttcggctgggcgtggccggcgagcttccgtcctcttcgctggatggggtggcacgtgtagggcgacgagcttggggggcgtatctcgcggcgttggctctccccccaccggcgtcccctccctgcaaatcgaggcgcagggcgacgtgatcccctgcggcggcgcaaatcggctgcagccggcgcggggcctatctcgctctccagatccggccagacgcagagcggtggtggtggcagcgggggtgttcgctcgccgaagccatgccgcgcgaggacggcggccggagttgagggtggtggccggagttgaagacacgaaggtgggtttagttttgtgattcactttgttgtatttaaggtgttttattttgttttgattcgatattgcatatattgattttacatgttgcaatcgatatgttttgattgaatttggttgaaacactttcgtctatgcgatgaaacatttttctctggttgatgaaacatgtgaacatttttcaatgaaacattttgcaacaaccgtatgatgtttcagctttttatattttttgttgcactttattgtattaaggtgtttcattccattttgactttgatgtttgcatgaatttgatttcttggtgttacaatgcgccagtccatattgttgaatattgcatttagttgaaacaatcttcctcaaacgctgaaacatttttctctgggagtgaaacatctgaaacattttcattgaaacatttttttctgagggatgaaacatgtgaaacattcctcgataacatggtgcaacatcgtccggcgatttgcaccagatcggacatccgatccatagcagcctccggtttatctgctatctatctgcacatgtacaataaatagaagagaagagcttcaatcgcaatcggaatcggaatcgagtccgagccttacggcgtaccggagtgaggaagagaaaggggaagtggcggcttctatctctactgcggtcttaattgattgatgcatgggcctctgttccagcccatacacccgacctgctgagatacaaaggaataagctcatttgaagtacctggatgtggattttcttccctcgatgggacgtcccctcgttgtttgcatgtcatctaaatagttattaaaaaatttgaaaaaaattgatatatttcaaattaatctatgttaccaaattgtttttcatattttttttatgtctatttaggtgacatgcacgaaatgagaggatatcccatatattccctcgagtgatgatttcactttccggaagtaccttaacttctacagtgagaggaggaaaaagaacaaaatcgaacaaagctgcaaagtttgacagattaattaaagaatcatcattactgcgatgcgaccattagcgttgagtattacatctctctagccagcgtcgccgatcatcaccggcggtagcactggacgtgcaggaagaatcctccgggaggatggcccttgctggccatcacctcgtgtgctacaagtgctacagtaatctacatttactaatgacggattgattataatcttttgtgtatgtttttctattataaactcttctattataaaattttaatgtgtttctgtaaaaaaaaatccgtatttttttccatcgtcgtgtcggtttatttcccacacgacgcaaccgcgctcactcagccaatctacgcattcgcttacagatacacgcgcgcccagctgaccatctgccccttaggctcttggctgccgcagctggacaatggccatgcctcacctgagccaaatggtctaatgggtttttcttttttttattattctctgttttcacctactcactttgatatatcttggtataaataaactggatgagatattatacaatatgtatggtaaatcccataactttatcaagccatgcatttttcatgtgacgtttgtggtgtgtattttttttccactgaaccacttttagctactccctccgtctcaaaatataagcatttttagcatagtgccaagtcaaccatttttaattttgactattgaaaggaaaaaaataaaaaaatatcaataatgtaaaattgatgttactagatttataattaatcaaactatataatatgcaactctttttatttataacattttatttttatagatattattggtcaaaataacatctcaaagaccgtgtcgagatccaaaaaatgcttatattttgggatagatgggatggaaggagtattgtttaattttctttcactgattcacctattgcatatgtaatacttctttttaagaaaatagctggcacatatttttcttaattatttttcttttttgttttccttaatttttggtgcatcttacgtttgtcgtcggcacatcccctcttatcatcgtaatattttctctcttttctcgctctgtccataagtcttgtatcagttttcttccagagttcttgtggacaacacatgaaaagagatgtcctgtacataaaaattacaactatgcctataaaagcccaagcattatgggcaagaatatgtagtacattttgattttctatactcactgtgatgatgcaaaaattgatttccctttggacttaattttggaattcaggagagagtgccatgtccccgcaaaaaaaaaaagaaaggagagagtgccatggaaatggtgtccagtgttgctcaatgctgatagtgttctttcaacggcaaaatgtattgtgtctttttgccagaggtcgacgaaaaccatgaggccaggagattggtgagtgaggttgatgacgttggttgtgcgatggtcgaagtaggagagacctagcaatggtggcactgttgccccaaggttgaagtgggtggtggtccattgctaggtgtgggagttgtagaggtggagctcgtattcccctggtggcctaaacctgttgacagaaagcgcggtgacgatgtagcgttgtttgttgctgatgaggggttcgttaatgtcctgaggttcagggatgtagtgcaggatggagacctcgtggttagtgaaggtgatcatagggccgggatgggtgatgcgcgtgagagacggcgggatatcatcagcaatggaggccgcctatttattgtatgtgtagcagatagatagcagataaatccagtaggctgctagctacttgaaagccaggaggcgatcagatcatggcgcaaatgggcatcatgtacacctccctgtatcctcctgtccacggccgctccctcggcaagagaaagcggcggcggcggcggatgccaagatgggtactcctcgacaagctcgcctacttctctgacgccgacgtccgcaacgccaccaccgacctccaaaacaagggagggccatgaaatccaggtcaccttgtgcaccgccgcttgcccgccgctcgtctcctacgtgtgcgtccactctcccaccctcaaccctaaaaccaattacttcgccatggagccccagatcatcgccgcacacgatgacctcctcctcatccgcctcatcctcggcataggtaacaggttcaccgatccctcgccgactacttcgtcgaagtaacagagcttcaatcgcaatcggaatcggaatcgagtcggacggcgtccgaaaggggaagtggcgggcttctctctaccgcggccttaattgatgcatgggcctctattccagcccatacatccggcctgctaagatacaaaggaaataagttcatctcaagtcccttaacaaagttgcaaagtttgatactagattaattaaagaatcatcattactgcgatgcgaatgcgaccatcacacaccattgacatctctctaaccagcgccgccgatcatcaccggcggtagcattggacgtgcaggaagaatcctccgggaggatggcccttgctggccatcacctcgtccatccacaccctcccgccgtctccgtctccgtctccgtcgcgcgccttcaccatgaactgcgccccgccgccgccgccgccggcgaaccaccagtcgtgcacgtcccacatcacctccaccaccgcgccgtccccgagcaccgccgtcctgttcccccggaagttccacttcacccgccgcgcctccaccaccttcttcccgtcgatgctcaccgccacctccccgtcccgagtcccccactcctccccgcggcacaccaccgccacctcgtgctccgccccgtcagcccggaacctgcacctctttctttgctccacctcctcctcctccatctcctcctgttaatccttctcctctcgtatctgctccctcctgcttatcaactctctcctcggctcatcttctaatcttcgttctatctccctctcctcctcgccccctcccattatgacctctatctccccgtcggcgacgacggcgaggtagtagtcgcgcgtcggctccggggacgacgacccggcggcggggtgcttggcgtccgtggtgtcccagtagatggccaccaccgtgccggcctcggtgacgaacgaccgggtcccgcgcttcttgtgcaggaactgcggcgagctcgccagcgcgacggccgaccggcgaggcgtcgctgctgaagctgaaccagcagcgggcgagggggacgaccgggaggcctcgtcgacggcgacggcgaggccagtagcaccgccgggcgcggcaccggcgacggtcctggtccacatgaccctgacgaggatctccttgcgcgaagacaaggcggccttgtagacggtcgccgtggccgcctgcagcgagcggtcgagcgcggcgcccgccccggccgcggcagctgaggccgcgaggctgacggcgccgtcgccgaagcaggagaagtctcgcattgctgccagctcgacggcgacagcgagctcaattcggagagatcgatggatggatggtcacaatgggaagggagtctgcagcagcatgtgcagcgcaagaatgttgatcctagtacttgctactagtaaagaagaagaagaagagaagaaaagagggcaaatttaatggcaaaggctcatcttttgggcggatttgtgtgacttggtgattttggatgtttctgccatgattatgcccatgcatcagcatcaccgtgtttcttctctttatttttacctttctttttcaggtgaagttgcaattgcaaatgcaaatgcaattgaagtcgatcggggtagaagagcagatacaaggtatggttggttgggggagaaggcatttaaggtgagcatgtgtgtgcaatttgaccagataaccactactaccatccgacccgctgttgctagtcatctgcgtcgtggcagccaggaacctctttttcttccttgcaaaaaaaaaaacaaaaaacaaaaggatggctttccacttgattaatcaagataattgtttgcatcaaaacgtttattaagttttgcaataaacagaagaacaagtacaacaagggaaactcgactgtcatgtcatgatgattatcttaggatcaaatggccacgatcgatcgtgtgaatggaccacgcaatgcaaggaatggaacagattgaactggagcaagtactcctgctatctgaaaactgaaggggcatccatccatccatcatgggcatcacgaagtgagccaggtgtcgatgggtacagttgcaggtcacaggtgtaggcaggctgatggatgctgcattcggacacgcatgtcgcattggcaaaggagagcccccggaccnccctttgggttttttcccccttttaaaaattttttttaaaactgcattttatatggatgttacatcatactcttatcatggttgagtatatgcttgcttgcctgatcaattcttatcatggatgtttcatcatacattttatccatgtatgtaagatcacactactctttgtaaatggatgtagtagtagtagtatttggttgaccgggtctgaccgggatgaaaatggaaattgaccgaagagagaagtaattactggtcgagggaggagagagtcaagcacgaagcagacgtcgatatggtcattagtgatcgtcgacgacgatgatcctttagtccactgcagttttaattgttttggcctaacacaaataaatggtgataggagagtccaggtctgacgtgttcatgcacgcgatacaatgccggtggtattgcagccccgtagactacttcacacttggacatactcgtgcctactcctacacaaacatggtcgtcattgcagtgccgcggttatctcctcgtcgtcgtcctccattaatatttaatcatagtaatcagtgacgtgaataaagtataagtgatgtgatcaatagtccagagaaatatacagtatttgtcaagaaaaaagaggaccaagagtaaagtattaagctaaattaagcataactaagtatgtaatgtgttgtttttacgaatttttgggtggggaacccctatgtctactagtgatagtaactaacttttaaatttaaagaagtgcttgtttaaatttgtagtttaaaattattatatttcgtgactggtggtggagtataaagcagcatatgcatgcgttctgatgcaaagttgagtcctcccttgaaagactgaatgaagccaatggcatttacttggactgaagaagcatcagagcacccgcaatggtaaagtaaggtgctctctataaaacatgtacatctcagcaatagactcgattaatagtaaaccaccttaatagtatgtctacattggtatctatagctctctcatacattgcctcgtttttctctatagactatctctaaattagtagatagctttgctctctctcttcatttaatacctttcaagtagaaaaatatactgacatagatctcttgtagagagcctatagataaccattgtgggtgccctcagagatttcagtactaactctacagtagtacagtggagtcaatgaatggtcatctccgttcccttggaagtgatcaatcaattcaattattcgatgcagatatataaatgtttacatagagtcatagacgtagagacacgggatggactatgacactgttacgctgtaatgctaaacaatctctatctttgacactgatgaccattattgaacaattattatggatcgagtactagcttaattacctgacagttaattagctaggggaagaggagtatacactacagttagaatggaatggaagttaattaggagtagtagcttgatcatttgggcaacataattaacttgatggcaacggttggctcgattcgtaatactcaagttgcgacggccggaaacgtggaatagtggaaagagatggtagcaaagcagccatggcggcggtggcggtagcgcgcatctgatcttatcaagatgcaaacaaagagcagtgcccgcgaaacagcttgcatatatctctcccaaaaacatcagatatatcagaatcagcagctgccgctgcatgccggcttccaaaacacctgctacaattcttcatacctcttcttcatctctccaccaaaacccttttttaccctacacagttccgaagtgcctcagtcagaaaatgaaaggaattagtttttttttctatggaccaaaggaactagcttcttttaagcatagttacgttcttatttttttctagttgattgtccatgcttttcacttgtactagtactccaatactacttactccgttttatattataagactttttaatattgtttatattcatatatatgttaatgaatttagacatctataaagtcttataattttaaacggagggagtactgtacattcatgaaggttcttgtgttaattactggctggcttgcatctgcacgctcgtatgataagatcgagtaacctgatcgatctttgacagcatacaagaacgtttagttatgtgatgtcggtgtccgtgtggtgccagatgtgaatcggtgaacagattagggagaggaattacaaaactacagtgattcttccaaaaataaaaattaggaaaaaaaatctactagtactactggactgcaataccattaattaggtgtctatctccttcgtctaactagtccatgagtttgttctagctcctccgcacggcaacaagccagtagcagctcagctggcctctagcagccccatcgcttggctgataacggaaaattgcgaaatgagatatttacaaataaaaaataatccatgaatgaactattatatactgttcgtaatgatctaaaagaaaaaaactaaaaaataagctacgatgaactaaaatcaactctaaatatatatttcttttaaaaaaaaaataaattttggctaataagtataagtataaatgaaaagataagcatatggaaatttggctgattggagtgagccccatcgattagcctaataagctaaagcaaaagccaaaatttaaattttcgaatttaattttaagatattcaatgtaatttctttttagcgaataaacatataaaaattttgtctataaattaatttttatttcctaataaaccgtgttgacttattgtgaatacgtataaccgatgagtgtcagtactactatctttgagcggctgtatatgtgatcgattgttcattcgattgactctaaagcagggagagtggtaagtggtaacacgagtatgtgtatgcatgcgtccagattgttctagaacacttttataaaaatccatatttcagaggacaggactgcactggttagtacctgctcttccgattccaaaaccaaaagctggaactgaaacctctggatccatccatccatcggacgacgtcgcctcctcatccatcacaagtccggacggccagcagcgcgccacgtgtaaggccacgccagagaccagccaataggcaggctccaccgagtcagccgtcgttcccttaaatgtgcagtcaccgacgggtgggacccgctcgctcgtgctggcccacatatcagtgtatgcacatagagtgggtgggaatctccatccgtttgggaacacacaacacaacaactaccacccccactccgctccttccttccttcccgcatttggatttacccccaaatcttctccaagtccaatcgacctcatttcattcgattcatcgatcgctcggcgcggcttagggtttttggcggcagcgatggcgtcggagaagcacttcaagtacgtcatcctcggcggcggcgtcgcagcggtctgtgccctctctcttttttcgcttgcgcctcccaaatttgcaaatcaccttccttccgtccttctcgccctgccgccctgggaggggagtaggctgcgggagttcactgcaagatcgatgtgggattcattcgcttggatccttttatttgatcttggtctgttccggatctcgtcgaaagtacggtttttcctgttcctaatttctctctgaatattttgcagggatatgcggcacgggagttcgccaagcagggtgttaagccaggggagctcgccatcatctccaaggaggccgtatgctctctttctctctcacacacatacgcgcgcgcgcgggttgacacacaaaatgctctcttctgctctctctctttcaataggttgttcaggtgctccatatccataactgtagtacaccttcaatcgagttaagatgtctagtatgccagttttttgttatccacaaagcataacaatggcaaatgagttgtgcttatgcaatagttgcatacatcagtatgttagtggcaggcctcaactattatttgtttgctaattactgaatccacatgtttgtactaaatcttctgttgcctaggtacttttacttactggaaccatacctgttcttgttgtaagccacttgtttaagcatgtcgcaattaaccaaccttcaatctattgctggaattttgcctacaacaatgctttgctaaaaagaaaaactttgtattatggaagttgcttctgagggccaaaagaaacaattcttgtaaagccattttggcacagcaagaaatagtcctaatttgccctttgcaagttctgtcattctgtcaatttttacttgcttgttcaccaacacagcattgtgtttcttatcaaaagttctctttcaggtggctccttatgagcgccctgctctcagcaagggatacctctttcctcagagtaagtccttaacttaccgtgttctgccttttcgtgtctgacctgtgccagctctatgtcacatgtggattgatcaatttgtacgatcaaagtaacaccatttgcattctctgcgaatagatgctgcaagactcccaggatttcatgtgtgtgtcggcagtggaggagagaggcttttgcccgaatggtactcagagaaaggtattgactgccattttgctttctgcaccatatcatcttttaatgatttatttgtcattgttgaggttaattaccatcaatttgaaattcttatttttgctcaccttagtggaaatacgtcatgtaatgatttttttttattctaagcatactcctgaatcatgattgcatctgttggcaggcattgagttgatcctgagcactgaaattgtcaaagctgatcttgcctccaagactttgactagtgcagttggagcaacctttacatatgagattttgatcattgcaactggctcctcagtatgttgtgaactgtgaaatttgtttaatatcggctcattgctgtcattactatcacttgttatttacatgctctttttttatccgcttgtcaggtcatcaagctatcagattttggtactcaaggagctgattccaacaacattttatatctaagggaagtagatgatgctgacaagctggttgcagctatccaagcaaagaagggtggaaaggcagttattgtaggaggaggttacattggtctagaacttagtgctgcattgaagatcaatgattttgatgtcacgatggtgtttcctgaaccttggtgcagtaagtgtcaccactcatattttcgctaaccactgttcaactacctactacgcatcagatgaaaagaatcagttttgcccatacgattgacatgcagttatgatgtgaaacgaacttatagtggaaactttcgtgatgatgggaatctgacattgtaaaatatcttcttgtagtgcctcgtctcttcactgctgatatcgcggctttctatgagagttactacactaacaaaggagttaagatcgtgaagggtacagtagctgttggttttgatgctgatgctaatggtgatgtatgtacatcttccaaatccaaaatagctctgtagctctcagtgtgaatgcaaatgactgtctgctttccatcggttccctatttactaggtcacagcagttaacctgaagaatggcagtgtgcttgaagctgatattgttgttgttggtgttgggggcagaccgctgactactctctttaaaggtcaagttgctgaggagaaaggtggaattaaggttagtttgcttttaacctgtaggcttgaccacagaaggtgctagggatgtttctatcaaagaaacagtgtgtaaacaactggacgtttctttatcaaaaaacagcagctgtgcatttgctatttttcttttttgtgcaagcaactcgtttatagcatttggcccatcttgattgcattccttgaaacaattgagcatgtgcattattgtttataccttaatatctggcacgcccaaaattgtatgcagaccgatgctttctttgaaacaagtgttcctggagtctatgctgtcggtgatgtggccaccttccccatgaagatgtacaatgagttgaggagagtggaacatgttgaccatgctaggaagtctgcagagcaggctgtaaaggtgaggccattccacttgtgtttctctgaaatacagtagttgtgacgactaacaccacatagtggcctgcacttggatctgacttgatagtgatctgagttaagcaattattgaattgctcggaaaaccaccaaatgcttggtgttcatgagtatccctgattagcatggtagaatttgatcactgaaaaattctttgcactgtcattcaataatgatttgaatatattgcatgcaagaataacgttaaactggacgatgtaatgtattgtcacatggaatagaatgatctaatgcatagtcatctgataatgtattatgaaatattgaaattgcactaaagaatagtgcaaactttgtgttaatttctttgagttgtctttgcgagcagtgaaatgtcaaaaccttggagttaccaaaccacttggaatccaaaaacttcgcttgtgttgattctgattaccaacaggcaacagttgtggctacttaactcggaatagggttatcatatcttagcttgaaccctgcatctttgtttcaggcaatcaagggaaaagagtccggcgagtccgttgtggagtatgactatctgccatacttctactcccggtcattcgacctgggatggcaattctacggcgacaacgttggcgacaccatcctgttcggagacagtgacccgacctctgccaagcccaagttcgggtcctactggatcaaggacggcaaggtgttgggtgccttcctggagggtgggtcacctgatgagaacaaggccattgccaaggtcgcgaaaactcagccgcccgttgccaacatagaggagctcaagaaggaaggcctccagttcgccagcaaaatatgagatttttgtagttttgatgtacatttccacatggtactccccctattggttttctgattgtgatgcgtctgtactctgtactcctcttaaatatgggcacttgctatagctgctgagatttgaataaagaagttttctactacagcctttgcctttcacggttcaaagctactggtattgttttgtggaatggcggcggctgctgggctctcgcccaggcttgttgttacgccggggaggagaagccacagccatggacggcggcggatgtgctgcgccgcggcggcggcggcgcagggggagaggaagacgacggtgaggagcaaggagggagacgcggtggagttgtgccgggtggtgaacggcatgtggcaggtgagtggcccgtcgtggggccgctacgagacgcccgccgccgtggacgccatgctccggtacgccgacggcggcctctccaccttcgacatggctgacatttgtaagcctctcctcccgccgcattctggatacctcgcaggaaactgacacgtggggcccactcgtagtgacacgtactgtagctgcgtgaaatttaccccgtccgtgccgcgacgaatcgaggccagtagcgccttatctccctccctctctctctctctctctctctgtgtcatgtcgtcgtcgtcgtcggcagctcgcaccctcctctcgccggcggcgcctcctgtcccgcgccgcggcgtggtgcgtcccgcgaggtgctccgggggcggcggcgcggcggcggtggagacggccgcgtcgggggcgaaggtttgtacggtgagcaaccgcggggactccctggcgatatgccgggtgctcaacggcatgtggcagaccagcggcgggtggggccgcatcgaccgcgacgccgcggtggacgccatgctcgcctacgctgacgccggcctctccaccttcgacatggccgaccactgtatcaatctgcccctctttacctctaatcactctaaaccctatcgtcggcatttgtgcgaacacgtagcgtgcgtaacattgttgctggtactatgcatctactaggtgctatgcatctgttggtggcacttagttgttgctcaattgatgcccataagctgtacacctgtcccacggttatgagttgatgctattcgattgaaatcgggaaatggttttgtttcactttgaaaaaaagtttgcttcaaaaaaaaaaagttcatgtctctagctatgttcagttcagaaaaggttcatgtttcattgacgtatttagctgcacggcgtagcaagtgtaaatatatgagagttgacactaataagaataaatcaatctttctcctaatatttaatctaggagcactgagcatggtatcaacttgattttaaggcatggttactgttttggcagatggaccagcagaggatttgtatggccttttcatcaatagagttcggcgtgagcggccacctgagttgcttgaagaaatcaaggggtgagagcgatttaccatggtctttatgccactcggaggtgtgtatagctgtttttccgctgcttctaattgttattttattaatctccgcaggctaacaaagtgggtaccacctccggttaaaatgaccagaagttatgttgaggataatattaacagatctcgaaagagaatggatgtttctgccttggacatgctgcagttccattggtatgtttctgtggatttgtgtgctacttattagttatagtaacatttggatgccatttggtttattgctcagttttattacatttactgctaatcgcaaattaactacattcttagaatgttgaactgttttgttgctaaacaataaggaacctcctgtctcaagtgacttttatatcacagtttcttgtacgtttgcacaatcaagtttctggtgatctatcatccagaaaagattgtgtccttccattgaccattgctcttagcttcgtagttatgctgcagtagagaccagtttagagtactacagatttttagttttgagtgtactgtggaaagtcctaaacttgagaggtgttatgataaaaacctgcggtatgtgtaatcagtcgaggaaatgcagcaatgttttatactataactactgccataatttgtaattcagctgaccttttatcataatataggtgggattatgcaaaccctggatatctggatgcactaaaacacatcacagacctaaaggaggaaggtagtattttgaacttggatcagatttttagtctacttatgtgtttcctttcgcatgtcatggtttttcagtactgacggattctcgcttcatgccttgttttgttatgtacaatgtgaaggtaagataaagacagtagctctgacaaacttcgatacagacaggctgcagataattctagaaaatggtatcccaattgtcagcaaccaggtatattttcacctaacccttatggtatatttgccttttatttgtgttaactatcatatggtccactcaatgaagtgagggatgttgtaattgccaggttcaacattctattgttgacatgcgtccgcagcgaagaatggcagaactttgccagcttactggagtaaaacttataacgtctactcctaaccccatgtcccctctccctgttttggcataacacatagttttaatgcagtattactgatgcaggtatggcacagttatgggtggtctgctgtctgagaagtttcttgacaccaatgtatctataccttttgctggacctcctctgaataccccatctttgcagaagtataagcgggtgagcattttgtatatcctatgtttgaacgagttacctccttcccaattcttgctattctcattgttgaagctgtgacagatggtggatgcctggggtggctggagcctgttccaggctttgcttcagacgttgaagaaagtatcattgaagcatggtgtttctatatcaactgttgctgtgagatacatactgaaccaggtatacatccattcaatttatcttgagatttgtctttttcttatatatatataaaatagtatcagtgaagcatttgccataactaacatgtgacctttgtcattttggttgtttatgggaatagacatctgttgcgggttcaatggtgggtgtgagactgggactctctgaacacataaaagacaccaacgccatcttctcgcttgaattagatgaagaggacatgaacagcatcactgaagcatcgaataagggaagaaatcttatggatataataggcgattgtggagacgaatacagagcataattgtgcagagagataaagagagagagaggcagagggggtagaccaatgaggcgtgtgcctgccagttttctggagttctgaaatctgatctgttttgtcatgaacgtagtgtgcagcagctatctgatcttccagtatactactactccagatcagtgtgtaaaccaacctcccaaaagaaagtggcattttataagaactgtacatacacaagacagattataatttgatatgcccattaatacggattcgatttgcgcagttagccaattaaggagtgtcgcatatgctttggttggtcatgtccagggggaggcactgcactatttcatcagcaatcatccacggaaagtggtggtgacagaccgactggcagaatcgtgccctcaccgaaagccacaatataatgcggtttgcggccaggaacagaatcttcgttcccagcataccatatcccgatcatgtaggcaaggtaccctccttgccttgcctagctgctcccatccaccatgatttgtacttttccttcatccttaccgtttatataaataataaaaaaaacggcatatattaatcagataaccaccaaatttcatgccaaataggctcctctaagatgtcacgtaaaactgccatggactgatgggcgcatacaaaatccatatcctttttctcccatattataactcaatctcatccttattagtctttgctccataaacagtcatactgaaaaaaaagggcgcataatatgatcgttcccggtaagattatacaatgtttcacaatataacaccagactgccagcatatatagtcttccaaacgtaatatcttcttgctccaaagctttctgaatattgtattgtaatacatcttgtattcccacaacaaaatcaatattgcaatacattttgtattgggaagttatttatgttttgccttgcattatgataggatctttttttttaaaaaaaaacttatggatggtaactaatttgttcgtctgtatcactgtatggtacaaatgattaagaactaaacattgccaaccagagctttatgacctgaataacttcttgccccaaaaggcttttcaatgttgtaatacattttgtattggaagtaaattttgtttcatctggcatgcaatgaaatcactcaattttccctactaaattagtgatgatttattaggctacattggtaaaatcatagaaaattagtatctattatatagccgcataacaaatttacaatgtcacatcgtgatgccatcacaatggctttacagtcataataacttcttgcgccaaaaggcttctcaattgtaatacattttgtattggaaaagtgatttacattttgtgtgcactatgatggaatcgcttttttttactacttatggacaatattttattcggctaccttgagaaaataccgctgaaattagtaaacatttcataaccgcatcactgccgttagagagctttacgaccggaataacttcttgcccaaaagctttttcatattgttatgttttatcatcgggatataattatgttccaagtggcattacgatggttcttttctacctatagacaacttttttttttcatttgcattggcaaaatcctattaaagttagcaaataatactcactctgtttcatattagtataggatgttttgaatctttttctagttaaactttttaaagtataagtttgaccaactttacagaaaagcataagaacattttcaacgcaaattaaatgtaatatcaaaatacatatatttaatattaaagtttgccttatagaaaaaa

SEQ ID NO: 10151 - DNA, 4066 bp, Oryza sativa
aagttacacgcatgggttcgaacccgagacctttgcttttgaaggaaaccacctcaaccaccgagctatcataaagggaggttaaaatttcaacctatacagaggtcaccaccgagctatcataaagggaggttaacatttcaacctatacagaggtcaacgccaatgagagtggcgctgacctttgatgatgtggctaacttatgacacctcggactgagtttagcgccaaaattggtggcgctgaaatgttagatctcagcgccagttcatttttgaaataaatttttgacacggtttattcttataataaatttttgtaaagagtcaaactgtcaaaatttgtgaatccaaggagtgtttcagacacgttcactgcaatcgcaccgcaccgcaccgcatcccgcatcccgcagcaggccagcagccgatcgcgagtgtctagtagtactactactcggcaccgagagctgcattcccgagctccaggttccagcaaagtagggtttagggtccttaggtttaggaggaggaggaggaggcggcggcggtgagaaggagagtgggatatggacggcgacggcgacgacggcggcgactggaccaaggtcacatataaaagtaccccaccgtcctctgcctcgagtagtgacagcgggggacgcggccgcgggcgcgggcgcggcggccgcggccgcgggcgccgtggcggcgggcccgggccccggtccggcaggaatggcggcggctgggacaagcgtggcaagaatagcagcggcagcgaccacgagagtgtcggaagtggaacccccccctgcaactccgtcgagagcttcgacacctgtaccctcccctgtgccttccccgtcatctacgttccctgatttcgcggaggaatacatccgtcactccttcctggttaggcttacccaatcttcggatgccagggtggccgagaggttcatgcagtttctggtcaagtatgttcttttctcatttaccttctttgcgaatctatccatatgatgtatatttgacttaatatttctatttctatagctacactgcccccggcgatcaactcccattttacccaacagaagctagagcccttctgcaaaggaaaaactctgattgtcatgagttgttggtgcacttcgaccacctgagagagatggacaaaatactcgccttccacatgtgcaacaaccagaacaggtaaatacatttatatctactatgcactgtgatagtgtggcctcttgagtttgccttgctgaatcgatttgtggatcacgcttaccttgttctattggaggtagcaagtcatcaaggccgaatcgtttaggtttttgttctttttttaaaaaaaaacatttgtatttgatgcttttggtgctctcatgattgggattaatttgggttgcgcgggatttatttatatggcttgtgcatgtcagatttaacagatgatttagctatagttgatgtgtatactggtctgatatggatggtttagagttagctttggtgtgctgataatgtacatttagcgtagcttcttcatatttagctctgattttatttggatctgatattagtatgagggctgccattaatattatgtgtagagtagcatgggtgattttgttttagtggtgctggagtagatttttatgaggccatgacgtgtggttagaagtttttggacactttttcttgtgacccatgatggctgaaggggtgaatgggttcatggaatttgtatgtgtgttatttgttcatggtattaaagagtcattatgtatttttttattttataactgtaaataggcatctaagcatgactctggtatctgaatatactagtgcaggtgttatctaatcatacactggtatctcaacagtgttctctaatcataaagtgctgtcatctaagatctgaattgtgttatttaaataggttagttatatcatgaaatagtgctattgaaatgtgacctgatattgccttgttggctgttgcttgttctactttcttcaaattctatcagtatgttttgcttttcatttcctgcattttcagggatgccttatattctgatagaacattaaagaatgagtaaattatttttactctaaaattagaaaaattaacaagattttgagctctgttatacttgcagaggtacatgctgagtagcattttgtgctaaacaaattggaatgaattgtatgcacaagattcaattccagatgcaatggagctgcaatttttcattttcttaaatcttttatttgacttgagtgtatgattctgtccggggactgtgttgttgtttctctccctttcttcgatgtgtctgttgtgaattttacttctctctgattgtttactgcttcttaggatattctgcacttatgagattatgtatcagtcacagattaaagttagtaggaaaaaaattagagcttggattattgtatgggaagtgtctgaactagtcagtgcaactatagtctttatattgtgagctaaatttctctaggttatgtagattttgggaaacataggcatataagatttcaagaggtatctatatcaacattgagcatataatatccgaacataactgcataagcatcatatattgatatttatgctttaaatttgttcttgtgagaagatttctggttgagttcacgtgatgtagtcttgatcacgggattgttttgcttttctgagaagctttcttgtctctctctgatgttgggcttttatttgcagtctattaggctcagcggtctgaaaagtgtttgggcttgtcaacatggttgagatgttttttgggctctgtatggacttcttttgggttttggttgtttgttgggcttgtttttaactagtctttcatgattgattgtctatatttgtgggctgtttaatgtgctgcagtacaattatatttgggcctgagattatatttgggtttttcaactagtcttttcttattgctcacatgatctctctctttcaggctagctcccatactatcgtgtgttgcatcacagttccttctgaacatctcccttcaagatgacgtctcagaagaaactcgcgaggagaaagtgataaagcacaagccaacgattgaatctaaagtgatactcagatttatcggcatgccaaattacaggtactccctccgtcgcaaaatataacaacttctagcactcagaatttgtcctaaaatataacaacttctccactaacattctcttcccaaccaatcacaactctccaccaatccattcacttttcccacctacctccatttctcgaccaatcacaacatcttcccatttaattctacctactttcttaataattgtgtccaaccctaaaacttcttatattttgggatagaggtagtaactgattaatatcatttagtgtccattaaaaggaatatatatttttcaaataaatgtatttatattgaattcacttgcaggattaccactctgaaagaattcctggtgaaaaatcaggatgcacttgttgaaaaagtgaggctcttttcaaaggataatgtgctggtaccagcaaaacttggaagctcattattccaatgttgcatcttgcacctcattgcaaaccataagatgggagttagctggaacggagaatttgagctaactgattgggaaatatctgatgatatggtatctctaaaaaaggttcaccatgggcctttacctgatgactcaaaagttgcagatcttgagaagctggtggatttattggctccgttctttttgaagaagggctctcccttattcttcaaacaattgaaggacgatgtgacccttacatctagaacattggtcagtgctagtgattgggaatggttctgggattatcttggctcacatgtgttctatatgcctccagtcgctcgactgcatcttatcaaagacctctttgtggctatcaaaacattcaaattgacttgggtgaaacctttctccactgtacttctagattttactgaatttggtgatt

SEQ ID NO: 10152 - DNA, 6926 bp, Oryza sativa
ttggaatgaactttgtattaccataggatgttgctgtgaagatacttatggagcaggattttcatccagatcgcttcagggagtttatgagagaggtttgtttaactttttctttgatgcggtaaaggcctttgagcttgctatttccagtattatgtttcttcattcctgaaaaatagtattatgcttcttgaatgaatggctactagccacaatgtgttgtgccctggccgtgtttatgcatttatagagcatccccatccttagtactcaccttatgagtttcttctcattgttataggttgcaataatgaaaagcctgagacatccaaatattgttcttttcatgggtgctgttactgagcctcccaacctatcaatagttacagaatacttgtcaaggtatggttgtgatgtgccttcaagctattccgttaattatctcaatcatttgatagcaagtttaatgtgtccagcaagtgatgccatttttcattgcagaggtagtttgtacaaattattgcacaggagtggtgcgaaggaagttcttgatgaaagacgtcgcttgaacatggcatttgatgtggtattgtattatctcatattctcttttttgtgactttgtctacctgctttcacatgaacttttaactcccaaaacaagaattcatactatttaagtaatctctggttgcttgacaggcaaagggaatgaactatctacataaacgtagccctcctattgttcatcgtgatttgaagtctccaaatcttctagttgacaagaagtataccgtgaaagtatgtttcataacttatacacctgattgcagctagacagggtatgatagtatgttttatgagtgcatgagtagatgattataaatcacgttgatcttgctgaaattgtggtgtcagtttttgtgatggatatttgtgtgaacttttgggtttttgctgtactactgtactgtacacaatttttaatgcgttttaaatcttgtctttttattattattattatgttttccttgttaccttctgagcagaaggattgagttcttctagtgagtatttgataggcagctaactgataacggacagcacttctattattgaggtggggggtatttggagcttgtagtcatttaatgcaggatgcttctgcaaactcaataatatggataaatatatatttataggtcatgattttctgtaaacatatttaaggaagtacttacaaggactgctaagtgtgctaaaaaatgctaacatagccgttgacttgacatagtatgtgatgttcaggcatgtttcttttttttctcctcctcagaggttgtatctgagatgattgtgttagtgcaactattttgtggatcgctaaggtgatcgttttaaagattattaatcattatatggatttgtttgtagcagatctaatccccatttcttattcttatccacactacatgttattgaataaatcccagtatttttcacttacctttcacccttttaacttttgtaggtatgtgactttggcctttcacgactaaaagccaacacctttttgtcctccaagtctttggcaggaactgtaagtaccatttccattcttcagaagttcacccttcaatccctttttcattgaaaatattattcatctttggcttatcttgttctttttccatttaaatattagcccgaatggatggcacctgaagtgctccgagatgaaccatccaatgagaaatctgatgtctacagttttggtgtaatcctatgggaacttatgacaatgcaacaaccatggtgtaatctgaatcctgcccaggtaattattcccttctatctaattttttgtgtccatgctgatgaagtgatgcaattagtccttggtatcattcaatgcatgcataacatatttttcttatctagaagcaagtatactcctgaagttatgcagatcattttttttaaaaaaaaacttttaccattttacatgatgctatgtttttctgcaggtagtcgctgctgtaggctttaaaggcaggagacttgatatcccaaaagatttaaatcctcaagtggctgcattaattgagtcgtgctgggcaaagtatgcattgacccatctatttttgtatatgaatcaattcgcaatgacatgcgagactaacggcaattttgtctgttacagtgagccatggcggagaccttcatttgctaatattatggatagtttgagatctttaattaaggttccactgccgcagttgattcgttcagactcatagccatttgtatattgaagagtcatatcatgatttgccttgataagatcaacatggagaagtttttcaatatctgacttgcttatacttggataattctgaccacattatttggtgctaagaaaatggagtcttgatttacatttttcaagcaaaacaaaacgtacctggcaactcctgtccatggtttcaaggtatgttgctacttgcagagtttaccttcaatgtaaatatataaccaagaccttggattggtaccacatcagcgaattgagcttaaataaggttttggtttcaattgaatgcagacttgctgattagtgataaattgtatcgttcgcaaccattgaactggacagtctttgttatctcgtcatatccttcagtctcaattttatcgtattccccaatctgtatagacacattgaaaacaaacggatgagttaatatgtatcaaacggtgtctgctgtctaattagctgatccatccaatattccaattataatgtgttctaactcttcagtgcacatataaaatttgttttgtccaagctgagtgctgttgctgttaatatatctgagtgagactacagtaccgttgactttgggtgtcattatttgaatttacacggcgttgctgttttctgattctaaactgatagcattagttatgttaagcatggcagttactagcttgttatggtctggagccggggacaggttacggggtagtaactggccagaatgatatggatttaaataaaaaatatattaatttttacatatgtaaatttagaattattctgtccggttaccggttgctggccaaactaagttctgttcagaatggcttgtttgtggtgactgtcagctcataatagaacataaggatttctatgtatagttcaatggagtgtgtgcttgcctactgggtcacctttatttaagagttcgtaattttgaccttgttgctaattgcagatctgttgatattccttgtatgaacatctggttggccaagttatccatgagatgcagcacttcacttgtctgcatcctttactgatagagatctccgactggctgcaacctttgataagaacgtcatccttccctgtgttggtagctgaatcacatattggaaatgcatgctgggaggttcatcaaacttgaggatcctgactgtaaattctagtctctcctagatgtctatgtataatgttgactgcagttagctatgatgaaagtaaagaggtttttttttggcttatgtacatgtaagtctgttacactatcctagagcaggtagtactgtacatatgctgtactagtgctcctacatgtgtattgcttgttgtaatgcactgtgttgtttcatttttactaacatgtttagtttaatgctccgtttgtactacctgtggctgtgaggcggtgcaatatttggcggataatcacaggcggaacttgtgggttcgtcggaggccaaatatttggactgtctcgttgggcggataattgtgttccttgtcggccgccactgtccctcctcaatccggcgactccgctttccaaatcccccgcctctccaaatccgatcccgaatgattccccaaggtgaaggtgagtgctactcctagataataaccccggagtcgtcggcgattgatctaataacaattactactaagattgattgatcatgggaggagatgagagtgagagcgaggagtgggaggcgttggagctcttgggtcctcctcgactacgtcgccttcatctccaactccaaccaccacggcaacgccaccaccgccaggtccaagactaggaccggccagcccatcgaggtatccttctggacggcgcctccgccgcgcgtctcctacatgtgcgtccactgtcctagattggatccctacaagttcgccacagagcccaccatcatggccacggaggccgacctcgtcctcatccgcgtcaccattggccctcgcggcaactgctttaataccaaatgcagcgacttgttcatgtactaggccaccacccacacctcgtcgttgcgcttgatcccgcaccctgctgctgtctgcagcttcttcgaccgcgaggttggcctcctccgctgtggctcggtcaggcgtcgccatgatcccacaagattgggcctgcacgcccataccggccctgacgacggtacctacatcgtcgccgtgctctgtaacacctttcaatcagggaacctggagtatgccctctacctttaccgcgccggcgcagatgcttggacctgccatccactctcccttcatggtttggtcgatccaacatcatttatccatgtcaataccaacaccatcacggttggaggggaagctggcaccatggcctgggtcgacctcaaccgtggtattctcttctgcgaccttcttccctgcccatacacccctctgctcctccgctacttcccgctaccgccaccactcagactcagtgcacacaccaagctgacaggatgtccaaggtttagccacgacattgctcttgtccaaggtcgattcaacttcacccagatgcgaattcatgtcaagccaggctccatcaccaacggcacatacatctctcagggttggactcttgccacttggagtgcaccagccaccaatccttggaagcaagggtggcgccaggattgcaacctctctgcttccgatctctctgttgatgccaacaccatgaattttcagttactgcctaagctctcggatcaccaacagggcacacctcagcaaaccttggagagacttcacgtgggccatccaacgctcagcttgcaatccaatgacattgtttgcctcatggccaaggtcgaccaatgggacgaccatgcttgggtgcttgctgtcgacatgaagaacaggaggctaaaagatgtggctcagtttggcgctgaaagaactcttggcattagcttggtctacatcagcagtatgatatcagaatatcttcgtacggctccaggtaattgtttttcgtttttgttctacttgttccttcctatttccgtggtccgtccactgctaaccatcataatcttgcctgttttcacaaatagcaaacctgcaataagttataattgacaataataccaaacctattaaattgatgcacatgcatatatatatgtgggttaatcaattggaaacatctgtttttgtctttgctcacaagaacaagggacattgctgtagggcatgatgcccctgtttctatggcattgggtgtacatgatactccagttcaggatgctaatatttctctggtgttaacaatttacttgacacacctgacttgggaacaccttttctcagctgataaaacatattacatacatacaacctgagatacatgcaaataaatcattgaagggaatgggatttatgagcaatgcccagtaaaatggcagtacatatacgactgtaaaatggatgccttcttcaataatcacaaaatgttacatgacaaatagatggtggaaacggaaactgcatcatgaccatgtgctttcacagaaagggcatgtcacctaggttgattgttttgctttggaattttagagggaaagggtagatatgagagctactatttagttgtaattgagccggttttcactaaatattttgctggctgcaggtataaagggtaacctaaaacgacaaggggttgtgttcaccgtaccctctcacaagaagcagacccgtatggttcatctgtctactccctcttggaaaggtggagatcaacagaattctggaacaagtatggatgatggagaggataacatggacttggacttggacatgttttttggatgaggggcatggttaagttaagtgtggtgcatcttcagttaacttatgactagattatctactgttttatcaggtctatttatgaggggtactgctggtattttgtagagcagatgaatagtcttgtttatgcccctgttcgtttcttatcaatgtagcgaggttgtaaaccgtatagtccttggtggtgtcaaattgctcacaatttatgcatgtgtgccccctagtagcgttgggcgtcttaagtccgattatttttctgctgcaatttggttttctgtcaatgtgaaatgaagaatctaaaatcggcagactgcaatcatcatttgttatgtgttgggcaatcaatgattctgtttagattcatagaactccctccgtttctaaatatttgacaccgttgactttttagcacatgtttgaccgttcgtcttatttaattttttttgtgaaatatgtaaaactacatgtatacgtataagtatatttaacaataaatcaaatgataggaaaagaattactccctccgtattttaatgtatgacgccgttgactttttgaccaacgtttgactattcgttttattcaaaatttttgtgcaaatatgaaaatatttatgtcatgcttaaagaacatttgatgacgaatcaactcataataaaataaataataattacataaattttttttaataagacgaatggtcaaacgttagacaaaaagtcaacggcgtcatacattaaaatatggaggg

SEQ ID NO: 10153 - DNA, 18390 bp, Oryza sativa
ggcgtagaagacgctctggccgttgagcgccgggaactcgcccttggtggctttggtcaccgtgaagttggcgttgggcatcggcatgctcatgttcatgctcagcgggttgcggaagccggtgaacgtaaaaaagtcgccggtgatgttctcggcgttgctgccggccgggatgacgtagtccgtcagaatgtttgggtcgccggccatgaccagcgccactggagctgacactactgcaagcaccaccaggagcaagatggaggatgccattattgtatcaggtcagatggcctgaatcttgattaagctttggaggctaaatgatcttgctaataagcagcttgggttgtgcacttgtgcttgtgccatggagatgatgagcaacccaatttataagaagcttttctcttggccaggaggaattggaggaaccaatgctgccgtctgtcttttgtgcgatcgaaatggcaacactcaaggcttttgacagcttgctccttggatgcatctagcatcaaaattgcatatcctgcattcaattattttcagaatggagctggcataatacaatctgacttggaagttaaggatcatgcatgtgccaggcatcgcaaagccttcacttgagtaaatactggatgtttaataaaaatatctcacaagtagagtttagcgtcgaactagtctaatctatttgtaccacagtttacaaaatggcaacatcaagtctaaaaatggagacaaagaatgcaatatcgaatcgacttcacatctaccttgtcagcccccttgaaaccaggttcctgatgctttgcaagacgattttcgtgtgcaacatctcgcgataaacagcacacaacaagctaaaagctattaatagcttcatcgccaaacaaatggcttctaaactgataacagtactagcgaaaactagtaatacgctatcatgctccaccaaatcaagacgtaaaatgacatgtttactagcttctgatgatccagggcaggcacaactcagctgactttggaagaggcttaacacggccgagcccactgagatcacaatgcgtctgagttgacgcagaaataattcttggcataatggaaccgaaaacaccagacaaactgacacagcagtagcaccgtataaggtgcaatttaattgggcaataatcaagatagataccgagataacatcaccttaacaatgtgccaaaaatctcaaaacattcaacattactggggcaaatgaacacccacatatgtatcactgaataaacttaacagaacggcaacatcaggtctataagactagaaaatggataagacaacatcatgtgttcgttgccctggtgtaaatctgttggctgcaatgaaccgacaccatcctgataagccccctatccatcagatccttcatagccctcctagccagggacccattaatctgcaggtaaatatataaaatcttgttacccatactgagcaagatgattaaaattacctagctgtacaacatctaggtataaattacacagaaggctaaaacaacaatgatgacgttaagagttacattgccaaaagagaatatgctatatgttgcacatgcaaggggaaaagagcaagatcaaacttgccatactaataacagtagtttcaggtactaataaaaattcacaaatcaactatatagtttggcgcatggaaaccaaacaaacatgcacagaggcctaacaaatcattactcctttgctcattggcatcactcaaccacacaaaaatgccaaccatgacaccgaataccccaaacagtggtgattctgcatttaactcatggatggaatatcaatatcataacccacaaatttagcacaggagcctaaaattaaccacaaggtccttatcttcctgaattctatcaagtgggctaggctacatgactgtgaaaatatagtgaaaatctgaattggcgcgcataaacaaagaagaaattgagaatgtgagctaggcaaccagcatggcacagtattgttggtggtaatctaaatttatcaatgaattaccctgaggcgctcggagaggacggagggggtgatctgcttgtacttgggcacctcggagagcagcttgtcgtaggtggcctggtcgaacagcaccgagttgttcaccttctccttttgctttcccttgctccacttctgcaaaccaaacggaggcaaatccatgaccatgagaaaaccgaacaagccagatccgaataaaaccgaacaggaggaggaatggagatgaccttcttcttctgcttgccaccgccggacttggcgggcttggacgacggcggcggggccttgtccttcttcggggcctgagacagcaagcaagcgagagggtcagcacgcagccggcgatcgagcaaaaatggtgggagagacaaacgaggcgtaccatttcgacgacgcgatgcggcggcggaagaaggcgcaggcgaaggcaaggatggcggcgacgaggaggagcaggctgaggctgcaggtatatgacttgggaggtggggaggctagggtttcagcgctccgatgcgtttctggccgtcggatttgatctgatccggagtattattcatccaagtcccacacaaacctctaatactcgttaaccatccctgaggggaggactacgtagaatgttttcaaataagcatatttgaaagggccaaattacaaagtagcacagggagtcatagcagcggtggaatagaatcgagtcatcatcatcatcagtgggggagttgggagagagagacagtttcacggagccaacgaagcgaagatcctctcgtctcgtgttctagggtttctcgcggcgatggaggcggcggctagggctccatccagggcggcggcgaggttcgtgcagcgcaggctcttttcctccggcggcaaggtgctcggcgaggaggagaaggccgccgagaacgtctacatcaaggtatcttccttccatctctctccctctcgggtgcgggcgcgcgattcctgtctgagatgcgtatgcgctgtgatctgtgggctcgggttgagcggtgtgtggatttcacctagttccgcaaatctgggacttgagagagagagagtcgcgacgcggtctctctttctttcctgtacgagtccccctgcccgcaccgcactcagctctgggatccccaaatattttcggcctgcattgttgcagtgcacgcctaggaatatattatacgtctgcctgtttactgatctggaatacagttgagttggctgtcgtcctgcctgcgtccctcatccattagcacagcaatttatgactgatatatgttcaccctgtgccttgcttcacatatgctattgcggttgcaatgttgcatcaaaattctttcctgttagattattcttgcattttttttggcctaattgagacagattcttgcttgctacttgaacataccctgtttgatttacattattgagtagattgttgccaccgattatctacttgattatagggacaaattaaatattttgagaaatgaacttaacaaatagcttaaaacaattggtttaaggtcagttttatgtgggttttttttttcttcatgagaagcagagcagggttgttctcctggttttataaaaaagatcgttcaaatattactcattcaacattttgtacaatagtcaagctgttcttgttttaattatctatatctgtgatcttctatgccggttgctcaattatactcttttgaagcactgcagtagctggcctgatgttattctagtgatcctcacaaacgtactgctggcactgatttgttttctccattatgtatttgtactactgctgtttcaattggatcgttgctggcatcccatattttgcttggctttctgtggaagtgtgaatacagtcttatctcaggactgactgttgatgcttatgctttgtgatattagtttcttctttttaaggcatggcctttttttagttccttttgttctttgattgcctttaaggaccgcaaatgtatatctaaaagtacatttgatgctcggaattttgtaactctgcagacagatgtagatgttcttttagaatcaatcattgtttctttcaaatagaaaccttttccgaaattacccgctttcttaatcgttgcgaacttctgttttagaatgtatcttgacgctatgctaacaacatgcatggtgacttactgcagaaaatggaacacgagaagctggagaagttggcccacaaggtatgcaaacatattgcctctcttaaaacttgattgggcagtgcctttaatggctcactctcataagtcctctcagctttttttttttgtcatgcacaagagattatgcattcttttatatgttgtcatacatttataaaatttgttttcgttggatattcatgttttgaacttaatacaagctagtatctgctttgagtgggcgagggaaatgaaactgttctagttcttgcgcttacaatagatgtgagctactttcagggccccaacccaggagagcaagcttcaaccgcaggtgctgcggctaacgctgtgaagactggaagcggctcaacggagtcaagatctgctggtgtgtcaactgacaaaaacaggaactatgctgtcctggcaggcactgttgctgctttgagtggcctggggtggtatctcttgtcaaagcctaagaagtctgaagatatagtggactgaaggtggttaatgagatcctagacggtctgtcattgagtttcaccctgttttacttgtttagaaataaatgctgaacacactgcactgagtttcctatagcatcactaaaactttcaagtatgcacccgagatatgttctcagttcttcatgccctgttttgactgttggcactgttctctgatgctgcatccttttgattgaagaggaattcggatacaagatagtacatgaaatcccgttgtttctagtccttgtttgaaccaagtgttgttttaaatttcagcaagtgatggttttatttctttttcttgttttactgaatgatcattgagtcgtttgcgcctcaaaattactcgtgtttatcggattgacagtgatatggtgcgtggaccaggtttttgtaccaaattagatggctgtgactactcgtgcagacagcgactcggtagtcgtttcagatatgctgcctagtaggactttacaaagctatggttcgtgttactagtaaatggaaggcatgaagagcatgtttatggccatcatcaggcgttgaaggagctagtattgtgtcaaacaaatcatcgtttagatcatctacgagcggtggatgcaatatgcaagtatattttggccacgcatctctatattgcacaaatcccacagcagcagaagtagctctgtggtattgtttcataagggccacaattaaaaccgctaccatatgaaaattatcaaaccgctatcgatgagataataataaccgcaaatagtgagcttaactgcagttcaaactaattactccatctagataagctaggatcgatggccgcatgagcgccgtggagccggtgctccaggcagggaaaagacttgagttttagcgggcggttgaggtgatcgatcacgaggagtcaaggccagcgatcgatcccgatcacctccggctggtgacattgcctgcctgcctcgtgggctcgtgggcgcatggccccggcccaaacgaaacaaattaaagcggcccagcccttttttacagcaggtacaatagcagattataagccagctgcaaatatattttaacgagataaataaggaaagagaacagtagcgggctacagatttataggcagctatagcacgaactccaagacacagtgtgtgtatgataggtgggaccatgtattaatagtgtagtatgaaacttctgtatgaatgagctattagattggctaaaaatgaattggagctagtagttggctatactattaaacttgctcttactaatactaattattttattatttgatcgatcgagtacgcttttaaaaaacaaaacttactccaatctagtcattgctaggacgtgattcctgcatatgctgccttcatcccacacagttgaattctttagaggtgaccggcaaccatgtactatacccctataggtagataatcaaattattagtaaatatagttcgtccttaattacatgcatgtggtcgtctgaatctgccagtaccgacgaatcgacgacactgacggcctttcctgcctttgtttctgcagtttccactctctgactttaatatttaccacacgtttgcaactagtagcaacgcgaggcggcttccttaattttcatttctttttcttaaccacttaattactgatttctctctctctcttcttttgcagggaacttaattactgacttcatgcatatgctctcgaactaacagggaaaaaaaagcaataagtgttgctcaacacaaaacatataaactaccaaaatatgctcaatgttagatgtaattaaactaaataagtgctataagtgttgctatattattctataaaattggtcaaactttaatacgaaacggatggaacaatgctctttttaaacggaggggtagaagttaaataacaattaatattattatttttatgtaatatcaatggactaagtaataagtgtagtgtatgtgtagcagataaacaatgaaggaacacacagaagaaaaggaaaaaagaaaagcacaggcagataagatggaggaggcgaggagagttgcgtaggatggagtgattccaatgcaacctccgcctcacgttccgcggaatccccatcggacgcctcaggttgcgccacgcgtcacgcagcggggccagattcgtttcgccttccacgacggctcgtctccaacgatcgagcgagcggtcgctgataaaaataatagcacaaaatttttatttcatttatttatttctacaaaaacaaaggaaagaaattaggaagggcggagcgagaagaagctagacacgagaggcggggcacggtaggcggcttcccgaagaaatctcctcctcctcctccggtcgccgttcgactccgatcccgaccagtcgccgccgcctccctcctcaggtaccttatcctctccttctctccccctccaatcggacctctactgttccagacgcccgtcgaatcaaattcgattcaacctttccgatttctttccgtgattaggacgatccctagggccttttgattctttgcgttatcgtgcaatcttctcaacgtgcgatttaatttcttgcagcttggatcaaggaaaccaccccttcgattcattgattgatcgattgattgattggctaggcctctccaacaattttggttcccggaccgagtttaattcttgagcgctaggtggggcgaaggcgtcggatccacccatgatggtggttgatacggtcagcgccagcacttccctcgttgcccaccacctgttcgaccaaaggtccaaggcaaaccaccacctccgcgggactctccatgtggtctcctcccgccccctgcccactcatttcgccgttcgccgccttgtggcaggggcgcacaggcagcatcaacctcgcctccgggagtggcccgtcaaggcgctcgccatgggggtcaccaagaaggccagccctcacagggagtccggggggtccccgggggaaggcgtttccatggccaatattgggatcaccaatcccaaaacaacgtggccctccccggaccaggccgattgatcccaagctgcacaacccgctgctccggcttaagcgcatgggctgtggttggctcgaagtgatctttgagtggcaaggcgtgattgttgaggatgacgctgaattggaaaggcaggcatggtttaccctcgcgcaagaagagggcaagtctccacccctggcgtttgtattgaagaggattgaaggaatgaaaagcgagcaagcgatatctgagggtctctgctggtctcgggacccatctgagttaaggagattgtcctcacggaaagaggagatacgctgcaccctacgtggaactgccttttatcaaatgaggaatggttcgagggagtttatgagcacgcttgccaactataagatccctcttgccgtggccaccacgcggccaaggaaggttatcgaagaagcaattgacgctgttggcgtgcgaagcttctttgatgcagttgtggcagcagaggatgtgtaccgggggaagcctgaccctgaaatgtttctctatgcagcgcagctcctgagtttcatccctgagaggtgcatcgtttttggtaactccaattcagcagtggaggctgcacatgatgccagaatgaagtgtgtggctgttgcaagcaagcacccgatctacgagcttaatgccgcggaccttgtggtgaagcagcttgatgagctctctgtggttgacctgaagaaccttgctgacattgagtctccagagtttggcatggagcctgagccagagatggaggaggaggaggacgaagattcgtccccgtcaacttcagttggtgtagatgatttgttctggtaaggaagccagattgtaaatttgattgattccgctcctgcacatgtgtacgattgtcagtcaatagcaatgatcaggaagggccatatattccttctaatcaatccgtccgtagactgtgatatgtaaatgtttctttagaacttacactgtatatacactgtacctcacagataagggggaactgtctgaatacttgatggaatataaaccaaactgcagttcctaacaaatgtataactgggatgttagtcagttgcaaacttagaggattccatataatatactatgctactaccatgctcttttcttgaggcagtattgttttaccttttgatgaaagggaagttttttgtttggattttgggcaccaattcgattgcaaaattcgaggattccataataacatactatgctacttacatgctcttttcctgaagcagtcttgttttacacttgatgaaagggaaattttttgtttggattttgggcaacaatttggttgcaaaattagaggattccataataatatactatgctacatacatgctcttttcctgaagcagtcttgttttacacttgatggaaaggaaagttttttgtttgattttgggcaacaattagtttatcgtcaagaattatcactccttaacacgagcccaaagcgaagaattattacatgtgttttgactgaatgattaaaatccatgtattagaaggctaatatctttgtgttttggcgcccaaagttaatacccatgaaacttttgaccatatgcgaatattcaagcatttttaacccaaggttaatcacgtaattgggttcaatgttgtactaatgaaagtttgacttttgagacaggttaatatttaggaatattgttctgaacaggttcaaagctaattacagtcataaagttttgggctggacataaacattcatgcattcttttccaaaatgtcaggcccaaggctaaaaatcacaaaagttttcgtcctatgattactatttaataattttcttccgaacggacccaaggctaatagttatgaaattttgggggaaaaatcatgagtttcttgtcctatggttaatattcacgacttttctgcctaataatcccaaggctaatacccatgaaaatttggaccacaaaaaatattcatgcttttttttcaagaggttaatattcatgaatttcggcacaagggtataacacataattataggccaaaggctaaaacacaacaaaaaaatgtttccaaggttaatattcacgaattttgtgcacaacaatcccaatacaaaatactaatgaaattttaggccatagaaaatattcatgtattttattccaaagttcatactaatgaattttggctagaggctataactcaagaaattatcggtcgaagccaaaaatcacaaaaaaaggtactacagataatattcatgaattttcttgaaacaaacccaatgcgattagtcacaaaattttgggtcgaagaaaaataatcatgtgtttccaaaggtaattttggacgaaagctataacttatgtaagtataggcgaaggtaaaaaaaaaacctaaggttaatatccatgaatttgttccaaatgatccccgggcaaatacttgtgaaattttggactgaaaaatattcatactttttttttcaaaggctagtactcatgaatttcgaccaaaaggctacaaatgagaaaattataggccgaaggcaaaaaatcatttctttcccaaaacttactattcacgaattttagaatggcccaaggctaataattgtgaagtatagggtaaagctaaatatccaaaatgttaatactcattcattttcaccgaaaactataactcacgtaatccgaaggctaaaagtcatgatttttttttgtccttcgagtataatacttttattaaaaaaggctttgactaaaaattttaaacagaggactaatagtcaaattagtcaatttgttaggcttgagtttcctactcgtgaaatttggtgttgtgtgtgttcttttctcgaagggcaatttaagcatttttgtgttattttatacttataaggttaatataaggcttacaattgtgccattttttgcctaataagattataatatggtagtaggaaatttcgtgcacaaggcaataatgatgcatttttaggcatgtttgtcgagaaatttgccatcgaactgtgtttagtttctgaaattgaggagaagtttagggaaagtttgtagtttaaaaaaaaagttgggagtttatatgagtaggaaagttttaaatgttatggaaagttgggagtttgggggaagtttggtataaactaaacagggcttagagctatatacgtaatgagtcagtttgggatggcatgtacctattggatcgtgttgtatttacggccagcttgatgtgcctactctttgattgagcaaaacaatactgaattctccgtatacgattaggaattacaacatgtacaatgattattattgagtaatgaagcggtttgtgtattggttagtctggccgcccgtgtgcgtgcgtgcgaataatgaaggaatggtggtgtgaggatggatgcaggaggaaaaggctcctcctcatcgtatcctggccgtctatccatttcggcatttcctcccacggggaggggaggggaggcacgtgtggctcccacgcgcgagcgtgccagccatatgacggtcgcacgcgcgagtcgacccctagctagctaggcatttggatccacacacacacccacacgcgcgagcgagatcccgatgcagcagcagcagcaggcgatggaggaggatggggtgaaggaggaagaagaggagtactacttggaggaggaggacgagggggaggaggagactcggcccccgcttaatcatcagcaccaggtggggttggggctgcgggggctggcacaggaggagaacgagcggactaagctgcgggagcggcaacggcgggcgatcactgagcggatcctggcggagctccggcggtacagcaactacaacctgcttgtgttcggatgccttaaaccagataagctagtccttaaacctcaggtcaagtgtggcaagataaaacacaggaccaaaatgagctcatattgcttatacggtttccaacagggaaaacatcctctgcactttatggatgaacccaacaaatcatcatcaaatgggtactgtctggtaccctaccttccacttttaatttatcttaggcggtctgctctgctatgtttaaagctggctggcaggcagctgagcctgagctcagtgagctggaagccaagtaccggagagttatttaccctgttcctttcattattttatttatttttgacgtcataaataggtcgcatccggtactgtaggagatatgttttcaagtgatgatgacaaaagcacccctcataactcatttatgagcccttttcgcctcacggagagtagatatatattcattattattttaaatcaggcttccgtatccaacttacggagaagcatatgtttgtctggaaggacatataacgctgaaattatagagacggggtatttcatattatggtaattttgaattaaataggtacataaaaaaagacggagcattacagcttgcaagtaaaaagacaggccgaaattaaagggctaccaccgtccaaattaagcacacaatatataaagatcgtttattagaaatgatttatttagaaattaaaattgaaagtttggtgaccgtcggtttgcacatgagaccgaaaagagaaaagtggcaaattcattgacgcacggccaagggcaagggcgcgaggcaaaggggaaaggtggttgggaaacgtccagtccttctctcgtggcctccgtaggcttcccttccctggaaacgcgcgcgcacactcccaactctctctctctctgtctaatcgttatatttacgagttccaacgatcgagcgcctcccctcgcttgggctaatcataataatcatgatttcttctcctgcgctcttcttcctcctccagccaggccgcccctccatcgccgcgccgccgctcccctcctcgccggcgcctcccctccgcggcatctccatctcccccgtcgccgcccgccccatctcctccctccgctcctcctcctccatcaggatcatcttgccgccgcacgccctccccgacccgctcctctccctcccgtccatggacccccaagaggtacctcttcttcttcttcttcttcttctatcagctactactagtacgttacgtacgggcattcaacctagctggcttcactgcaggtgcccgatctgctgcccccgcgcccaccggagcgcgacttcgccggaacgccatacgtccccgtctatgtcatgctcccggtaggtacatctctccttccattcttttcctcgcaccacgccgctcgctcttatgtatgtatgttgctgtctgtagcttggagtggtcaatggtaatggcgaggtggtcgacgccgacgtcttggtgggccagcttcgggtactcaaggctgccggcgtcgatggggtcatggtcgattgctggtgggggaatgtcgaggcccacaggccgcaggagtacaattggaccggttacaagcgactcttccatatgatcagggagctcaagctcaagctgcaggttattcctccactccacattatattgtcatgcatgtcaccctttgttgttaatcatgttttggtgtttatgcgcatttcagatttcagtaccgtgctaatacaggatctattcatttatcctctccaattttaccctttctttcatggtgtttcttttaatttcttgtcaaaatacttacttaggtggtcatgtcattccatgagtgtggaggcaatgttggagatgatgtgtctattcctctcccacattgggtaacagagatcggaagaagcaatccagatatctacttcaccgacagggctggcaggcgtaacacggagtgcctttcatggggcattgataaagaaagggttcttcaaggacggacaggggtcgaggtattctacccacttctctaattacgcaatccactaattcttaatgggaagatcacaatccgttgtgtttatgtgtttatctgtttcatcccttattgatttaggtatactttgactacatgagaagcttccgagtagaatttgatgaatattttgaggatggtatcatttcagaaattgagattgggctaggggcttgtggagagttgaggtatccatcttatccagcaaaacatgggtggaaataccctggcattggagaatttcaggtaaaacttcacccttcacactctgttcttctcctgcgttcttttttgggttcaatatcctatcttaatgaaatttggtcggcctaatccttccgtcgacccagcaatttttgggttcaatatctactcattgatgaattgacaaccgtcacttaatgatctgggcaagagcaccagattcaggctatttacccttgtaaagttttctatttacccttgtaaagttttcttatacaacaagagggttcacttgagaatgtattttgctgcagtgctacgacagatacttacagaaaagtttaagaagagctgcagaagcacgaggacataccatatgggcaagagcgccagacagtgcaggccattataattctgagccaaatctgactggatttttctctgacggaggagattatgatagctactatggtcgttttttcctcaattggtattcccaggtgttggtggatcatgctgaccgtgtattgatgttagccaggttggcttttgaaggttcagatattgctgttaaggtcagttaacttcttgttgttaatgaatgaagtgcacaactgttttcagtatttgaccattcttctgggggcacgtatccctgtttccagcatcctaatcctataggtttgacatcaagcttggtttacactttgtggtatgacaggtttcaggtgtacactggtggtacaaaactgccagtcatgctgctgaattgactgctgggttttataacccatgcaaccgtgatggttatgcctcaattgctgctgtcctgaaaaaacatggtgcagctttgaactttacatgtgttgaactgcgcactatggatcagcatgaggtatttcctgaggcctttgcagatccagagggccttgtatggcaggtagggaactttccatcatcctagccatggttgctgttttgctttctcatctacctggtagcagcttagtaggctaatgtattttttttctgtttagctgagaccagctatcttgttgttatgtcaatgccttatcaattggacgtatcgattttcaggtgctaaatgctgcatgggatgctggcataccagtagctagtgagaatgctctgccttgctacgatagagatggctttaacaaaattttggagaatgcaaagccactgaatgatccagatgggaggcatttactaggattcacgtacctgaggctcaccaaagtcctcttcgagagagctaattttttggaatttgagcgtttcgttaagagaatgcatggtaaggcttagcagaccatgtttactgacagtggttccacctgacgtaaacctcagacttatgaatcttgtcatgtttgtttgcaggtgaagcagttctcgatctacaggtataagttgtgttcagggttcttacatacatacatatatatacatgccattgtaattggcataggccttatggcttatgatgggggaacagagatgccatttttgtttcgtaggttgttgtagtataccatcagcagatttttgaactatagagggtttggctccatggtgtaaagcatacccttggcaaagagttgtcatgcagaaaattgatggtttcattcggaatgaggttggaagcaggtgtatttctttcgatgcggcagacatatttgatttgtcatgagatgaggattgggtgagcaggtggtatccttctgaaagatttgaggctgtattgaagagaatgtgctgatgcatgtttatcatggagcaagcgacattaatggagttagcaaaggttctcgcggtgtatgtgtttgtatttgttggtggaatgtcactcgaggatcttggctgtatacaatacatacatgtgcttttttttgggtcttttctacagtgtatgagaaatgcatgtttcttactgtcaaaacattgcattgctcatcagtaccgagaatttctctgagttttccccatattttacatgaatattttataacaacggcttacaattcctctagaaaacaatgttttcttctttctagtgtgagcatacaagttgggcacaaaaagatgtaaaacaaaaggaaaagcgtacccaccactaggcagatatacatacaagagaaatatggacagcaaaaaatgcgtcggtagataccatgaatgaataataaggaagaaaaaataacagcagaagttgaagttgcatatacataaaaaaataaaaagagatgatgaaaaggtgcataccagggtaaggaaaggaagaagaaagaggatggaatggaatgtacaggcacagctagggagaaggtgagctgcgcagcacaatgtggcctgactcgtccctgtcgaagacccgctcgatgaggtcgttccagctcatacgctgcctggccatcgctgacaccggcgggaagctctcgcttctctccggctgctcgccgaaggtgccgtaagccgacggcgaccgagcgtccggcaccgagagcgtcacagccctgcgcagagctgccttgtgctcctctacgtgctccctctgcaggctctcgttcctctccatcctctgctccgatggcacctccattgtcttctccttctcaagcatcaactgttcatatgcacagccatggtcaccatcagacatttaacaagcaacttgcaagatgaatctaacgacgccgtctcaaccacaatgggatgtaaaaacgcctgtgctacatgcttgtaagttgtaatccacagaaacaaaggttggcaatatacggtttcttacatccaacgccttttgtgcttccctctcgatccaaataatggcatggtccattgtggcattgcaggaaagaactatatgctcaaatctaccatccacaggcacagctgttttcaccactggggggtatcttccacacctggaattcaggaacaagttcgtttatgatcatgcttggaaatctctattgtaacaaaagagtagtaatctgaacaagacaaaacattaataaattatcaagaaaaaccagatcaaattaattggtatacttgatatcatgggacatcagtgtattctagtattgactgcatggctagcggtgttagtttgaaatagctgaattagtaatttaatacggacagcataaatggaatgatatgttatttgcacgtcctcttggcacaataaagttcaacaatcaaagctactagcatagcatctcttctatgtctaatagacctgactactatcaaaatcctaccaaacaagccattaaccttttaatatcagtacagtcagcaaattatatatttcaagaggggcctcaagatatttttgagttgtaaaacaccaaacaaacaagaaaaaagggagtacctgaacatttttctctctacaatgtgatatatccgacctggtgcataaagcctccttggatcttttaacatagcatcttcaggtatgcaagtgtccctcaaacatctgatacacagcaggcagggcaagctgcccaaaaagaggagatgatccaagtttaaacttgtttgaacccaataagctggaaggagaaatgaagctacatccaacttactgcatagcattgctacaagcagagaaacagaaaaaatcggatcaaccaccccatcccaaactaaatgtcattttctatctccacttttctaactcactggtgcatttgcactgtccatcagatcctctatttccttcctcaagtcatactatacatatcagctattagctgctaattgcttgggtcaagtcagatactagctgtgattactgaagtataaacagagaaactttctataactttgaaaatcacaagtaaacggcatcaacttctttaggtccctacaaagctcttacatagacatccaacaagaaatattgtgcaatcgcataagtttcaggcaattattagccacacaagccagcttaagtaataactacatcagttagcaaatgaaacaatggatgagcacatatgttaccgatctgcctatggaagccatctcgacaattggaattaacaagcagaaaggtagtgatggtatttactgtaaaaggaaaattaaatgtgactggaatcatatatgtgatagtgctgccttgtatgaccagtgtagaattgtgtaacgctacttttgtaaaagattggtgggcatgggcatatatgtaccataggattgacttgaaaatgtcttctaaaggagtggctgtccgaggcaagaaatcatcctgtcaataaggagctataattattttgttgagacagaagatgaagaatgcagatcaagtgtgatgtggtaggaatggtgaggaggaataagcaagtatagcaggaattgaaaaggg

SEQ ID NO: 10154 - DNA, 16689 bp, Oryza sativa
aattactgccttgtcacttactgatgttctaggactttgtaaagttgaattggcttcatctgcaattaccttaactggttaatttcttctgtatttttttccttattctgcttgcaatcttatactctcgacttggtaatacattagcggatgcatcatactgttgtatcttcatgattgactacctttctaactacaagttgtaagttgagaaatgcttcgtggcttgtaccttacagcagtcttatctcattgtagtgctaaggatggagcaagacattttgaagttcattcatgaccctacgcagacagagtttgacttccatggtcttcctacttcttacctgcgtcttgctgcacatcgtctggcacagcattatttcctccagtcaattgctctacaagataacggccttcctgatggatctggttctcgtatcatccttcgcaaaacatcagctgagtgccggttgcctgctgtgcgcctatcagatattcaagttaatctgcctcaagatgagagcaactctatagccaaagttgctatcaagcaaagacctcagaagcactaccataacaattccagttcaggtgctcactcttctagagccaaccttcagaaaagtgttgaagaaagaaaggaggaatacaataaggcacgtgcacggatatttaataacaacagtagcagcggcaatgctgctgatggaagaccaggtgatgaagtaactttgccaaatactctccataggtccagttccttggagctaagctcaggtaacaggctaggtgaagggcctgaaattacccttgaaaggagtttgactactgcctcgtctagcagcagggtaaatagaaacaagactgagaaggatcctgcatttaatagaaacaggcaaaacaacagggtggcgatatttcgagaccgtgagtcagatcgcaaggatcctgattatgacagaagctatgacaggtccgtttaacgtaataaactttatttttgtaactctttagctatagaatgttttgccattccaccgtacagttcctatttattattggtgaaccatttagtactctcaatatttcacgtgcatcctaaactatcaaagtagctcatgggtgatctatgcaatcatccatataagcatttcattcatataactattagattgcaaatttaaactctaattctaagagaagcttgtgtaaaacacatcaacaggaggtaatcatgtgataatatgttaaagatacaaagaacaatggggactgactttcaaaccaaaatgtaactctattaaaactacctgttgacttttttgttatgtcagtgaagacaaggactgcccttttgtatcaagccaactcatcatgaatggctttacaggtacatgcaaagatttgatcctggatttggatttaatggaggttcatacactattcaacctttgtatgcccctgctgttaactacaacactgagttccctcagcttgggtctcatgggtctccagttcctgttgaacagcagcctcagtcaatagcacagcatattcctgggccctggtcaccggctcaatcgcctaatgcgattgggtacagacctccggatggttccatgccaccaccttacagtcctggtcatgctggtgctcccattaggtcatctgtttttatgcatactccccaacaatttgctatgccttcacggccaggagtcacatatgtacatccacaggaacccatgcgtccatttgcacaggtttgtatccgtactttagatccttgtcgcttttctcattgttcaagttgaattgatgtactacaagaaatatcattgtagaggtgcgtgaagttattgatagttcaattgttcatttgacataggatttactacctctgtcccaataagacttcacttttatacacgaacctagacaagtttgcctgtcctgagttgtgtctaaaagtgaactcttttttggagggaaggtagtagttttttcaaggtacatttttgtgacatgagacttttattatgtttatacacatgtattattgcacatacaacatctattctgatatttcttcgatgcaatttatagattatgcattaacactcagctgatgtgttcctttttcacttgtgcagactcaccaacaacaacctgaagctagtttgcgcttagcccggccccgatgaggggcctgggcatgcctgcaccctgccagcgtgccctgaatgtgtaaatcggatgtcatacccgattcatttcttgctggtagatggtagcaggcataaaagaaccgagaactacatatctgagctaaacaatccacttgatcttgttagcttgtggttcttggtgttgttgcaccctgcacattcaggtgcaggagaggcaccttcttcgtcctggaagtaaattgcagactgttgcatacgggacctcaagtccaatgcatagaagctgagaaatgaaggggagagcagtcatggctggcatgatcggtgctgttctgctgctgttccttgcagttcagttttgagattcaggaggggcacattgcccccttgaagtcaagcactcagcgcgggtgatgagaagagaatcggcacaacatctaatatgtggatatttattcaggacgtggttagttcaattcttgctgctatttgttttgcttattagcatctttctcgctgaaagtttttctcgactatttgcagctgcttggtccttgtcgcttgctgaagcttcgccttcgccttccacctgaagtggcgtcagattgactggaccgaagatgcagcgctgtagtccccacagtgaacctaagcccctcgctgaggcttaatcagtgtctgttatagatcattgtagttgtagttgagtaaccccaactttgtaactccactctagtaagttaaaacaatgtactaagctcgattgccaattgtactagtagcactatatgtattgtcgtatggactgggatgtcgcagttactgcttgtacagtggagctgcgtaactttaacccattactacagctttatgccgccgattttattaggtccctttgtgttctgtattgaaatgatgccatccttcctgcctgctactcacaccctctccatgtttgttctggtcatagggaggcagccagcagagacgaacaagcagaagagtcaaagccaaagcaacaaaaggaagggaaagggaaggagatggaagggatgcgatgccgtcatgatagctagcgaatctcgtggtggccgggcctaaccttttgccatcattttccttccacggcctacagaatccagcatatctgctgctctcatgatgctcttgcactgcctctgccttgcattaataggctcgctccgagggctggatcaagtgaaatgatgaccattcgagctgctcacgttacctatgtcaattctgcactgctgctccttccttttgcttctataaataccttaccttgtgctgttgctgcttcaatcttcagttcttcactagcaggagctggagctagagctgcatccattccgctcacatcgcagcctcgcaaggaggaaggaggtggtttcttgacttgatgtaagatgccctctgctttcctttgttttctctatctcaatatatatatatgctctttgttacataattctccctatcttatgaactgcttgtatatatgttgcgatggatttagtaagatcgagtgaggagggaggagatggagaaggtgaactcggagcttgtgctgcagaactgctacatcatggagcagaaccagaggctgaagaaagcggcagagctgctacacaaggagaggcagaggcttctctccgagctcaaggcccagctcctctccaaccagcaccgccaacctcccgctaatggacatggacatggagacgacgacaagcccgccgccggtggctgtggctcttccaactagtgtcattagcctttataataaaacatatattccgcatgtgttttcctttgcgaggtactccagtacatgtcctgttaactgggtaggagtaatatggttagtgcatcatcacaagcaaatgaaccaagagctctcctaacgcttactactcttgagacggctctatgtgttagcagtacaatgttttggcattttggcgcctgtttatctaacgggtaacgaccagtctgtgtgctgcactgtttgttgcctatgtggaggtgtgaaactgccctcagtttattcatgttctgctggaaattcccaattctttgtatgcaatttgtttgtgttccatttttctttcttttagaaaaaaaccgagcattgtgggcctgatctgtaggtggagagcccatccaggcccagcccagtagactggattggcctgaagaagccatgggcgtaagctaagcttgcccaagccactcgccgatgtcgctcgcccctcctccgcaactccgcgctttccgccgcgatggcgacgcccccctcttcttcgccgccggcgagtcctctcgcgctacatctcgatctcgatgcgggaggaatctagtctccgtctcctacggtggcttcgcccgcgcgtgctgcctcttctccgccgccggcagccgcagccgcagcaagcaggttcgtgcacaacatctccaatcccccccccccccctctgattgattgactgattaccttgccagttgaacctattagctactatcttgcttgcgccgaaatcatacgatggtgttgaagaaggagaatcatagaactgactagccatccctgcctggattggatttgggcgagggattaacttggccaaaccccttatctagcttggaaaattaactagtgggcttatgtgatactccgcatgtgttgattttttttcatggggagcattacatccaggatggtgattgttgatgtgataatctattaatcttattatatgaacatttaccccgcaaaaacaaaaaaaatctcatgtgaacatttacaattagaatggtgattgttgatgtagtaatcttatatggtatgatgacgataatatcgtgctaaaccaccaatccgattgctgtcgaactgtatagagtcataggattcagtggttctcttaatttggcatgtgatgataggcatgcattactgcaataatgccattccacataggattatctgctgttggtttgtgtgagaatccaaaattactcttgattcttcaaagttgataggccaacagaatatcacaataacaaaccacaacattttttcctctcaggatgaagctaggaaagcagtggaaaatgccctggggtggaagaagacggggcttccaaaattgggtatgcgaattgaaagaaggcagcaaagactgcctccttcagccggtggtggaggatggtctggaggaggtggttggttcaggtggttcagcagtggaggtttctgggatgctgcaaaacaaactcttcttacgatcgtcggtattatcgccgcggtaaagacaattaatatcctgcactttttgtatgaatgagttgtcaacctagatgtatttctaactgctgtgcaatttctttgcagtttttcctgattgcaaacttcaatgtgctggtagcagctattgtaaattcactgctggctgtgctgcggcaaattcggcgtgcactgtcattcgtagctcagtgtattcttcagggcgtacaatcctcggctccgaggcgatcatccccttctctagacactggcaatcaggccgctgtggttgtgaaagatagagttggaaagtcagcgaaagagagagttgtaaggaaatgggggaatggcgtataacacagatctaccctgtcttatgagccgcataatttttgttcttgctgtgttgagcgctttgcgaccaccataacttgttctatgatcttgtttgagaagaaaaaacgataaaaagaaagttatgatgtgcctctgcccaaatttcattgtagtttctccgctgttgtctaggagagaatgtcttgggggttacaagtacgtacgcagcgaacaactcttcatccgcaattccattccgatccgatttcaagccatagttaccaatgaggtgaggtgaggccctcaaaatagttttcgacccagcaacttgttcatggttggtattttcttaatttccttttgatggggccagtgtaagtatatgttgttaactttatttgatttttctttaccagatccggtatgagaagcttaggattgaacacagtagagcatcagaggggtggtcggagtttaaatctccgacctccttggctgctctaagaaaaccattccaatttccaagcgctatgctgttgttggacaagccatatattaactctcgtctccatccatggctttgtccagccatcgtttctccatgttaacaccaccatggcgataatgctggctgctgggatggaagctggcaccatcaccagatgcaggccaggtctgatacaggcaaccaaacaagccctttgtgtatcaaagccaaagtggtgcattttcaggcttatattgtcctgaaaacaccgcttcaacggtgtctgccccttttgaatggtttaaacaggaatttgtcaactgatgaagccgccaagtgccttaactatgatcgacagaaggagctaacacagatgaattatgcagcatctgatcaagtctacaaatatttttcactgcaaactgacatatggaaacaagcaccacacagcgtttacaccgcaaaggggcgtaatgctagcgtatttcagattcagcatagaactgcccggtttccagaaatgttaatcctcatcagtcttgccatgatcagctgcatcgttttgttcttgtggcagtgactccttatctattttccttctcttttcagctttcttttgggttgtttctgatctccgggcggcatttttgttcctaaattctgaaagaggcatggcacaaatgggggaaaaaagcttgtgtaaggtggatagatagacacaattaaaggttctgatagacgaacaaatcatctctaaatcagaaaggatcaaacagaatgctgtgagaccccaagaaaattgaagtgattgcagttacgtacatatagtaactaatggaattgctcagttgtacgaatattaaagttcagtaacctatattattgtaaacactcagatctttaaggcaaaggactaaaataactaagtatttcactgagtagaaacatgtggcacttcatcctacatttgacatttgtaataccaaacactgaatggaagtagacaatattgaccttgcaaagaagtattaaggggctctacaaactcagggaactccatttcatcgagtgccttgaggacatcatcagcgttgatcgtctgcctctttgattctttgcacatgtcattggcactgcaaacaatttctataagtaaaggcgctgcaaataaaatcatcacgaatacttacaaagaggtatggtactgcagtttgattctaatagatctacacaaaaagtcttcttttttaaaaaaagaaaatgttcacgaagggaagaaaaatgattcttatgagtttgcctgtaccctcaagtacattactagagttaagaaagtttatgaacaaatgcagatcgtggatcacctgcaccatcaaatgtcaataatttttttcccaaagtaatgtcaagcaattctggccatgagcataaattcacttagctttacccagcgaaataaataaattcactaatagctttctcccccaaacccctagagattaaacagaaacatgaaatccatgaccaaaaacgtgaaagttatactatatcagtatgagtatctatattcatagtccatatccatagatagaaggaagaataaggcgaaggggggatggggtacggacgtggcggagaggtagtggatgaagatgcgggcgctctcggcgaaggcggacatggcgtccttgttgacgatgacctcggcccctccggcggcgacctgggcgagcttctccttcactaggcgccgcacgatggccttgggcagctcctccacctccgcctccgccatggacgccgccgccgccgcttggcccggctgcttctcaggttgggaatgggatcccccaccttcccccgtctccccagccatctccctctctctctctttctcaggttgggaacggtggtgcagcggcgattcgacaaggcaaaccctagcctagtgaaaaattgacgagtcgcgcgcgctttgtctcttcttcccccctcccttcccgcgctttgcttctgcttgagttcgcactaccaaaacaagcaactgtccattccattttcatttcgagcactaaagaatttcagttccatttttcactctaaaaacacactccaacaaatctaaatctaaaccacaattgtgaaagcaagatggtgtctacttccggttccgggtcgagattatgcacacatcactttgaccagtcaccaggactacatgtacagttgagtcggggacacagaaaaagggagaggaatcagatgggccaggaaagaggagagggccatgaacacaaagcccatgtcagaccaattcctattttttaaaaaaaattagacaaaacatggggtgttgcgagaatcgaactcgcgacctctcgcacccgaagcgagaatcataccactagaccaaacacccgattcgaacttttgtctctggaacatttaactgacccaagcattttacaaacagtaagaacagctactacgaagaacaaaatgtgtttccccttccacaggtagtaagaggtaactagtcaacttggaagtaactcagatggattcgcggtcaaaaagtgggtgagtgttactgatgccagcaacgggccggtttcagcccacgcaaatgtttaaagcaaaagcaaagcccggcccaccataaaccctagctctctttctagcatggacaggaggacaggacccgattcctcctccctcgccggcatataagtagccgcagccgccgcctccatttcccgaccttgctccacacccgcagcagcagcagcagcaaggagaagaagaagagccaagatgcagatcttcgtgaagaccctaacggggaagaccatcacgctcgaggtcgagagcagcgacaccatcgacaatgtcaaggccaagatccaggacaaggaaggtacgcttgcttagcatttagcaatgcttcttcttcttcttcttgctcggtctcttttgcctgcttgattgcgaatcgatctgctccgcggggcctcaggcatccctccggaccagcagcgcctcatcttcgccggcaagcagctggaggatggccgcaccctggccgactacaacatccagaaggagtccacgctccacctcgtcctccgcctccgcggtggcatcatcgagccctccctccaggccctcgcccgcaagtacaatcaggacaagatgatctgccgcaagtacgctccttctaatttccttctccttgaatgctcgacttttgattatgcatactcctttatatgttcctatagtttattatgcttatgatatgatgcttgccttgtgagggttggatctgtggtttgtaactctatgacgcgtggcattgggttccccatgggtccagagattgacaacccacctatactttgtctgctgcctagcctatttcggtagttgattttcactggtgggacatgttaaatcattcgttgtcataccacatggaactgcgtagaagattggcaggaatgatgaatcaattagatgtgcgaagtctccttgtgagcttaacttttgaggcatacattctgtctgacctgccaatcagctcatctatgtttcaaagcaagttgcttttttttgtcatttgtttgtgagctttaccatatgttttgggaagataaaaacactacttttcgacttgaaatttcaagtgagctaacctatcgaggcacatttttcattttaaccatcttctaggatgtattattttattcaattaatataccctgtgttatcttattgctaggtatgagtgactcactgactcttagtttgtgaagttctatcatcaagtattttgttgctgtgtccagcagtgccatgtagtatgtatgtggaaattagcagattggctgggatgatgaatcaattagatgtgtgaactcaccttatgatctaaaacttttgaggcataattactttctgacctgccaatctagtaacattcaaaacattttttcactgtgtttggctctgatgcttggactggcatgccttgccagaaagttagtgtcatttgctaatgttatgccagtagtaccatcatgtattataggcacagtagtgctgcatctgttttcctgatattgctcccttttagggtagactgagttcagcatgtgaatacatttcgactgttttcttgcaggtgctatgctcggctgcaccccagggctgtcaactgccgcaagaagaagtgcggccacagcaaccaggtgattatcattgttctatacaagcaagtgatttagatttgctgtttacttggcaccaatgttctttagtaataggagcaacagctaagggcaccattagattttagaatttgtattgacccttgcaatttagagcggtgcaagtctgctgctctaattatgtttgaagtagtgtagtgtgttgagcatattaggtttacatcagccttagatttgtgattttttttaatactgttgtgagaaattgcacttgaaatgtcaaccaagtttagtatagcttgttgacaagtattctatatcctcgccgaaatgcgtcttatctactgtagcatctaacgtgctttcaaattcctaccctttcagctgaggcccaagaagaagatcaagaactagagtttgagatatcatttccgcggatcattgaaatcaacaggaagatcagagtttaagtttttttgtagtgtaatgcctcatgttgtatgccgaactttctgtttatcctgttgtatgttaaccttggttacgctggagagtactccagcttattttgatgacataattgactacaaagtcaaggttatatggcccggccttaatttttgtccccttcgaagtttgcccctcattgttgtttgtggttgctaccatgctgtgatctgaattcaaattgtaagtttataaccgggccatctcagttactacgtgtgattcgtgtgttgtcaagtggtgattggctacacagctcttgtggtacaggctgcagattggaacgcctctgtcgttttgtttgatgaatttcaaggcagacaaattccttcgttatgtgagtgtctactactcatgtcctggaaagttgaaatagacttttgatgatatgacttgaagagcgaagaatctgcactgatcagaaggaaattaagcagtactcgatcgtttattttggagagcacttacattacaatattgcataaacattacagcaggaattaaggcatgattcggatttcagaaaacatgccaaaattaaacattcatttcattttatttgcaaccaacagatcgaaggtgacgatggtttgatgaaaacacacaacagccatgagctccaggttcaggttcgctcacaactcactagaagtaaaagtagtaggaggctgcgaagcaaagcagcagggtgatggcccagcgcgacggcagcaaagccgcggcggcggaggaggaggaccccggcgagggcctcggcgaaggcggcgcctggtcttgcttgagctggtcgacggtggcctggtcggtgtgcatggacttgtcgaggatggtgtcgtcgatgccgctgccgaagagcgcggcggggagggagatggtgccgggggtggcgctgccgaaggcggagaaggcgcgggcgacgacgtcggtgccattgttgaactggaagtgcaccatgcccttggggaacacgaacatgtcgccggtctgcagcgtctgcgtgtacacggtgccgttgcgggcggcgtcgacgagccccaccagcagcgggccctgcacgaccaccagcagctccgacgccctggggtggatgtgcggcgggttgacggtgccggcgccgaagacgagggcggcgtaggacacggactggccaagcagcgccgggaactcggcgtgagtggccttggtgacggtgagcttggccgggtcgccggagttgccggtgacgaggttcttgtaggtgaagaaggcgccgtcgatcccggatgggtcggtgtcgctgggcacgacgaagtcggtgaggatgtccgggtcggcggcgccggcggagaggatcacggccagcaggagcagcacgccgaggctgacgctgctgcggctactcatcatcatcgtcgtatcttagctctgttagttagtgtgcgatggatcgatcgaggtggaggcagccgcaaattgatgaacgagcgagacgtacggtggtatttatgtgcgtagaatcgccggctcggcttaggaaaagctgtcaccatgctgcatggcttgtcatgtatgtaaacagcttcatcgttgctcttcatcagcttattaattagccacaatcaacaaagttaaattttaatttttaattttgaagataatttcaatattttttatactttattttttcaacattaacttttaaatcactaggaacacacatgcataaagtttttattttttttatcacaaataaacgttaaggtttacgcgaaaagatcagactgtaaagttgattccttcgtttcctaggtcgtttcacaaataaattaattactacattcatatatgagagcatatgcatacgtgcgtgcgtacgtcgtcattcggaacagagctaacagtccagacccccagtgtacaaacattgttgaaatactaattactggaccagtttgatcaagctgccatgtgtagtatattagccggcgccttgtgccgccatatatttgctcgctttggaaacaactacaacatttggtcttaattgctgtctgattagctttcctgctgtatagaatatgcatttgcatttgtgtactatacataaaacaatcgatcgagtttccaaggcatttgggtttagtggtcttattaattctcttgtgtgcactacaccttagccttttccattagcatattgcaccatgcaagaagaatgatcatccatcggtttccaaacgcaaataattaaattattagaggtaattaagcagctaccaagtgcatggctgtgtatatccattgagatatagacgccggattttaatctattttcaaaaaaaaaaagtgcatgtgcgcaacaactactaggtagtcattcttttcttaaaaaaaatcacaaaacaacaaatactatcacacaactatatatatatatttatttaacatcaaattaatttatcatgaaactatagatttaagatagagaatcacaaaaatatattatatgatgaagttatcgtagaactagcgccaacttaatcacatcactacaacgttaagaactccaacaggacatcgttgttagggatttaaactatacaatctgtagtttgagatgaatgtatttaaatgaaagttcgtggcgacagttgaaagttttgtatgatttatatatgttgaaagtcacatggttttaagtggaaagtttcgtaggaaagtgatactaaaagaaaaaagtgtgcgctagctggtcatgcctacttgaaacaagaatagaacaatcgccgactcaaaaaagaaagggaaaaacagaaattcaattttgacatatctcaatcgaattaagttttcaatgatcacaactcaagtcaaaacatacataaatatatactagcacactcgactcgaggtcgaggattattcccacgtacggccacactacagcttgcagcattttcatctgtcacgcttttgcgttgcactgcatgtctgcattgcttggtgttattcaactagtaacagccaacaggacgacatacgacaatggcgagagaaggaagagtagctaattaggacttgttgggcggagtcaggttcgccttgagcttcaggatcgtgggcacgtcggtcttgaacgatttggcgagcacggcgtcgtcgatgccggtgccgaacactgtgaccggcaccggcacgacccccggggcggcgctgccgaacgccgagagcgccatggccggctggttcccggagttgaattggaagtgcaccatccccttggggaagacgaacatgtcgccggcggccaggtcctgggtgtagagcttgttggtcgtgtcgatgaagccgacggagagcgcgccgtcgacgacgagcaggagctcggcggagcgcgggtgggtgtgcggcgggttgacggtgctcggggggaagacgagcgtggcgtaggagacgctctggccgttgagcgccgggaactcggccatggtggccttggtcacggtgaagctgttcggttccggcgcgctgctcgtgttgaacaccttgcggaagccggtgaacgtgaagaagtcgccggtgatgttcatggggttgccgttcgccgggatgacatagtcggtgaggatgtcggggtcgccggccatgactagggtcagtgctggggcccaaactgcaagcagcaatagtagcaaagagtagtagctcaacgccattgaatctattttaatcgttcgatcagctgctaaactgtcagtaagtaatgagttaagacgaagtttaatttgactgatgtggtctagtcttcaatctacttgtgttatggagacagtgagcagtaggatttggctatttatgcagaagaagcgtctgacgataagccggagaaatcgaggttgaaattgacatatactatgcgtaaattaatcattcatcttccgttgttggacgaccgaaagatcggtgcatcaagataaagaaactagccagctagaggttcctgttaaaacttatgcccgtccagaacagaacagaacagattagatttctggcctccgagaatgaatacgtatctgatgccatgctacttagcttgttaaattaggaagtcagattgttaactccatcagttatcttggacgtattctgcattcccctggttgtttactatgaataatagcaaggaagatgcatgatgagaaaccaagggagaaagcaaatgtcatcccaaggcatcaaagtcctacccacctacagctgcactgcaagaatatctcattgccaattcactactgcttcgtcaggaatgacatatcttccattgataactcagctcagctgtgcggtccagttgcctttctagttcaactgaattatcaaacaatgcaggtctattaactcttacacaccaagacttgttgttttttgcgtgcttgtcctcagtgttttgatttgaagttgtttgtgtctgtactgccttctggtaggcttctgtgctcctccttaatatatccagtagtgctcctcccgtcggtttcaaaagaagatttgaagttgtttgtcataatggtaaatacatggaccaattggcagtgaggatggtggaagtttccctttttagctactgtttggcagtgaggatggtggaagtttccctttttagctactgtagtagagtggaaattcaaagcatgtgagatgaacaggtaaaatgcaatcagtgaactgtagaaaccacaaacgggaaaaggcatgctacaactgagacaaacaatggataagctttgataatggaaatggacgtcgttggtaggtacactcggtgttgagcattgttcagacagatgtaacaatgcaatgatgtatattactagtataaattaactttgtttgatactataagagaattcaacttgagagcccactgtaatttaacagaactgctctgaatatgggttgctagaatggtgctcttgactcttgagggcttatatgttaggattcaggagaaacataacagatgttaaattcttagttttagttggtgatgcatattgcagttgtttatattgagatccatgttatccatctgaccatcatcaatatttctgtcttgtggatatatgcagactggcatataagagggtgactgtctgactgagtatatatgtggatatatgcagatttagcatataagaaggtgagtaagattgcaacacaaatttactattgccagtaacaggtagtaagtggaaacacacagtattaagagatgtatcattattgtggaaagccgttacagcagagaaactctcaacacttacaactgaactggtctatatatattcccacaacgccttaattaatactgatagatacatggttcaaagctcttcagacaagacaatacaaccacaattcagaattattcaccacacaaatcataatttaccttcttcagtagttggtagcctggaaggtctcttatttcaagcagcagcagcagcaggatgaaaaacaagaataattaacaccaacggggagggcttaggctttcttgggaggagttaggcctgccttgagcttctggatcgtaggcacgtcggtcttgaacgacttggcgagcacggcgtcgtcgatgtttgtgccgaa

SEQ ID NO: 10155 - DNA, 15813 bp, Oryza sativa
ccatgagacgcgtgcgagagggaaagatctggggagcggaggcggagaggcgaggcgagctatggtttggattggatttgcggttgcggtggtcggggtagatagggaaggtggatattgaggtcggaatcggaagggaggaaaaagtaatttgggtcggaaaagggaaggaatctgaagacgaggcggagaaggggagtggtcgcgtcgcgtgctccccttctccgcacgcgaacttactttattaccctcacacgttttcaatgtctccgcgctccgtccaggggcaattcagtcttagtactgcatctcggattgtgaaggtcaagcccagcccagtaatggccttgggctgtggccgtgctgatggagcaaacggacgggatattttgggcctgcatgcgaaggaaggaatgattcagccttacttaacttcctgctcaggatttggttttgccctcccctcaactaagtagtagattctctacaccatacatgctctaactagtgtagtgattattttctttttctaggcaaggcagattatattaaataaaaaataaattataatcttcttcttgttatgtataacactaaacaactccgacgcacgccaaaaaaaatactaggaacgagtatcggccaccatcttcatcaccctaaatatcaacaaaccggtatcaccaaacaaactagtgccccaaaccatagaattggcacggctaattggatcatcagcaacccagtagacaagcttatcctaaatcttgttgaagaccttgtgaaaactatataaactctaaataaaaaaacctagggcctgtttggatgccagggctgcggctacgccgtagccggcacgaacagtgccgcactcactgtgcgcagctgcagctctcgcagtcagcctgtcgaacagcccctatataatctaaaagatcaaaccaaccaaaaattattcacaacccccccccctctgaaagttggggttttttttaaactatttgccatcctctttaagtgtgcattcccaaatgtcattctcttcatcatatttgattatttgccatccagacccactaggttgttttcggttttgccattcttaggctcttcgctgtcagcaagacaggtaggaaatgaccttgatgccctctaatctccttttctctatcaccttttccccgagctcaactatagccatctcatgctcgcctgcccaagtcaccgtcgagattggtgcatcttggcatcctcaaggccttctaggtcaattcatggttgtcgagctcacccttggagccaaccccgggctccatggttgtggaagaaaacggtagcaaaaatcactaaaacttactcaggtatatatagtaggaataagtattaaaaagacaagtgaaagttcgtcaatgacacggcacatgtttacacctatagaatgttaatcttggggtttcctattagctatgccagggatgcaactgacgtgtctcagcgctagctgcggcaagcccccttatgtttaattttctatgataaaaatcataaaataggtgagtggtaaaaaaataaataaaactattaattttgagctgatttttaaaattttgaattgaaagttaaaatttaagttgaaagtttttaaatctgagttaaatgtttcaaaatgtgagttgaatgttttcataccttgagttggaagtttttaattctaagttggaagtttcaaatctaaacttaaaaagttttcaaatcttccaaatcctcagttaaaagttttaaatgggaaaagagaaagaagattagctgaactggttagttctttgtggtggaactagtccacccgagttcgaatttgggtgctcacatttatggctaattattttttcagtggtaggcaacgtatccatcgacagtgaggcgtttatgatgactttgtcaatctcaagatatgccggtacaaatttttggaggtgctcatatgtgtggggtgcgtgtgcgtgcgcgtggtgtggacacctgggtatgtattattttctcaaaagaaaaaaaaagaaagaaggttggataaggtgtgcattacttccgattgtagctggtatgggctaatataggattgctattaatcttaccttaatccccgtgtgatgtgtggcatggcagattaataagattaataagacggagcgtgcagtatattctgtgatgagatccatccatgtgaatgtgcaccatccagacccgagacgtaacgtacgtatacgcacctacgttaggtagggaaagacgacagcttagctatctatcccgtcttccttgctgttccagttacagatcggacggcacagtcagcgccaccctttcctccctgcgcgccgcccccctactctactagtattataccatctgtcaaatcatcgtcatcgtcgtcgtctcccccagttgttgtgatcgccaattcatccccgccctgctgcctccatccaactcatcaggaaccaacccatcgatcgaccatggatctgcaggaggcggcgatggaagccaggaacggccatcggatcccgccgacggaggagaaggtcatcatcgacacggatccagggatcggtacactaattctgatttctccacttctcctacctgcatctgtgactgtgatccatccatccatcttgacaattactaattcatatcaattcccagatgacagcgtggcgatcatgatggcgttcgaagctcccggcgtgaaggtcgtcggactcaccaccatcttcggcaactgcactacctcccacgccacccgcaatgccctcatcctggcaagcttattttcttttctttctttcaccatgccccctttgcctcgccttacctgctttatcaaattaatgagattactcaactgaaaattgttcatgtacagtgcgacagagcaggccgtcctgaggtgccggtagcagagggcagcgctgagcctctcaaggtaaggtatttacatgttgtactccatttcacttactactactccactctaattgctaattatttcttcattctatcatttcgcacatatgtatatgcatcagtggttaattaattgccatattatatcatcaacgcttttactgactgaatcattctagtcaagctcgaacctttcctgcacttttacatctcctgcagcttctatatttgtgcctgttttacatgcaaaagtgcacttctcttttttttcttttgacaaattaagttagttagtgctgtgcaaatcttcagagcatttgctgaaaaagctctggtataccacttcgcgaatattcacaatccatcgccttttcctcaagttgccttgtttattcagctatgcagtggatttctgtataaataaagccaacctttgtgtgttgcagggagggaaacctcacgttgctgattttgttcatggatcggatggacttggtaacacgtcctttcctgatcctaccaccaccaacaaagttgagcagtcagctgcagagtttctggttgataaggtatcagaatctccaggagagatctctgtactcgccttgggccctctcactaatatcgcattggtatgtaatatgtgctttctctaacgcctcttaattaatactctacttactaggaccaaaaccttatttctggcagtaacacttttgctttatttctttctcaggccatgaagaaagactcctcctttgcaagcaaggttaagaggatagttgtgctgggtggagctttctttgcagctgggaatgccaccccttcagctgaagcaaatgtaattttgttactactacacttgtctgcttctgcaaatcaacttcggttttgtctataatgttgctctgtttctgcattttttccccctcttgcattgcctaaagtttatccattagcttcaaatagtttcttatagccaacagcacaattacaaaaagatttccttgcaattaagatggttgcctttacatctgttcttatactcgagaatctgtactaaaagtctgaaaggacactatcgtttaattttactattaattaccaaactctgaatttcggtgagaagaaagccgtcataaaactgacgaaatatttacttcctctgttatccacagatccatagcgacccagaagcagctgacatagttttcacttctggggcagatatctacgtagttggccttaacataacaacccaagtctacttcacaggttcatgatcagcctatcatttcaactttgcaccttcagtgtgaactttgacagtagtgctggataaccaactcaccaggtgacatgcattaaacatgtacaaaaaattgcagacaaggatatgttggagctaaggaactcgaaagggaagcacgcacaattcctttgtgacatctgcaagttctacagagactggcatgtccactcctacggcgtcgatggtccgcacatgaaacatctctcctttccttcttacaagttcaggctttgggaaattaacgttccagctcacatttgtgtgatttcttcagctctttttctccatgatcctgtgagtttcaccgcgctagttcaccccgagtacttcacgttcaagaagggcgtggtgagggttgagacccagggcatctgcaaggggcatacttccatggacatgggactgaagaagtaagaagatgcagagattgttactgtctatttattcagagaggctggatatatatgcatttgcaattgatcatctgcttaactgttgcattggtgtatgcaggtggaattcagacaacccgtggactggttactctccgatctcggttgcttggactgttgatgttcctaaggttctggcatatgccaaggagctactcttcaacgcacaatgaaaatgtaaccggatcagtgtcatctctctctctctctctctctgaactctgatgtgattgtgtcagaattggcatgcaaatatatctttttttttgggcacaagcagagatatcttggcattgttgtgtactgcagaaattgtatcatatcatttattctgatgaattgcaaattattgataaatgttcagcagcatctgctagtagtacttgctggtgacatgatgatatccttgctgaatcaccatgctgattaattgtgttcctcgtgggtcgagctgtgcctgtcttggtagataaataacttcggtggtgccaaaactttggtattgccgttacctatttcagtcttgtcgattaagtacagtaagcacttccatctcattagtatgcgtttggatggttggcacatggtttggggcgtgtgctctggtgcacatccttactactcgacagccagctatcgatgtaaaacttttcttgtaacattttcttcctatcttaattacattgaatgaccttcttcggcattccggcaaaaagaacagtaagcactaggcagcctttactgaattatttgcgcaccaaacagacttggagtgtaccaatatgcctagcgcatgaatattgcaaaacaaacaaatactcataactcacagattctgaacatacatgcaccagctttacagcaggaattggcagtgtaattttacaagtttctgcattgggccgactactagtactaatatccttttggttttaccctgggaaggcgcagcaaagtggccatgcaggcagagtaatttgccattcattcgttggatattagaaacatcctagaagcgtccggctcgaaatatagctttcaaattaagttccgaattatatataaatatgtagcatcacacactgatcgatttagctagacatcatttatttgctggagatgctatctacaagtagctcaagaatgaagcatgggcgcctgataacaacactagctagaagcagcaaggttagtaggagcaaagatggggaattaagccgctttattatgagtggaacgcatgagcaaatgcatatggcgagcatgcattcctgaaaggcaagattctgcgaccaaagtgtacattctgaattttgtttaggtggatgaaacacatagtatatttcatgggaaggagggaaactggaaaacggtgtgctgctgctaggcctgactctttgggcttggacgcttcttctctctcgcttctgcaaccagagcatataccccaatctgccacgcgtgccggccgttactaatccctcatcactaattgtatgcatgatctactgatgcattgcatctctgttctgttcttgaccagaccgtactctcgttttggagaatgagaggtcaggaattgaagcagctagctagagaaagaggctgcaggggagagtccaaattaaaccaaccaccacgttgttatgtgttgcttgcttggtgctagagtgctagtaatgcactagtccaaattaaattcttcatgtattttaggatgtagtatatgatattattaagtttattgatggtgattttctggatggttgaatgcatctgcaaactgaaagagtggccggtgtgaatgcagtgcttaattggaatccgacagtgggtaatggaggagatgggccagtagggttggtgactgttagacgctagcacatccaggcgattaatacgactactgtcatacgtactgtacatgtcatgctacattatatcgatctgtacattctcttggtcatgcatattacagcgccatatcctatatatcgtacctacgaccaaaattaaactaaacgctctctgaaaaaccaatcaacaaaatacatacaacctcatgttcatgtaggggtataaactataattaatgttcatacaaggagtatcactatcatgttatcgatcaagctgctgctatgctaggtggaggatggcaatattgcattgatgtcgcccgggttcgttgggccagtggctgctaaccgaatttaattccatcctccgctgctgctgcgccagcccggtcagcctcccaagaccaaagtgaacatatggccctgtctagttccttaaaaaacttttcgcaaaaacatcatatcaaatctttggacataggtatagaatattaaatatagataaaaagaaaaactaagaacccattcccagcaagacggggaaatgggggcagcgatcgattttgttttctttgcgctttgggtgcagagtgacagtgacattgacatcccgagctggcggctgggctgcctatatttacacctccacaccaacgcaaatcgatcgcgccaccaccccctctcctctcacactatcaattgctcttgtcatctctgatctgcctgccgctgcgccagctgcctcctccgatctctctctcactctcacacacacgtactagctagcaagtgcacacagacaatgtgactctgtgagagatctatcgggcatggaggaggagagcagcacgctcatacggcgccggactagtttgccggcgaccacggtgatgatggtggtcctcctcctcctcctctgctgtaactgtaagctgcatgctctgccctccatatctgctcccccacttttactagtattaaattctagctatctactactcaaattcatttactgctgaaacctcaactcccataatgtgacgtataggtggtgtcgaggtggtggtggctacggctgatgagtcgtctccggcgccggtcggcaaaggaggaagtgatcatggcagttgccccggcggcgacggcgacggcgaagggtacaggaagcagctgtgggtgtttggcgactcgtacgcggacacgggaaacctgggtaaccttgggagggagctgacccacgcctggtactacccctacggcatcaccttcccgcgacaccccaccggccgcttctccgacggccgcgtcctcaccgacttcgttggtacgcccacgcctccgccatctctctctatatatcttcatgctatgctaattaattactcctactgtcatacgtactgtacatgtcatgctacattatatcgatctgtacattctcttggtcatgcatattacagcgccatatcccatatatcgtacctacgaccaaaattaaactaaacgctctctgaaaaaccaatcaacaaaatacatacaacctcatgttcatgtaggggtataaactataattaatgttcatacaaggagtatcactatcgatcaagctgctgctatgctaggtggaggatggcaatattgcattgatgtcgcccgggttcgttgggccagtggctgctaaccgaatttaattccatcctccgctgctgctgcgccagcccggccagcctcccaagaccaaagtgaacatatggccctgtctagttccttaaaaaacttttcgcaaaaacattatatcaaatctctgtacataggtatagaatattaaatatagataaaaagaaaaactaattgcacagtttatatgtaaatcacgaaatgaatcttttaaacctaattaatccatgattagtcataagtgctacaacaacccacatgtgctaataacggcttaattaggctcaaaagattcttctcgcggtttccatacgagttatgaaattagtttttttcattcgtgtccgaaaaccctttccgacatatgatcaaacatccgatgtgacatctaaaattttcatttcatcaactaaacaggcccatatatgtactggagtacgtgccttttatacagacagactactactagtcactcattttacaacctgcacaatggaaatttaccactcaaaatttttcataggcagactgtacatcattttcgtttctaaccaaaatatatataggtgatcacaaaaatcacaatgataggcaaataggagtaactaactaaaagaagaatctttgcattatattggctctttttcgcggatggaaattgactcagttcatcgcatctggataattcattcatcattcattcattctttgtttgttttttcatgccgacttaactgaccgcacatgcataaaagcctcaggctgcagctagtccatgcctgcactgcatagtgacgacgtctgtattattctctttctttttacctaccctataataggtctccaaattagcacgccctgtcctattgttactgttattgctctcactcctcgcttaattaggcttgacatgtacatgtccaaaacataaaacacatttatcaatcgaaccgacattttggttgcaaatctagtgaacaactaagcaagttatggtgaggcgtcacaatcaactgtaccctgcccttcaaaacaataactaaggctgtgtttttcagcgcaaagtttggattttggttgaaattgaagatgatgtgattgaaaagttgtgtgtgtatgacaggttgatgtgatggaaaaggactgaagtttggatccaaactttagatctaaacacagcctaactgtatatcagtaacagtcctgtcgcgcgccgtttctgaagagatgatatatagatcctctgtgtttaatttgcattcagcatttatcagttttatctaattaattgttgtcttaaaagatgtactaaaattaaactggctagtatttgatgaactctctctttttctatacaagtagcacttgtttttagaggtaagttccttcctagtgttcttcagactagtttaagaggttgagcagcattcatgtttagttgcagcctagctattggaggcaaactaaactaaaagctgaattcgctctcacctgctctactgacgtgcgtatgttccataccgcatctcatgtgccggcagtattttatttatttttaatcactctctcaacaactagtaaaagctaatgtatcctgcacatttgtagagagtaattaaacagcacgcgcgcgtgcgtgcatctatcatgtcagataatgtgccatacaattatctggctgaaagctaaccttaaccattaaagtattttgcagtgtttatttgtttgtttttataacagagataatagtaataaggttttaactggtacgtagtatggttgaatttaaaatattggcgggtgcagcttcggccgttggcatcgcgacgccggtggcgtacaagctgcggcggcgcggcgggcacggcggcgaggtggcgtcgcgcgggatgaacttcgcggtgggcgggtcgggcgtgctggacacgggctacttccagcgcaacatcagctcgcagatcgacctgttccagaagcagctgcgcggctgcggccccaccggcgtcgcgctcgtcgtcgtctccggcaacgactactccgccgtcgtagacaagaacaacggcacaagcgtaagctgcaattgcaatacaaccacaccggccatctcgatctatatatcatatctcctctctgaacatgcatgtatgaacaggaggcggcgatcgcgtacatcccgacggtggtgagggggctgcgggagcaactccggcggctgcgcgacgaggtagggatgaagaaggtggtggtgaccaacctccaccccatgggctgcaccccgtacttcacgcggctgctcaactactccggctgcgacacgctggccaacgccgggtccgaccagcacaacgccgccctccgctccgtcctccacgacctcgaccccgccaacaccaccttcctcctcctcgacctccacacccccttcctcaacctcatcaccgccgccgccgacgacaagttcccggtgcggctgcggccgtgctgcgagacgttcacggcggacggccactgcgggcaggaggacgaagccggcaacaagcagtacacggtgtgcgacgacccggagcggcacttctactgggacgacgtgcaccccacgcaggccgcctgggccgccgtcgcccaagccttcacccccgccatccaccgcttcctctccacctgaacgaacgaatgaatactcaccaaccagctttctcatttccgacgaaattccgcgaaatttcgacgtttctatatggctcggaattaagtttcgattcgaatttcgaaggttaaacagtagatttgatcgaaattcagtagatttgctccttgcacttcttcttcttcttcttcttcgtcttcttgaacaactttttttggggcctatctaatttattattacctttggatgatgatttgttgcaactggatagcagtattactgatttttttttttgagcaaagggcgagagccctccatttccattaatagaaatgaaaaagtatctaccagtctacagaaagcagtaatactgatgccggaatacttcaaccaattaaagaaccctataaaaaaaccccaaaaacattgccttttggaacccataagcaaaaaggacattaagttaatcgtctgaccttctacagatttactgttacacaatcgatcaccaggaggcctccctcgctcgctttctttctactgttacactctgctcgcgttacaactaacgggttgtttggctgaggtctcaccctttgctattaagaagaagatgaacacaaaggctctagcagctacataaatttaatcaaccatgggcaattctcaaaacacatgatagttctatgttgtatgcacttgattgtcctatgcttacccaagggggtgtcagtaataattctccagcaatcccaactgctatgaggcaccattattgttgccttctgttgctgctgctggtggtggtggtggtggtgttggtgtcacgtccatttgctcgacgtttgtctcagcagcctcgtactccgaaaggaggtccatgaattcgtttaacagccgttggaccttgcggttcgtagccatggaaggtagtatatcttcccttaggagtttgtgtttcttcattccctgcagatttaccatacttgagttcacaggctcaaagtggtaaataaacatcacgtccaagaaaacatagaattatcaggccatctatcagacagagagccttacaagaacatcaggatcccatgatggatttttcaaatcagcagatgatgcagcgtcaaccatgcccatcggaggaccaagaaagctctcacaaacttcacgtagacgagattcatctgcctctctgaacgaaacaaagaacaagcaatataatcatttccgcacagcatcatagactgttctcatcagatataaaagaatcacaaactttctcagccaattaaacatatagagctgaggttgcaaaaaagaaatgttgctaagcctcagaaaaggagactctgtagccattgtattgaattgataaacaaactaaccttgccagaaatcttatgtaggataagaggcattggcgatattcctgtggagacttcaaagccaatgaagctgccagctgggtctctaaatgggagcgtgtctgcaccccatcatcggtaaccctgtagtgccaacagtcaaacaagtatacatttagagcaaattctgctatgttagtacactagcatgtcatgattctagtttcaaacgctcataagacaagagcaacaatggaagtgtgcaaacctgctccaaataggctttctagccatgaattttcctatatcgatctgcaacttgcctagctctccaccttgagtagaactaaatgagctagcaaaatttgatgctggaaagcaatcatcagctatccttagccagcatttcaggctggtgtcataaagaaaagcatggcgactggcaagcacaactaagggcgagccacatcttgaaaatttagcagatataacctttactgtacctgtcatataacaaagcaagatcaacttgcaagaacaagccattttggtcaacatcaatttagatgcacaaaagttcagattaacactacatatgaaatatttaccggtatcttttccagctgcctcatctggagatgttaccaaagaagccaaagaatcatgcaaaacgcaagtcctggtatagaggtcccatatgtacatcaaacccctccttgttacaagaagcaatttccaacactcatcacagtctataaaaacagctgctgatcccatcatcatcgctggcattgctcgccttccacattttgtgtaaacctgaacaattagaccagttgattcgagtgtttaggctaccagattgtcagaaaaatgaatgcacatgaaggaataaataaaatcatattccagcaattattgatagattttgtaactattccaaactaaaacatgaaataaatctacaaggaattccactaaagggatattagatacctgcaggcaaccatcttcacagccaactgcccagaaattcgcattaccagccaagacagtcaccttggcagagatgcgatctgaccaaagagtttctgttcctcttgtacatgtaatctcagtttcttttgttgaaaaagcaccaccaagcccaatcatgtctcctgcagaacgttctacaggctttgcttcaaggcggaccggtaaagaatcctcattgtctttcttattgaatacatggatagaaagtgaagagcaagaggccaatgagcctggaactacagatccagactgttctatgctcaaccttccatcactgccagcaccagctgaagctttttggattacaagactctcactaatgttagttcttgcagtaatgccagagcgtcccctaactccacaattattacagttaccgctagcactataagatggtcttgttccattctctccaaggatcattcgctgatccagggatgaaaaatccacaccttgattctgagaacggttggacatgtcctggttggaaggaaatccaactgcctctggaataatccttttccggccatcaggacgccggtattctctttgtttcactggactagataaacgaggtgctttatttatgtcatcagcagtggaacctgcagttttcttctcatcttcaggtaaagcttcaggagctttctgatttggaacgcttgtagacgggttaggtgcatctgtaaaaactttgggggtgattgaaattgctggacactggaaaaccttttgcttgcagattgtttggccgatgcttcttctagcagtaactgagcagggctttcagctatatttgattgcctccctctaacatcgccatatctattcttcttcaattcatccagttcagcatcccttaacctgtatccaagctcctttgcttcaaagtgaaaggtagcaactgaaccatccaaagagcaggcaaaaagtgaatagccatcaggactcctgtcagggaaaaagagcagttgctattgagcttgcacatacacgggatactaattatagaatatgttatatggtcaaattcacataccaagataaatcaaccacactttgagtgaagaaatgcttggcaacaaacaatggccgggcactcgctgtcgtccagacagtaatagttcggtcctgactcccaatagcaataacattatatggttgatgttctttagatgatgcttttgatgctccattggcccatccagctggtgcagcctttgcgtcttggccagaagataaatgcttacggaacattgagtggttaaacttaaccactacaacaggtgcgttatgccccagaaaatcaaaggttgctgaccattcaccccgttcaagcacaggggctgagtgcctaggtttctgaaaaccatgagttgtggttatgaagtggccacagggagaccaagcaagtcgcctaaaaaatgtcgaaccaagctgcaaacacacacacacacatagaaaatatttttcagtaaggaggctttctgcaaacaagatatgtgaaccacagaaatgtaatgaccaagtccaaattcacaacaatataacaaaaacataccgattttgaccaatggccttctgtcctgtgagcaagactccagtcactcgtacgccatatgataacagtcttgtcatctgattggcttgcgatgaaagaaccgataggatcccatgtaacgcctttaactaaactggaatgccctcgcaagacagcagtgcatatgccattggccatgctccatatgtgaacagtattatccaaactgccgctagccaatgtcgagtcatcaggggaccaattaaggtcaacctactttacacataagaaatataactgtgttcaacaatgaatcgataaggatcatgacagttttagtaagagatctaagtaacaggtgacagattaaaatctaattatgttaagcatgacatgactgagattttggcagataattaccacatcggcagtatgccctcttaaggtcataacaaccttccagttttctacatctggaggttctccacttccaaattcagatgttccagtgccagcttttctttcatgaatttggataacttgatcgtccgatcctgaagcaagatagcggccatgatgggcccatctcacacagtttactgttccaaaatggtctcgaattgtagccagcaacctttggctggaatcatcactgtcattgtctttggccactgatttcatgctccatatgcgaatctattgtgagaacaaaaatgggatattagcaaagagcaggctgcgggttcctcaatgatggcttgataacaaattaccagcttccacactgacgagcccagacactaaaaccactaaagcactgatgcaaagaattccctctaacataattatgaatatagtgaactatccttgatacatcgaaatgtaacggtgctgcctaaattccctaccttgtacaggtcaactctgagaaggtcaatttatcacggggaa

SEQ ID NO: 10156 - DNA, 6172 bp, Oryza sativa
tgctgcagtcaaagccacatctcaggacacttgatcaaccgcaggcaaacttttcacctgaaaattcatcttcagtatttaaatcttcaatccagctgcctatttctgttggcgtggggcatcggcagcctgaagaagtatctctgtctagtgattccactcttatgagctcagatcatttaagtgctagcagtttgttggctggccttataaagagtggattcaaaccgaatgaccccaacgatcttgccagtttgagggcacaacctcctcttccaagtgggccacctcctcatgtttcgacatctttttcagctgcttcctcatccctgcaccttccagctagtgatactctgaagtctcaggcgccaaactctctgcgcccacctttgccccctgggttgccactttcgtcgccgtttgtgtgcccgacaacacagacctcggagaaagctgcaccactctctagtcttctcagttccctggttgcaaagggattgatttcttcgccttctgcagattcaactgtagcgatcccacaacagccctgtaaatcagaactgaacacaccagatgacactgcttcagctccatctctgccttttgtccagccttcagttaaaaaggaaacatccaatcaaaactcatctgccccatctaaggtgctggtgcatcaacctgttgaaatcaagaaggaacctgcagaaatcaagatggtagaccttattggctttgacttcaagcctgagatgctccgcaagtaccatgcacatgtgatcagcaccctctttgatgaccaaagtcatcaatgtaatacatgtggtctaagattcagtcttgaagaagagctctctgtgcacactgcgtgccatggatcgaagcaaagtgagactagaaagactggtatcgcacctgaaaaatggtaccctagcaaaaataattgggtcgatagatcacatgaagtgcagaacagcgccctggagtctgcttcttctgttgcagatttgagctctgaagaggaagtttgtgaattcatggttcctgcagatgagagtcagattatctgtgcactctgtggagagtcatttgatgacatttattccattgagaaggataactggatgtacaaggatgcggtctattttgattcttcgaagacagaaggcagcagtggcgacagtgctgagagtaaagagcgtgtacccatagtgcatgcaagatgtatgtcgataagctcaaatgatggcatggaggttgattagcatttgtgccaaacacaggggcagaagcagtagcaacagaaacagctcgaatgatgagattgaggtggattagctggaaatctggtgcttaacagaagctcaaatgaaatgatgccacaaaagtgggtcagcgtgaggggtgatccgcagcagcaactgcaatgatgctgtcgcggccatgacatgtaggtggattagtgtgaagttgacaacctgacgcgctgcacaagtaaattttggtcaaatgtttgtgttcatccctcagtcaccattaatcgtggataaggtgcttacacagaataaattccaagtccagctctggccttgtcaaccgatcatcctcgcaatcgagatcttcgggggtctgatatttgtatttttggttcaatcgaagggaaatgatctttctgttcatagaaggccagcttgtatgttaaaaaggagtgtattgtttcattacgagggaaagcaataggtgacgctgccattgagttactgttgttttttggcaaacttgtttcatcttccgaggactagagattttgtacctaaaaagaactgataatagaacatcatggaggcagaattaaactagttacttatggcttgcttgcttgatgtgggagttcttcattgtagttcgatgttccttcctccttgccattgtgatgcgtaaaattgttttgtcgtcggaagttgttaattcggcagatgatagatctgagtattatataattctgtaattaattgtgaaactgtaggcatcagtaataagcgattccattcccacctgatagatcctggtgaatagctcaatgatttgcctctcatggattcctggtacaagtcaatgttacgaaagaggccatttggattaataaatgtcccttcagtcatgacttatgttactaatcacttgatgaaacaatgcggtcaagtcgagttgcttgttaatgtggtagcttgatgcacgttactccattgtaatactagtacattttagcatgtctgatgcttccgttttgcgtaacagcaatggttgggcttaactaagctaatgcccagtgggagaagacagcagccgaccgccccaccctggtctagagtattagcggaatactaacttgattatataaataaattcaatttctttttcaaaaaataaacacaataaatggcttaaaacaagtaatgcaatggtcaatggaaaagaacacttcttaatagaacttttttttaaagagtgaagtaaataagctgtttcaacaagccgataaataacctgaaaagaaaatggctcatttcaacagtcgaacgccacctaccgcttatggagtttgtggttgcagatggttccccttgctacctctgtcggtcagccccaaccaccaaaccaaccacagccatattcccatcctatcaacatcaaccttacggagtacgtgctgccatggatgcatgtttgtttctcccagtactcaccaaactgtcttctatgttctatctgtaccatctacagtactatgtgtgtactcaaagtaatggcatgccatatcgatcagtgaattcattcattttttttttctcagcaacaagagagccaaacatttgtgagcagacaagatcacaggacagcagaaatgtggtggttgttttgattgttttaggcagctcttccattccaagatgtaaaattcgacttactgagaacatcatcatgatgtaaatccgcacccgcgaccgcaatcaaacattaggaggtcttcctcccctctctccaattttggtcacaaaaatttcaaaggaaaacaagaagaagaaagaagcaaattaaccaacaaaaatttgagcatttcttgagataactgtattcaactaccaataacagcagcagcatcagtcttgttgatcaatcagctgctgctggtgtcgccggcggtttggccggaggaggaatactcccagggcgtcatgtccatggggtagctgccgagcacccggaggaaggaggtgaactcctgtatctccgacagcgcgttctgcgccctgacctccgccatggacgcctggaagtcgatgtagaacatgtactcgaagtgcttggccgtgcccacgttggcgtcgtcgacgagccggatggggcggtggcggtgtgggcggctctcgatcttggtgaggctgatgtcccggaacgcgaaggccgacagcaccttgaagagcaccgacgtgccctccctgtcgtgcgcgaacacgatgctcgtcttgaatggccggtccgttcgcgggatgatgggctcccgcgccagcatcacgaaccgcgtcacgttcccggcgtcgtcctggatgccgtccgcgagcacctggagcccgtacagctcggcggcgcgggaggacgcgatggcggcggtgtcgcggagccccgcggcggcgacgtgctcggcggcggccgcggtgtcgtcgaaggcctcgcgggcgacgttgaggcccatggcgttgagggtgagctcgcactgggcgagcgcctgcgggtgggagatgacgcgggtgaggaggtccctgcggacgcccgggagcgcgaggaggcagtggtggacggggagctggacctcgccgacgatgtggaggcggtggcggaggaggaggtcgtagttgcggtggatgctgccgccgagggagttctcgacggggaggacggcgcggtcggcgatccagagctcgacggcctggaaggccacctcgaactggtcgcaggggatggcgtcgcaggaggggtaggccttggcggcggcggcctcgctgtatgcccccgggacaccctggtaagcgacgcgcagctggctgccgtgcatgggcgcgggggagaggtcggtgatggtgagcgggcgagggaggttggagacggggagcagatccaggtcgagcggcggcgcggcgtggtcggagagggcgggcttgatgctgtcgccgttcacccgcggggcgccataggctttggcgttggtggtagtggtggtggcgaggatggcggcgcaggtggtctgccagtgggcgcgggagaagggggtggcgcacggcgggcggatggccgtggatctggggatctgggtggggcgcggcgcgggcagagtttccatcatccggcggacggcgacggcgaggggtgggtggcgggaaagggcggcctccctccctccctgtagctgcaagggaagggaagctaaagctttgtgtctctcggtggtgttgcgtttgtcgagaagatggagtgagggactgcctccacctcaacgagacgccgcgggaccaactatttgtttttcttaataatcacgattcttaaatattatttatatttttttaatacattgctattccattttggtaagcgcaccaactccatttgtcagcatgagtgtgaatgcctattttaccatattacgaaccctacatgttcatcctccttcctatctccatctctcaaatcactctcctctcattgacgcatgcctcattttttactcctccaagcctcctgaccttcccttgatgtttccccttctaccaacatctagctatccacgcccccttcctctcttcctccttattgcgctagctcttgagcccttgcgtgatgagcctatagatcaccgaggtctcacattctctctcgacctccttgtctcgttagttttccctactttttttcgtcattggtagtcatgctcgttgctcccaccgttgacaagcctagatctagcgagatcccactgtcgagctccaccattccttgttgcggttggttctatcacactaaagagcccttctcgtcacacgagacccatcggtggcagtgatggaggaggagatgcgtagcaatggagtgagaggaaggtgatgcgctgacctactttctcatcatcgatgccgcctcactttcatcaaccatcgtatatttttaaagtaattttcgtatatttttttttaaaaaataacacattgttttagcatttcgaaaagcgtgcacgtaaaatattgagaaaagtgagtttggacctaaggaaacgaactcatgctcggcgctgcatgaatttatatttatgtattctatgtattcagcggtagatgtacacatcaaagtcaatttttgttttgcaatccacgccgctcaggatgcttccttcgaacacagaaagaaagaaagaaatgcgaggcattgagtcgttatgttaactaggagcagctgtctagatgctggactttttacacatggccctttctgcagaacttattttacgaattaaactttttagaaaactaattctagaaacaaatccctatgctcagcgcaaaaaagaatggcgttaagctttaaatagacacgcaagagatattggtattgattttgaccctagcatgcgctcgcggcagctgaaccacactggtgaagcggctcggcgcatgctttaagagagagagcttggagacagtgcgagcaatgtctaaggatcgcgcttgcaaaggccaagtcaagctcagggacggcatgcggcgagctaggccgaggctgttattgggctggtggggtataggaaggtaaaatggacatggtgaccggcctgtgagggggattgggccgccgggaagaaggagaataagtgggccggtctatgaaggggaggaagatggaaaaagtacaccgaaggtccctcaacttgtcatcgggataaaaaacgctctcaaaccacaaaaccagatatgtggatcccttaactatacatcatcaccctctgccctcctttccctttccctttctcctctctttctcactcttctcttaccttccctgggcgactgggcaagccggcagaaggcgacggcgcagggcgggggggagggggaggggggggggg

SEQ ID NO: 10157 - DNA, 11139 bp, Oryza sativa
aaaaaaaaataataattactaccgcatagtaatcaaatatgaaaggtaaaatgaaccagattagtaaagaaaagaaaagttatcaaagctcttactgataattagcaaaacaagagttatatgctagccaaatatttcagttgactgcagacactaacctgaaagcataggtcatttaggtataattaactaaagagattgcagctaggatcagggcatctgcagtcacacagcttgggcatcattatctacatcaagcaaatctccaagcaaattcaggtaaggccgtgtttagttcacccccaactaccccaaactttcaactttccatcacatcacatcacatcaaaaactttcttacacatataaacttccaagtttttttctaaacttataactttctccaaacttttaacttttttcaggaactaaacacaccctaaaggagaacaactttacacaaaatggacatcaaaatcatactaaacaggcaggggccgggtgtctgttcgaagttactgatgtccccctcatgcagaaagctgaaaaataaatctttgcttggtaacaaaccggctaccactggcattctagtaacatctaatctaacatgattaaagtacgaagtcatgataatactataatcagtatttcttattggaaaccaacccacaaacaacgagtaattcatacatgaagcaagaaccaaacataccaggttagtcgagatggaggcggcctgtcaccgggatggtcttgacaaggacgaggtggtggccagagtcagagtaggcagtagaggtccagccgacgagcgtcgtcgtatccaggagttttctcaaagccgacgaaacagagccggtgatgcaatatgtatgttgagctacacagatttagcatgttacagcacaccttgctatttccagtatttcatatgatctaaggtttgttcacataacataaaaatattttccatctttacattcttacatacaaatgaaagcacggttatatcttattttgcgctaaactaaactacagtatcatggttaaatcagcaaaaatctatgtgttgatagctcgttccaaaaagacaccatcctgaatacgaaaaaaagcagcaccatcagaacaatccacatgaaacaattgcatttttttttaattcattagcccttgtgtacgctgtgcatgacaaagaaatatgtggtcatgcactcatgcgttcgtaggttagtcaatgcatttatgtaacattagattctattgttgactttctagatcttttatatttccttctaaaatgaaatgtaaatgcatctttcatataatattgattatttagaaacccaactattacaaagtattagttttgcttgaagaagcttacattagtaagcatgttgaagttctccaaagcttgaacctacaaaacctggcctcgaacattcgtatactcagagttccactttctgtggaaaagatgtcagttaacgaccatataaatcataacggtcctagttataccctcaatacaaaatcaatgcttagtgaggttgaataacgaggttgttactacaagataatacacctgaagtgctgtcagatagttatggattgaaaacatttagatagtgcatgaaccgagttacctgaataattgacaaagcaattaaggacatatcacataagatttgttctacaatgatttctcttaattccaaatagcacatgcacataatgtagagttagcttgatccattcaagaagatctaaataacccaatttcacataaatcatataagcaacagcactgactatttgtgttcatatgaaaaaactataattgatttgaagacatggaccagctgctggtcataggatgatcactctgtatccttgcctaacatgtgctgaaaatgattaggatagcaaaatctgcataataaaaaaattacttaaggggaaattagtatgttgtgtagccagaagcaaagattatctattaaacaacgctaaaattcaagctagctagagtggcgtgccttgagaaaccattgcatcaataacgataacaatggcatgcaagaaatggttagattgcatcagaataggcagatgtaccataattagaccgataaatttgagaaaataattccgtagatgataactatagatgggagaaaccatggtaacgtgcaggctaaaatatattgagtaggaaatctagcatccatatacaaataatattggcatatcggatagaacctattgcaaataccggaattgcgacatcaaacgtcgacagagctgataaagcaccagaaccagatggcttcactggggcattctttaaagtttgttgggaaatcatcaaggaggacatcccactggtgttcaactccatcttcaatcttaggtgtgcgcacctcaacctaatcaactcagcgaacattgtcctaatcccaaaaaaggatggggccgagagtgtttcgaactacagaccgattagcctgatccatagcattgccaagatcttctcaaagttgcttgcgttgcgtcttaggccccacatgcatgccttgatctcggtcaaccaaagtgctttcataaaagggagaagtatccatgacaacttccttttcgtgcggaacatggccagaagatatcatcgcttgagacgggcaatgttgcttttcaagcttgacataacgaaggctttcgactcggtgtgttgggattacctcctggccttgctgcagcaaaggggcttcccgacgaggtgggtggattggctaggggctctgctatccacttccacctcccaagtcctcctcaatggctcgccggggcaacgaatcaagcatggaagaggacttcggcaaggggaccccctctcgccgcttctcttcattttggctctacagcgtattctctccaaggcaatagagctaggctcaatctcaaaacttcggggaagaacgactcgagtgcggatctcgatgtatgcagatgatgctgtcatcttcattaatcccacctgaggcgatgtcacggctttcgcggacatcctacatcgtttcggcacagccactggacttgtcaccaaccttcaaaaatcacaggtcgtggccatcagatgtgacagcatagacctgaccgaggtcctccagggcatcccagtaatgagggcaaattttcccctaaaatacttgcgcctccccctagttctgggaaggatgcggaaaacggacttacaaccggtcttcgacaagatatcaaggagggttgcaagctggaggggcaagaacatgggagctgccgggagtaccacactcgtcaaatctgtgctctcagcgcagccaatttacctcctgactgccttgaaggtgacaaaggagtctttggagcaactagacaagcagcgacgacgattcctctgggcaggcacgggtgatatcaccaggggaaaatgtaaagtcaattggataaagacgtgtttgccgaccagccaggggggcttgggagtcctaaatctggacaagttcacaagggccttgagattgcgatggctttggcatgaatggaaggatcctaccaagccgtgggtgggactggacacgccttgtgacggtttagacaaggacctttttgccgccgcgacaaaggtaacagtcggagatgggaatacggcacgcttctgggacgctgcatggatagatgggcagagaccaaaagacctcatgccacttttctatgctatctccaaaaatagaagaaagtccctgcgccaaggaaaagagggtgacgcctaggtgaatgatctgaccttcaatgcggcctcgcctatcacaatcagccttgtcgagcaactggttcgcttgtgggaagcggttcggaatgtgcacctaaacagtgaagagccggaccagattgcttggaaattcacagctaatgggcactacacagcctcctcggcctatcatgcgcagtgcttaggggcgccaaactcaaatctaaactccctgatttggaaagtctgggcaccggggaaatgcaaattccattcttgccttatcatccaaaatagagtttggacatctgaccgccttgcgacaagaggctggcaaaataatggacattgccctctctgtcgttctgaacttgagacaggaatacaccttgtcggcaggtgcagatacacgaagagaatctggagcctagttgcttcttggacgggttatcagcaattggagcccactgagtgggaggaagcacggtcagtccaacattggtgggggagtttagcaaatacacccggcgtcccaaaaaagggccttcgatccctcattctgctagtcgtttgggaaatctggaaggagaggaacagatagatcttcgaccacaaagagatggcaaaaggcttcctcctatcaagaatcaaggatgaggctagtctttgggctctagcgggagctaaaagattgtgcgatctagtcccacattttgtatagtgtatagctcatagttctctttctttacccttaggggttgtattttctcctgctctattcaatgaaaaggcacacctgtgctgttttctgttaaaaaaaacaaatataataatgcaaagacccatggtatattaatataacttgctcaaaatgcaataaacaacacataaaattcttctagtgtcgtcgatctaactaacgagcttaagaagcatggtatatcagtatatatagttctttgtgcaaatgatccatgaattttaaagactaaacaagagcaaattggtttaagagtataaatatcaaaggtcaaaatcactatacaacatgctttagtggactttggctttggaggagagggaagcaaacagagaaagacagacacaaccttacctcacgtcatagaattttatgtctcatgcgaactacccgatgatctactgcaccctcataagtaatgccttgggtcctccctgtttgcctctttggaggatccatagatatagaaaacatttactcagtggataaaggcaaattgtgagtttcatagtagaagacttacttctataagctgaccgtggatggtaagacagagttagtgcacccaaaggtacatatctgatagcagctgaaatgtagcaccataaccatcctgaggtgtcctgctcagaggatatctgacatgttcatcctggttccgatggatttcaggtggtaacaaatactccaaacaatagaatatatgcctaatacagagaccattcaaagataatatactattggatgcagccgtcagtggcaattgtttttttaggggaaaacggcaggagctctgcctattcattaagaggaggaaaaagagtttgatacagattctgggcacctccaagagatgtcacaacaaaacatgaaaagcaagacagaaaaatacagaatttttaggaagtgcatcgccaccagcatcagacgtcttcgtgttatcatctatccattttgagcatcaacaaaagccttgcacatatttatcacggaagcaattgtattttggagcaaagttacctttggagttgcgcggttaacaactattattgtgccatcaagttcatgtgaatctttcatgttattgtctacagattctgtaataacatcacagtgcattagaataaggtaattacaaaatgcatatcaagcttattgatcaaactggggaaaagcaatcatgcattaaaaatacagacatgaagtaaaaagattgaggacacaatgccatttttatataaataaagattcatttatgttaagattgttcttcgccgacaacaaagtaaaattaaagcctaaagaatgatgcaggatttctgcaaatgtacatccactctgaaaagcgatgaacacaatatcacgggtccagatcccctagagttagactacaactctaccaggtggagttgtcatgatccatgacattccgtatacttcaagggttgggattaagccgccttaatttttactacataaaaatcagtaactaaacattcaataaatagacttgcatcaacattgtcaccagataatttctgtagaattatagaattaatacataaatttcatgcttcatctattgtataaaaatcatacattggtatcgttcacttttgcatgtatgggaaagcactatattggcatacaatgccgcataggattgatcgactgtatgtgttgcttaaaaacaaaaagttgttgtgttaatttgtttagaacttaatcaaatcactattacaaaggaaaaccttaaaaataaaattctccgaacacttaaccattaatttaaggataatttattaagtgaaattgacgaggcatgatctcaaccgtatagaaataacggatggcatagatttagccaactccactcgatacatttgtacccaactctaggggatccagaccccaatatcacgatgacccctttgaatcatgttctacacattgtagttccatttactgctgattgcgacaaataagcagaatcctatattttaaatacttcttctgtgctaacttagattcaatatgcaccttccatatcaagtctcttataagatgcatatgcctaagttagaaaaggccaaaggagtccagagaatcctagctagcgttaggattagtttagacaactgtccttatcagaaccaaatgtaattaactacacaagaagagtgtctatacttgtattggtacttaattttgatatcacagagaatacataaatactgttttcagctaatcaaacatcatgtacctgtcaataaaataattccaaatttggtcacctttggcatgtaaagatgagtgatttctcctaagacttcaaaatacctgtgaataaattactctagccgttggttttggagaagccgtcgtctacgtacgtctgctcctgctcgtatgccgccaccgacgtggggggcgaggcgagcgccagcggcggtgccgacttgggtgacctgggaggggagttgtgactgctgcggattcacggaggattgcaaggccccatatatcgctggcatgcgggcgccgtacgagaggatcgaggtgggtctgcgggctctgcacggacgccatcgacgacgagcttggctgcacctcttcgcccatttcgccggcggaggcgctcgaccgcgcgccgcgccttcatctgcggcgtcggatgagtctccaccgcgccactgttggcggccaagagcgcggacgggattgatattcgtcgtctttcttctcttgctccgccgtaggctcgctggccccgttaccgggaggcgtcgagaagggatcgattggaaggggaagatatgaggcatgaggtcaaccctttgggatccataccgccaaccatcgctctacgtcgcgccttccccatcacctcgtcaatcggtgacccccgtccccttcgcgctctccccgtcgcccattcagatcccactcgcgcgcttcgccatcgatcgctgaatcctccccggcccgacgacaggaagcatcgccgcgtctagcccgaagaccggccgtcgaccactcaacagccggcccgtgtctgcatgcagccgtgcaccgagcccacgcagttcccaattgccaccaccacatctcaggccacttggacaacaacatcgagcgccacctcctcggttcacggtaaaatccattttccccatcctcctttctattcctcctatctaatgatattttgaggtttttttttctcctcatctccattatgggtacatctctgtgaagctataaaatacagagagattagcaacactaatatgcatgcctttgtcttttgtaaactgtcaggattaataaatagtatatgtcttagtatagttctgaatttatacctgagactgtcaaaaacagggcacggctatgccctatgtggttaacttatatggatcagtccatgtatgtgcccaattgtataacatatagcttgttatatttgtcagttgataaatatatgaatatatgtatcatatataccatttaatgtcatttttcacttaaatccattgttaactatcaacaccagtattttcttttaatcctctacatgcctatgattttccatctaattccttctccatatgtaacaacagtcattatatagaatatactcatgaatgatttgttgcactctgttgatgtaggaaactgtaataatgatacctggaatcatggttattgacaatataaatctcacttaacttaaatttgaagtcccataaaatacacattaagatttagacaaaatttgcattgtaccgaatgagtctattaaaaatcgcaacataccagaaatgtctacttgaatgttgtgcagaatatgtggttcagattgaaaaatggatgtttctttggtaggccatacagcatccatgatgagcaattgggtggtacctgggtaattcaaatgtcagttctatcctaactttttttcgcacaaagataaattgctatacaagcttgttgacaatcaatattgctacatctcaccattagggcagatattcataatttctgcagcgcagaactggtgacaatttggttattagttatctttatctcgcatttcagttttccatagaattacaaaactggtgatttctcattggtgctttaaaagttgcggcactggtttatcacagagaaggtgtgattgttgctctcaagaggagtaagttcgctgggttgatggttcttttttttgttgttttgagtttccctagtctttatacgagtgtacattccagttttcaatgctgaggtgggctatccctagagtttggtttattagaatatccgtgagctgtctcggtttactctcttgttttgaagcggagattgaaacctttcgttatcaaaactgagatatgtgttgtctatagaacatcagggctatatagtacaagttttctaactatggatgcactaaaatgttggatcaactgattatttttgtttctgttcatccataagtcccatagaaactgacattgtttcactttatattttcaaatgtgctttgtaaaagttttgacccatgtgcagcaaaattcagggacattacctccgcaacgctagacaagcccctgtggttgctcatgaagatggtctcctcgttcggtgtttcccgtcactccatcccccgtctctcctaggctccaacgtgcggtgaagcaccctgtgcccctgtcctacctcacgacatagaaacaacgggtgctccaccccaccgctcatcccttcctccatgaatggcagcggattacaaggatacagtacagaggatggagttgccatggacagcgaccaacacgggagagatggtagtgacaatggctggtggtaagtaattgttgtttcaatttgggattttaatttgttattcaggctttgcaaatctattcacgtcttgacagcccttgcgcaccagcgcacgcctgtgcagttgctgctgtttgtctgccaaaacgagttgaatgctcctgttgcgctaggtagagaacgatcggatacagggcatccagagcagtggacagtggaggtaaacacaatatcttggtcagggccggctctacaattttgagggccctagggcaaacttgacaacatgatccttaacgctctctcccctatagagagacgtgttatatgtatattcatattttttgggttgttcagattaatgtcattttaaaccatatcaatttttgataaagttgttaaagatgtgcatccatttagtttttttaccaaactttagtaaatacataagaaatcctgctaaaactaggcaatatcactaaattgtaaaaattttggtattgccaaaatttggtaagatttattttggctacgatatgaacagccccttcattttcaaagtgtgttttcaaatctaatcatagagagaaatgaacattgataatatttcatatatatgtttttagaaatagaaaaatatcaacacttaaactgatcttgtttatttttcccatttacttagcaccataaaaatgcttcttgagtaaaattacaacttatcagcacctaaaattataaaggaaatatatattatcaacaagaatctatctatacatacaattttgattttgattgttgaatatagaatctttattaatttactaatcagtattatgtagatactagtagataaccaggagtggtagatagtatgtaattattcactaatcttaaaataatactttggctatcatacaattttaggcatgggcccctagctaggacgggccctaggccgtcgccctcgttgccatgccccagagccgggcctgatcttggttcactaacgtactcttgttgcatgtatcaaatgttttcagtgtgcttttgaacttttagaagtaaaaattaaaggttcagaacaaatgaagttgggctattggcttaagaagtacaatctgaattctgaactttcaaacctatcctttgttcaattaatctgttttttagacaaaaacttctttctttagatatttttttgtgaaacataattctacacacagtatcttcaatcatcgcacaattgaaatgatatttattttctatgggcctaggtggttaatccattgtagttgatagtggtaaacacaacagtgatttctctgtctcacccaagaggtaatcacaggggtaatctgaacttagcggtcaccaggtaacctaagtaaaatgatttgaaacacaaagctccaggttaacaaaacatcaactgcctccgtcccattacgatttctcttgtgcgtggaaatgttttgattttttttttctagaaaatctgatggccaagaaggggacattaaaatatgcaacaagagtgaagagtgcaagactattcttatatgactcacttagagatcgattacatgaaaaatctcaacttcatgccagagttggaaaatgggattagtgatgtatttatttaaatacgtctgaacatatttcagttacaaatcctattaaaccatgcaattggcttcttagtctgttagtcatgcaacctaactttgttgagtca

SEQ ID NO: 10158 - DNA, 12229 bp, Oryza sativa
taccatagataggattcaaaacctctctctctctctgtagagcaaaaaagaaaaagctagcacagagctgctcacttctcagtatagaggcagaggcagagacgacagaggcagcgcgattctttctttttggcctcctctcctcttgtctcgctcttcttcttctccctcttcttcttctatgagacctcgctctactctctctggcggcgcggccacactgctcttcttcctctgatcgagacctctctcggcggcgcgcacactggtagcgtggtgagcggagcggtacactccctactccccagtgcttcttgttctgtatacgcatcatgttcttgcatctcacatcttgcaatgtttttcatgttctatccgcctccctcttctttacaatctgtttctcgatctattgtgtgctagcttcttttcttaaagaaaataatttggataaagagatgtcgctttttctacatctcgctcatgctgcatgcttatatatgtttttccattgagatcgattggacagccatggttccaaaataactagtttttaaaatgtttcaataaaaagagcatcttttttcttgtcttgtgggcttgtggttagtacaaattttcggtccgatgccaaccggggttttggtgcacatacgaatgccagctcctctatatagtttttggatggtgtgagaggccaccatattcatcatcaaaaggagctgatagatcgatgttgcctgtgtccatggctagggaaatggcgcgcgcggcgagattccatcggctaggtagctgcatctcatcgatccagaccaacagtatgcgagccagcgagttggctttgacgtgtgcatgcgttggggttcattgggccttcaatatatttctcttgtgaaaaaaaaggtgtcttttaattaatttaatttcgtcgtcgaccctgtcgaatgggacagtatattgggagagcaatgcaaacgatctggagtatctatcactcgatctgagcgcatatttttatctcacattctcactcctaggcgccctagctaggatctcgatcggtaattaattagtgtatcatcctaagatgaacatatactgtataaactaatcggccggtcctcctttccttgcaaatatgcaaattttgattctttatatatacgtccttataaatactggtcctcatcatttcaatcttagtatagattcggaaagagctagctagatacagcaatcaagaaatttgcgcatttatttaaatatataatgtgtgtttttctcttgaaattatcgtaccgtatttgattgtttctttgcttgccgtttcgtttgcacaggtatgggtccaaggagcacaagaggccgtgttctcatgttccttttgctggtcctgatgatggccgtcggagccaatcgcgattcaacagtacgtcttctcattcccttccctatcaatcggagagatctagctagtccttaattataaattgttcgtcccacgcttgctaattaactcacacattgctaattaattaactcgtagtgttgtgtatatatattcaggcggctggatttgcaaggacggtgtccaaggctgaagtgttggcatcacctcctccaatttcaccagctgtcaatgctgtcatcattataagaaatcgggtggttctgtcaattggtaaaatcaatgttttgaatgattagatgcacttttttatataaaaaatagatgataatgtggctttatatataatttctattattacaatacaattcatgtttttttatacgtcgttgtgtattgttatgatatatgaaagttttttcatgtacaatctagatattgtcacaattagatagtgtagcatttctctgcttcatctcaagcatgtttcaaaaataagtttgaattaatgacacctaattattatacgttatctaattgtttataacaaaacaaaactcacatcttatgtaataattggagttgtatttagaaaaataaagattagtattatctttgaggatttagatgtgtagaatggataacaatatcacacgtgattatgaactaaagggaggtgaatggatgagcaatgattaaattagatagatgaatagctagcttcttgatccaacggctgataactctatacaaatgcgatccaatggcttaaaattgttgataatgtggctttttgcatatcttgatttttatgagtaaatgcttcttagtgggtatcaactatataggaagatatgatatgcattcatttctcttctgctctatttgattgttttcaaattaagtcatgtctagtctcgtgtactagttattgcttttatggcgattaatatgcatgcttacaatattattaaccggtctcccttttattttttttctctgcatctatttaatttattttattttatcttattgtagctaatatttttagcgtagcagtctcattatggccgttttttgttcgatggagatacggttcttggtttattacacgccagattttttcagcaaaagtcgtggcgtgtaatcttgtggcatctgtcacttggactatctatatgatggttcaaatgtatgccggcggtaattacgctggagacgacgttttactgatcaattcagtaagcagcacgagtagtatgtttattttgctggtgtatttcttgcatgggagagaggatattaaggtaaatggaacaaagtcgatatgtttttaattagttgttttcttttaagttgatctaatagtaattttatttattttacatttatatagtactggatcctcatgatcctctttgctttggtggtatgctgcggaatgggatggttagtttggcaccctaacataatcatgtccgagagaacacaagacattttaaagaagtccaccaaatcagctgggattactggaatagtactattcggattggtgaattttctcccattttttgatctggtatggttgcttgtctgaaacacatacgcattctactgttgtgtccattaattgttagtttagtctaaaaccttttggttagttagagaacaaatcatgttcagtatcagtttcacactgaaattaactttggaaatgtatcattgcttaataagaggaacatgtatttattttggtaacatagtttttttcagtagtaaatagtaggtatatacctatgcaggcacaaaataagttcaggacaaccaagctaggtttcataggatatttgtgtccttgaggctaagtagcgatccaattttgaattgctgcacccaccccttgtagtatcatatttcatcatgtgcatcattatccacttcactgttcgttcctaccaagggaaatcactcagtaatgtaattagtgtggctactgtagtgatttttttttgtgtccattgtacataaaaaatgatttaagtatatgcaattttttttttactttactaacgccccatttgttttttaatttcagtggaccataaccaagagcaacagtacagacttcagtttaacaacgccaattgttataaatacgatgttggcaggtgtattgagtgcattctgggctttgtatgcctggatatttgacccaaaatcacccaattactttatggtaagtaatacattgcttgtttttgtttttactaattattaatagtttatattttctttttaatgtacgtcattacagatagcaaattcattggcggctggcatgagctcaatacaatttgtatggctgttggttctgcgcaattctcacagagaagtaaacggacagattgtagaagttgagagtctgcggtgtgtgttacttagtgtcgcaaagtcgttggagaggttgggagcagcagctcctaccgaggagttcttgcaacaaaccaagtatctgctgaggttacaagaaggtctgtccattgggctgcagtcgttggatttgatggagagtgcattccttcggctggaacaggagctagtgaagaacgttgctcgcactgctaatcatgttttagaaatgcaggataaacaagatgcagcggctaatttcgtggcaaggtctgatgacaacaatgcaaatgatgtgctaagagcctgtagaattttacgtgaaggatgcacaacgaacaagaatgcttttgatagcatgcaagaggctatacaacacaagattgcaaatgccgaaggaggagaaaacaacttgaaagacagaatcaatgccgcagcagcagccataagaggcttggccatttccatgggatacaatatgcaaaccatcaacggtcgagggattccacccacggtgaagatcgccttcaatttttgctgtgagcagattttgtcagttaaaacttgcgccgacgccccgtttgtgtggttggggtttggtggattttctctacgaaggcgtctgaacttacggtttgataacgtgaactggcctgatgtacccttgtagtacgaattgggctacgtactgtacgtgaaacttgctctaatagcttcagcgagcaagcactgtgcaacttctggattgctagctaggatacttcgtgtccctaagtagtcatatgcttgttagctctgttagtttcttctgctgcttttgtgcccgattgttgtggagtgtgatgcttctactggtgccagacagctctatatatctttccagcaaattaatttctaaaactagctagatgggatcgatgatgtgtcttgtgttgtagagattaaaactctgctctttaggcagtgattgtgtctttaagtttgctgtgttgacgattatgcactgtgattaattatttagctggtcgtggatgggcagcagacggccgggttttcgctctggctctttcaccgtcaggctactgtggtgcgagggctctgcaccgttgcccgtatttgccgctcattttcgcgcgtgacgtacgcacacggcacatcgcattgacatgagagagacaattgtgtcgatcagtttgggatttgccccaaaaaaaaaatcatcaaatcaaatatgccttctgatttgccattggaattaaactcaccaggatcctagccaatatattattttcagttcttttggagattattagtagttctttacaatgttttgtcttcttataatgctagaaaatacaagcacctgttaggacttgttgcctaccaccaattataatgctacaaaatacaagcaccgaggtgatgaggtcttcctatatatactgcaatctactactcatgttctggcctatgaaggttgtgcaggatgtacaggggagccgaatccgatgacaagaaacgctcctagttggtggatggtcttcagcagcattggccaacctcactatttcccaatgaacagaacaatcattcctccccatggtgacatcggctagcctaaaaggcgaggttttgacaccatcgtcatcttggcagcctggtcaatctgaaaggattggaacaatcggatgttcaacggcaagagcaagaccatgcgggaagtgacggagcttgcggacatggaagccgcgctctgacgcgaggcaggaggagtgcccatttaagtggcggtcatctatgaagttgcgagagattggccttaggaaaccaagctcttttttccttttctttgcatgtacatagttgttgaacctatgtggaacatctaaatcctgatattaatacaaaagacacgcattttgtgtattcatgaaaataaatgagagaaacacgtaccgatgaacatagattttgagttttgtgtcacttaaactagggattggcccgtccagctttgtgcggagctagataattcacgttgttaatataaaaatatgtttttttttgagaaatcacaggaggggagagcttccccacctgaatcttccattgagaagagtgaacatgggagtacatcattacaagggccgatcacagccagcgttgtgccactaagaatggtgagaagaaagggggcgggagagagtagctttccaagcttggattacaattcaatcgccgcgcttaagtcttttagcccacaaatatgaaatttaatttttattagtattattacatgtagaagtatatttggatttcatatataactcttagcttctatttctataaggtatggatttcatatacaactcttggattctatgtctacatgcttagatttcatataaaaatattaacttttatttctactagcaaaatacccgtgcattgcaacgggttaagaaagaaaaaagagaaaatttaccattgtcaagcactttgccatgcattttttctaatgaaaaaaaaatctagattacccctaaactatcatggtcagccccctgaacacgaataccagacatttttcaccctcaactatttaaaacggacaaataacccatccttgtccatattcaatatccggaataattttggccctatgtggcattgcagtcagcattttttttctaaaagataggtgggccccacctatcatacttttccctttcccctttctctatctttttctctctctccccctccctgccatagctgaagcttgcgacgacgttagtggctggccctatcaggcctcgtcctcctcacagcaaacacactgccgcggtgctgcttgcccacacagaaggagccccgatagcatcctacgtaccgtctcgtcgaggtgtaggccgaggaagagaagcgtgacagcggctgcctccttgagtttgagatctgcaggctccttgcggcggaggccgaggaggagatgagatttgcggctttctcaagagcgagatgccagcacgagtgcgagatgcgacaacgacagtctaggctgagaaggtggtggcggcttcttcgcagctgttgtccgtgtgtcatgctaggagacgacgacgagctcatcaccgccttcatgcaagctccagctccgccaccattgccccctccttcgtgcgagctccggctccgtcaccactgtcgtcaccttcacgtgagatctagctctctcgcctccacgctccctgaggcaagagacaatgtggtgttacactaaatatttgctaataacggattaataaggcttaataaattcgtctcgcagtttacagacatattttgtaattagttttttaatagactatatttaatactttaaatgtgtttctgtatatccgatgtgacatgacaagaaaatttcacccctagatttaaatgcagccaaaatacatcctttttaagctgaactagatattttgcgtgtgccatcacccatggtcctccgtactatcttttttgtccttttcttttggtacggcggttataaatgaatattgcacctttcttatccacactcatactatatcggcatgttttatatacgattccttatatcaggatggcttagctattggtatttgtaaaatagtgaaatatgatttaaataagccggcatgatgtgaaattgttgtattattttttacccgctgcaacacactggcacctaactattatttttaaacacaaaaaactatttatatttgtagagcgatgaactataagataatgccagcgagcaattaacaagaacaagacagaaatcaactaacaagtagcaacttctcattggttgtaataactagcgtggcatacaaagagtttcagatgcctcttcagagtgaaggcaacgcttcccacgcatcccagtcatagaaagtttcagacgcctccgaagattgaagttgaaggcaccgcatcgcagccatagaaagtttgagccgcctccgaagactgaaggcaccgcatcccagcaagagaaacggagtgtcagcacaagttttaattgaccacatatgctcacggcaaaaactaaaagcgattctcattgtgggtggaatgccttctgcaccgttgatcctttggatccagggtcccaaaaaaatagctaatatcctcgtcatcccagatgcaagtctgatgttggcctgcagcttttccccggctcctgcgacatctaatagcctgtcatttacagatatctgaatgtcattaaaaacaatcatgtttgccctgcatatttcaagaaaactcctgtaagctgacagggcaccatatgcagctctctcattagagacggctaagaagacaaccacgctatgtacacaagccttatcagcagccttgtccacttgtttagattcaagacgatctctatttgcggcgtcaattgcggcagcagcaattgcagcaagcgatgcaaccttgtccgcttgtttggtttcaagacgatggaaggtacgctccattagagagagcgattgccatgcaatgtcaaggttattttgtaacttgaggagatagttcctggtccagaatgatttggtaggaggggcagcacccaatctctccaaggattttgagacgctgcgaaacacggatgccaggcgctggacaaagggaatttgcccctggatagccattgtaggtaatttccaagatgtaattaaattgcaatccggcggctctgacacgaagaagaggacgggcagatcgacctgaaaacaactatcctatctctgcagatcgatttgttgcgatgagctgagattgacggttgggacttgggagttatatggagccaggcggccggcggaagtagaattgaatccgactacgagtccgagtcaggtacgctaatagtggagtaatacggagactaaaccggggtcggccagagtaatggactgtttgtaaaccaaatttgaaaaatcaagtttccttcttatgtctggctggaagatcaaagaacagcaaatcatcaattgattcatttgccagctagtactccagttgaaccatcagttatcctaattcattcccttttttctaatgttcagagtacaaaaattcatttctggtaatgagatgggatcgctgtctcccctctccgctatggcatctcatctactccgatcctcaccgagcataactttgactaattaatcagagtatcatccgcaaccgaaagtaaacatgaggaagagagtcttcctcccctttctctaatttgacagaaaaaaaaagaagagaaagaagcaattagtcactaacagaatttgagcatcagtcttgtcgatcgatcagcattatctgctggtgtcgccgccgggcgccggtgatggtgacgatgaggaggaatactcccatggcgtcatgtccatggggtagctgccgagcacccggaggaaggaggtgaactcctgtatctccgacagcgcgttctgcgccctgacctccgccatggacgcctggaagtcgatgtagaacatgtactcgaagtgcttggccgtgcccacgttggcgtcgtcgacgagccggatggggcggtggcggtgtgggcggctctcgatcttggtgaggctgatgtcccggaacgcgaaggccgacagcaccttgaagagcaccgacgtgccctccctgtcgtgcgcgaacacgatgctcgtcttgaatggccggtccgttcgcgggatgatgggctcccgcgccagcatcacgaaccgcgtcacgttcccggcgtcgtcctggatgccgtccgcgagcacctggagcccgtacagctcggcggcgcgggaggacgcgatggcggcggtgtcgcggagccccgcggcggcgacgtgctcggcggcggccgcggtgtcgtcgaaggcctcgcgggcgacgttgaggcccatggcgttgagggtgagctcgcactgggcgagcgcctgcgggtgggagatgacgcgggtgaggaggtccctgcggacgcccgggagcgcgaggaggcagtggtggacggggagctggacctcgccgacgatgtggaggcggtggcggaggaggaggtcgtagttgcggtggatgctgccgccgagggagttctcgacggggaggacggcgcggtcggcgatccagagctcgacggcctggaaggccacctcgaactggtcgcaggggatggcgtcgcaggaggggtaggccttcgccgccgccgcctcgctgtatgcccccgggacaccctggtaggcgacgcgcagctggctgccgtgcatgggcgcgggggagaggtcggtgatggtgagcgggcgagggaggttggagacggggagcagatccaggtcgagcggcggcgcggcgtggtcggcgagggcgggcttgatgctactgttgctgtcgccgttcacccgcgggactcggcggatggcggcgcaggtggcgtgccagtgggcgcgggagaaaggggtggcgcacggcgggcggacggccgtggatctggggatgtgggcggggcgcagcgcgggcgaggtttccatcctccggcggtctccggaggcgaggcgggcgcggcgaggggttggtggcgggaaagggccgcgtcgcgcggcgaggcgcggcgaggggtagtgtaagtgaaagctaagcaaaagaagaaaggttgcggtgggaggagacgagacgccgcggcgccggcgtgagaagagaatgaggtgttcccggtggttgggtaggtgggcactaaactatgaactatcccattcccaacgatgaagatgatgacgttgcatcttttactagtcttgctacacgccacggagattttttatgtttttccagtttactttcagtggtacaccgaccaaagtcaaatttgtttttgcaagtgcaatcctacgtttcttttctttcctctttcacagtttcaacacacacaaaatatagtacagatgtacacaaatcacctcttgtaactacaaccttctcttttcgtcttaaaaaaaataaattaacctatattgaaatgagacgtaccataaaacaataaatttggatagttctccctttagatttgtctttagatttggtgtcctacattttattctatctaaatctaggttgtgttttctttttacggatgaagtactactcacttagaacctaatcctttaaaatatctcaatttacatcagaaagatgttttggcatcgttggctcgtccattccacattaaatggaaccgaacaatcgcaacggccaaacgagcttgccattagatcacacacccttagatcatgtataataaatttccattagatcacacacctttagagagaacagccggtgtgatctccattggcctccggcgtcatggtatcaagggccagctaccgacgcgataggaggaggtacagctagcggtggtgagtggcatgaaactataataataataataaaaagaaaatcctacaacctacatgaaactaatttttttcctcttcctctccttaatcctagaaattaatcattttaaattgctaactaagatgctacatggcaccacatcatctcagaaaacatcttagtttgacatcaaggatcaaaattaacgactttaagagttggggaaaaaataaatggtttcataatcaacggaccaaagttggactagagctatagtcaattaagggttcttatatatgatacgcagtactcccttcgtctctaaatataagtgaagagaggataaaacaaacggcagagctgctgcctctgtcttttcccagcaataaaaaaactctctaagaacacaaaagctctgaattctatgatgctattaacttttcataaacgtttgatcatttattttattaaaaaaatatataaatataaaaaatatatttaaataaaactttaatgataaattaaatctcagtaaaattaataataactatataagtatattttgaataacagaatgatcaaccggagatttctgaatccgtcgtacggttccggagatgtaaaaaacaagcacttttttccaaaccaacgtgaatattacagtcgccgccattgcctcagctctttgcaggttcactcaccgccctcaatgcggtcagtattcaccagctagactggtagggaaaaagaaagatcaaactagctagcaagacatagttcctttctttttcaacaaaatctatgttaattgatattcaacacggatgtcagctacaaataaacaacaggaatcttggtgaattttacatgttcaaatagcacaacaacgctcttggttctacaacgatgcaactgctaggcaaaatatttggatttaatacacgtaaggaaagatcctccaaggca

SEQ ID NO: 10159 - DNA, 9566 bp, Oryza sativa
aggcggggcgatcctgctctacaaggccatcgcccgccgcatcttcccgcgcgagtcgagctaggagtacctcttcctctccgacgagcactacgcctaccgtgtctgcaactggctccggcgcaaggggctcatgccgctgctcaaggtcctcgagctcccggaggtgtacatgaccacgggcaaatgggagcagatgccctacacgcgcgtggtgtccgtggcgatgcggcagtacaagactacaagggggcgttcgagaagcacgacaagtcgggcgtcgccgaattcctagacgaggtgcgcaccgggaacgcgcgggtgcatgtcggcgcggccatgccgcacgagctggtggccgcggcactcaagcacgagcacgactaggccgcgagctccagtggcgctgggcggtggcggcgacagtgacaccaccagttcgaccgaccgtccccatcttctcgacgacggtgcacggggagaagggctgacaggctggggcgtgcgcggcagcatcaccaagcaggaagtggacaagcgacgacggcagcgatggggatgacacgacggagggggcggtggcgacggacgtcgtctgcgtgtggatttgcagcgcgatggctatcctcggtttcgccctggataggtgggcagcgagttggtggtggtggtgccgcccggactcgagttatatcgaaggtcgccgctcatctcttcccccgtcggcagccgccggcgcccacgcccgccgcacagacctgccatgcccagctgcttccccggcggccaacgtttcgatccaatccggcgagagagaaagggagaggatgttgctggggtcggcggcgcttcttttctttcttctattctcttctcttctggccgcctgcagcagatggggagaggtggccgtcgatgcctccgcgcctctcggccttgtcggcagcggcggcgttgtcctccaccgtcgttgctctccccacgaaggcctcggtggctgatgccgcggctgttgcccgccgccgctccaccgcccatcgccctttctccgcccggcctcgtgcacgtgtgtcgtcgtcatcatcgtcgggtgcggcgacgtaggtggaggcggaggctgacgctgcggctggtgcccgccgccccttctccggccaggctcgcacctgtgcgttgtcgtcatcgtcgggtgcggcggtggagctcggtcgtcgacatgccccgcctcacccacacagagaagacagagaggagtaaagagagaaaggggaaatagaggtgacgacgtgtcacctggcatgtgggtctcacgcttactcaactgccatgtcgaatgaaaccggggtaaaaaccgcccgaggaccaagagtgaacagctgccatatcgaacgaaaccagggtaaaaaccacccgaggaccaagagtgaatggtttttgtaagttggaggatgtcaaatatctagtttttgtggttagggacaattttataactcgatgataagctgaggaaccttaagtccttttaagtgtactttttccggaggaagataggacggaagaaggatgggctgggctgggctgggctgggctgggctggagaaagcatgagtcacactcacggcccggccccctctcccgtggctcgtcatcgtgctttcaccccgtgcatgagacgagctaacaacctttaattggatgtttctccggtagggaacataagacaatgaatgacttgtgcagtggtgaagatagtgataaacaaaatatatattttttaaacttcgttaaacatattatgaatgcaaaaaaaattaccattaataaatcatggtaaataatttgttgtcataaaaatatactccctccagtattttaatgtatgacaccgttgattttttcgaacaacgtttgaccattcattttatttaaaaattttatgcaaatataaaaatatttgtgccatgcttaaagaatatttgatgatagatcaagtcataataaaataaatgataattatataattttttgaataagacaaatggtcaaatgttggttaaaaagtcaacggaattaaaatatggaggtagtattaattattttcaatcattatacttgcattctaactatacgcttcttaatagtttcatgggccgattctagaatgaaaaaacgaaccccgtgctggccgggtttttgtttttgttttgcggaatgactttttactctgacagtgtgaatttgggtaaggggagcactattgcaatgaactatcctctctacgccgccgattctatagaatagaccgcaggagagtgaattatattcgcttttcagaaaattaactagctagtcaaagccgcccggtcagttgttctccatcttgtcagcctcagtcaaaaattaagatttacacattagcttttgagttaattttgatgtttttaactgtagtttgttttttagtgttgacttttagtgatcggctgtacaagtcatgtgcattgtgcaatatgtgcatcatcgcgatcttctaattaattcctgtaagggagggaggatccgagtaagtattcctatatgggggattcgggtcatatataatcagtactccacgaaacgatctactacttcacaatcagtgttgtcttggagaatggagtatctaaaagaaatactagcaggactgtacgtaggagtagtctgtactagtactccatagtgtactccgtttctttcttatagttcttcggaatctaactgctaacattgacctcttccgagtctaactgcattgaccagtgacacggcgaaaacaatcactgaccagtgatcgatacaacaatacgtttcccatctctacggtctacgcccacgtttcacatcttgtgctaatattagctccgtttctaaatatttaataccgttgattttttaagcacatatttaaccgtttatctattcaaaatattttatgacatatgtaaaactatatgtatatatataagtatatttaacaatgaattaaatgataaaaaaaattaataattacttaatttttttaataagacgaacaatcaaacatatttaaaaaagtcaacgacgtcgaatatttaagaaaacgaagggagtactagctagctttagagcaagtataatagtaggctataagctggctaaatgctgaggtgtaagagagaagagaggagaagcgagcttgacggagcgcggcgctcctcaccgggagaccgcacaggcccccctttgccggttcggccgggggctcagggtgagatctcaagctctccgtgtatgcgggaagatcgcgacctcccaaaagagcatgaaacacaagcgatgtatacaggttcaggccgctgagaagcgtaataccctactcctgtgttttggtggatctgtgtatgaaggagctacaaagtgtgagccaacctctccctcgttctaggttctgaatctggaaaagatcatcccctttctctatgggccaggtcctccttttatacttcaaggggataccacatgcacccctctctttccaaactggacttttcttctcttcataaatggacggagatttgcacggtcgtcctccgaacatcctcctgacgggacgacacacacctacctccacttctgcctgaggcgggcacgtcgtgggaaggcggctgtgtgctgacgacatgagcagtgtcagaccggtcacaaatcggtcattcttgtccaccacgcgtcggcttagcaacgtgcatgcttgcccttcttcaaacaacatcttgcttgtaatggttaggatgaagcctggcatatatcgatcggggctaacgtgtcatctctgggatgtaacacgctagctccagccggagacgagtgcctagaagctctcgtcttgacgggatggggcgaagcgtgcgtcagaccgcctgtcgccacctaacccgcgatttgaccggtctgtgactggtcacagaccggataatcgagtgcactgcactgcacttcgtgcggcgtgacacgcttaaccgaggcgcaataaatgcggttaggtgagccccgctgtgctcacctaacccatacacgtggagtagaaacgcgaggggtcggggcgcctcggccctcgggggcgaggcaagagtggtccaaccccccccctcggggagaccaagaggtgggcgcacacatcaccctcgggcccgacgtcccccgagggtgccaggccacgtgggcgatggtgtctgcctcaagcctctagtcatgatactcccggtcccatgtcaccgacagagctgtaaacttacagtcagcttggacacaataaccaagaaactctatgagagatacaagtaggcactgtattaactataaagagctaactattatatgggtaggctgagagaagactataaaaaaccttatagccaacctgttggctgtattattagccttgctcttattgcatgggctcttcctgcaccgtctccatcaccgtgaactactccttgctccgttcttcttcttcttccatttttttactttgggtagtgcaattcaaacattaagtgatgggtgtagtatatatgatcgatttaattcagtgggacgacacgtgtgtttgctttcttgcttttcgagttttcggtcaaacctagctaggagttacttcctccgttccaaaaaaaaaacaatctaagtgtggatagaacattacctagaacaacaaatctggacatcacaacgaatatggatattctgatgtccagatttgttatcctaggtggtgttctatcctcaccaatgtttttttttggacggagggagtaacccctacgtatggaattagtcttagcttttattgaggacaagaattagtctttgtgtttgaatctcctgaaaatgaagatgaagataaatattaagtgtttcacgtaaaatgaggtggtaataacatgtgattaattaagttttaattattacaaacttcaaaaatggattaatatgatattttagaacaactttcatatagaaagttttcgcacgaaacacatcgtttagcagtttaaaaagcgtgtcacgataatccaaattttatcctctcttagtaggagaaacgatcagggctacatgtcccctaaaattacttgtagcaaggtcctatttgattaaagcaatgtcagaggaattttaaggatttcattcctatgaaactatttttctagacaaccctttaaataaaggaatggacacaattaaatcctatgaaatttttatataatatgcctcatgccatataagtttaggagaaaatctaacatgaggtagaatgtcatggaaatttttctttaatgttttttatcctcctatagttctcacgtttttcccgcggtttaatcaaaatattatttctatgcttcgtaattatttattctaaacttgtatttatgttagtatcgtactttttcttattcataagtcttctcaatctcgtgtttaaagggggcctaagtagttatcgtgtatctaaattatattaccatggtaatcatgcattcatgcatgcatgatccatggctgctttattttgctttgcatctccacaatgtttgtttaatttgtgtgagatgtcatgaagaatggagctagccgaggcttgcaaatgaacatgcatgcatgcaacttttttttttaaggcatacatacatcatatagtactatatagtatagtagtaagccagcacagactgctcctactctatatatttacagcagctggatgcgacttccatattctggttgcggaagagcttttatttgcccttcacacaaacccatccttgggtgcatgccttcggcaaaattcaaaagtactagtattaacctagggcccaaacccaattacgtatgactaatactcaagctaaaattttcatgattattaatatagacctaattataaatgcttgaattttagcttttcaccaaaacttggtgagcattaataaccagcctatgccatatatctttctcgaacccttgaggagatgtatttcctacctcaaatgtgtgtgacattatattgaagatcctttgtcttttaaataatttgtacacgtgaaaggttaaaaatatatttacatgtaattatttttcattaaaaaaatctaattaacaatattttgatatgtcttgttttagaacgaatgatttcttttaatacttgattttacgcttatcgcttgcagccaaaaattggccttttaatttgacttgttttcgatgttttcaagtgtatttatttttcagcattagctttcatgtcataagaacacatatataaaaaatttacctataaatatttttcggtgaaaatgttactgctcataattaattaatgagccttcaaaagaaaacggtgtgcttacatttcatagaaacattttcttgtcaaatattgtcacaagtatagttagctttttaacaccacagaaactatggaaccatacttatggcatcgaagtttgacaagttcacggagccaaccaaacatgctccgttccggctgtaaaaccaagatagcgagaaaccgcgaggagcagacgagcagtctacacgctttgtcctctctgttttttttttttggcctggatcttctacgccctttcaggatctcgtgctccacttcttcttcctactgaactaactgctcttcttgtactctctctctctcgcctccaattcaccgacgtctctttggcttttgctgttgaactttatgcagcacatacatacatgcatactggtcgcctactagctagtatggttgcggagccacagtctctgccatgcctgcaaatttgtggtgttcaaagatcacaaagggatcaaaagattcaatacaattgtacccaaagaaggatcccgagacccctaccaacggaaaagctgcattaatctgcataccagtatgaaagtttaggtccattctttttcccctagctttgccggtgtacaaacagggagatgaacgtactgtccaaccatctttcatgttccaagcttaaggtgatatttgattcaggaactaacttttcacattggatgtttggacactaattagaaatattaaacgtagactaataataaaactaattacataaatgagagctaattcgcgagataaatttttaagcctaattttagcacatgtttactgtatcatcacataggctaataatggattaattaggcttaatagatttgtctcgtgaattagtctagggttatggatatgttttatcattagtatacatttaatatttccaattagtgtcaaactaaattacgagatgtatacatactttgagagaaaatataaaatatggagcgcccaactatgtgtgctttttgtacaaattttttttctttggtccataatatttgtttgttttagagttggacacaagaactaataaggtagataaaatggctgttttgttcagttaatcattccaaaaatgcgcatgtatacatggataaacaacttagttatgagttaattaaggaaggggtacggtacgtcagaccaaaaaaaagaccaaattaagctgtctatcgaaattgtaggtcaacaaatattttgaggactgtaaaataggttaaaagtaagtattttgaaccgaagagatcaaagtagaaaaaaaaaactctgacatgcatgtttcatgcaaatttcagtaggttccaaaatatacactccctctatcctctatcccctaatataagagattttgacattttatttgcactgcttgaccattcgtcttattcaaaaaaatttagaaattattatttatttttttgacttactttattatccaaagtattttaagcacaacttttcgtttttttatatatgcacaaattttttgaataaaatgagtggtcaaatagtgcaagcaaaatgtcaaaataccttatattatgggacagagggggtacttcacttatcgctcttttcaacatttcaaaattttaatgcaaagcaataaattaaacaaatcattaccaacacaaccataccaaatgttgtcacaccgaaaataactttgaaagatcactcaaatgtactatactctattgtttaattaataatatgtaaataaaattctctgagtcttaaaaagaaaactatgatagatcctttctagccaaacatagtttgccacatagttttggctccctggaacttaattgtcttagaacatgtatgcatgtttgaaaagttgttttgactttctttccaaacaacaagcaagctaggatacatgccgtaaactagctagctgcaagcctgcaaattactgaagaacaaaagcttttgctcagtgtgttgaggatcgatcgcctctccatttgtaagggacggttctttaatttgcccaacgggcagaacggatcatattgatcgatctactcctgcgcagcacgctgttcaatcaatctttgacctgaccgaacgtgttgattgtacatgtacataggagtatgtactccggtcagttacaacgggaaaacagctttgcttcatcagcacaactttggacctcgctcgctcacatgcatgtatcttctttttttttttttggttatatatagtactccaggtcgtagctgggggtaaccagctaagccagaaagggagacgcctggcctcgcacctctatccctcaatttatttttcttcattctccgatgtattgtaatctcctcatcaagctcgttgggttcgaatcatttgtgtgccacagtgttacattcgggtatacaagcagatatagcgaccgtctctaacaaaaggcttgtaaaaatcaggtgaatgccggtgaaaaatcattttttacatgtgagcttacaactccaaaattattacaagtggatattttatggcatgcctgtaaaaataaaacgctagcgaaaatgatttttttaagtagtgattttgaggttcaaaagtaaaaaaaaaaatcacatttgttagataagaaatggcaatttttatgtgcaattgaactacataacaattgtttcgtatgtctctagtgtgactattgcatgtacttgaattctcacaaataggattaactttgaagttgaattttttttgtgggctttgaaaatgtacatgacctcttttaactgatcatgacatttcttttattaacttttggacctgtaagtatgcattttctaatttgcacccgtataaaaaactagggtatatatatttgctctcgagatgtacgcactggtgaagaacacctggcttctgtagcagtggttgatcgttaaaaagaagaatattgtgctgcttgcaactctagctaggacggacggggggcaaaaatgctgtggtgcaccgtggtacgcaacgtaccggaagactacctaggtaggttcaagtgagtcgcaccaatgcaatgcagtaccatagataggattcaaaacctctctctctctctgtagagcaaaaaagaaaaagctagcacagagctgct

SEQ ID NO: 10160 - DNA, 29762 bp, Oryza sativa
gcgtcatacattaaaatatggaggtagtaataattatttaaatttttttaataagacgaacggtcaaatatatttaaaaaaatcaacggtattaaatatttagaaatggtgggagtattagatggggtctaatcgagtattagggtgagtatgttttatcagaactttttaactgaacaaacaggaaaatgtaaactgatgaggccacacctagcacagcaccatgactagactatgatcatcaattacaagctctaacacggaggaattacacctcatccaatcaagtgttcactgtgccttggtttgtccattttttaggacaattttttggtttgcgtttcttagaactggagtgtttttttttatttacaaaaccgaaccaataaactggaaaatctacttgttagttgttagatacacccttatatttgagtactgctacacatactaaaatttttttacaaaactcttactaacaaatttctcaaccgtttaatttaactagatggaagttgcaataaatctagatttactcacagcttgccacatcagagtttgtaaacattttgtaagaaaattttagtacgtatagacttttcccttatatttaatccctttgcatattttttattaaaatcctaaataaagattgtagtactaggctctcttttagcatagctctatagatccaagatctaatagagcgggggtatttttaactttacaaatcgacaaatctagatatatgattacatatataacatttgaagaaatcaatttattcatattttaggtgaaatttaactgtaatttaacatacaaatatcaatcttcttccagtttttttttaaaaaaaatcaatatgtttgcgctcatcttcttcctcactcgatcagttccccaaatcccccaccctatccaaactcttcctcccccgatccaattcgactccactccatctccctcctccggatccctaatgcacaaggtgtagaattaaattccggggaaatcgacggagtcggaggtaggcgtagcagcatggctggaggagatgactggtcgaagaggacgatcatggaggaatccctgcagccgccggcccacggcgctgcggcgactacaccttgggtcctcctcgacatccgtgctttcatggccaaccaccgcaacgccaccaccgccatgtccgagaccaggagcggccaccccatcgaggtatcctcgtggacggcgcctccgccgcgcgtctcctacatatgcgtccactgccctggattggactccaagaagttcgccaccgagcccaccatcatcgccgcggaggccgacctcctcctcatccgcgtcgccatggggcgccggaacatccgcttcaagagcagcttccatgactacttcgtctaccaggccaccaccccaaccccgaaactcaccttgctcccgccccctcccatcgacaggttcatcgaccacgagcttggcctcctgcgctgttgcgcctctcctgattacattgttgctgcactctgtaacaccttcgaatcaggatactttgagtatgacctccacatctactgctccggcgctgatgcttggacctgccatccaatctccctccatggcctggtcgacacatcatttacccatatcaataccaaggcaatcaccattggagggaaggcgggcaccatgggctgggtcgacctctaccgtggtattctcttctgtgaccttctccgcgacaccactaagctccgctacttccccctgccgccgccgctcagtcccaacaactcgttaacaggctctccaaggcctcatcgtgacattgcccttgtccaaggtcggatcaagttcatcgagacgcggcttcatgtcaagccaggttccatcatcaacggcaccttcatctctcaaggttggactgctgccacctggactgcaccggacaccaatccctggaaccaaggttggcgccaggactgcaaactcactgcttccgatatctctgttgatgacagcaagatgaattttgagttgctgcctaagcttttcgatgaccaaggcacacctcagccaaccttggagagacttcatgtgggtcatccaacgctcagcttgcactctgatgacattgtttgcttcatggccaaggccgaccaatgggacgacgatgcttgggtgcttgctgttgatatgaagaacaagaggctaaaagttgtggctgagtttggtgcagaaagaacccttggcattggctatgcctacatgagcagtaacatatcagggtatcttcgtacagctccaggtaactatttgttctgctgattcatccctaaccctgtgatccgttccaatgctaaccatcataaccttgcctgctttcacaaatagcaaacctgcatgttgtaatcgataagaatattaaacctattagatcgacgcatatgtatatatgtatgtgccctaatcaattggaaaacacatgtttttatctttcctaacaagaacaagggacatcgctgttgggagccctgtttctatggcattgggtgtacaagatactccagttcaggatgctaatatttgtctggtgttaacaagatacttgacacaatatttgtggggacacacttttggtgagctgataaaacatagtacatagatagatataggcaaataaatcattgaagggaatgagatttatgagcaatgcccagttaaaactgtaaaatggaagccttcttctataattacaatacattacctaacaaacagatggtggaaacaaaaactgcatcatggcttgtgctttcatggaaatagcacatcacctaggttgattgtttcgctatggaattctattagagggaaatgatagaaatgagagctactatttagttgtcattgagccaggattttttattttgctggctgcaggtatagagggtagcctaaagcgacaaggggtttgttgaccgcaccctcacacaagaagcagacccatatgatgcatatgtctcctccctcttggaaaggtggagatcaacagaattctgtgggaggtgaagttgattacatggattttggatgaggaggggcatggctaaggggagagcattttcatgtagtattgctgttgtgttagacttcttattgcttgattatctactgttttgtcagttctatttacgagggggtattgctggtactttgtaccgaggatgactatctaagcacaaaatcttaagagtgtagtttatgcctctgtttatttcttatcaatgtagcgaggttgtaaaccgtatggtcctctcgctggtgtcaaattgctcacaatgtgagcctcctggtagcattgggcgtcttaagtccgattaatctggaagctgattacatggattttggatgaggaggggcatggttaatggttagagcatgcatgatgcaaatgtctggaactctgggagcagtacaacccgatgaaaaagaatattaaacttgtctagctcttcaagtattgaggatttagtacttgttaatttcaggtacaagtagcagagtgtctctctctattgcactcattgatgaaaccttagttgacgcttacaggattgtttctgctgtaattctactagcactaatagtatatgcatgctttagtaaaatgaatgtcgattagaaaagaagatgtgccaaactgtgctacagtgatagcagtatatatttatcgaccggtccatggggagagagatatatacacatctctgcgttcatgtgcttgttcttttttgccgggcaccaaaccaatgcaagggagtgtagttgaaagcaagcaatttaattgcaatcagatgtcaaatatggagtactttctgcttatgcctcatccgccacccacggcgttctttcccgatggatgacgacgaggtgagaggttaaagaagaagaaaatgaagaggcaagagcagaggcaggcgtgagctcacctgatcgaagaaggagctgggctcgcccggagacgaagagggctgagagaagggtggcgggcggcaccactgcaatggaatggaggacggccagcgagcgcggcggcggcggcggagacagcatcacagcttgcctcgatctggtgcgtggaagtggctctaaccaacgggatagtgggctcccggctagtagcatatgtgggccttctttttagcaggccggccttttaacgggcaactgggctggctatccatcatcttcatcttctcttcttccccggccaattgaattccactccaccgtcgagagcacagcacggccaccgaggtcacactccgtttccctaaattcctcaatccgatccgatttcttcttctcacccaaaaccagaacggaaggtgtgtgtgtgtatatatatatatctactacttaataaaaaataaaaaataagaggtgcttccatcgtccgtcaaaaaaaccacgagaaaaaaaccgagcgaaaaaaaccggacgaaaaaagagtccgatcccaaaaaaaccgggagaaagaaaaaaacgtccgatccaacaaaaataaacggagcgaaaaaaaactggtgaaaaaaaaacgagggaaaaaaaccgggcggaaaaaagagtccgatccaaaaataataaaaaaaaagtccgactcgaccgattcctgtccgtcaaaaaaaaatagcgaaaaaaataaaaaaaaagtccgattgctataagaaaggaaaaaagaaagttcgactctagatctaaatcacccttaaaaacgaaaaataaaattgatgtgccggattaaagatctgtttgcaaaaacgaaacctaccggtcgagagcattccatttttatatgattttaatttttggatctatacttttgcatttgagtccctgtaatttttatatttacatttgagtccatataagtttgaaataaggtattaaggtcgtttttgattaaaaaataataaaaggggaagaataaagacagaaaggtgcataaaaagaaaaagaaaaaccgcacaataaaagaaaataaagaaaaagaaagaaaaacaacaacaacaacaaaagtccgtttctcctaagtggcaaaaaaaaaccgtagatccgattcctataaaaggcaaaaaaaaagtggtgaaaaaaatgctagatctaattcctttaaaaaggaaaaaaaaaggtctaattgctataaagatgaaaaaaatcccaaaaaacatctaaaaaagttcgtccgattctctaagaagaaaaaatggttcgtaaaaaataaaaagctggttcatataaaataaataatgcgcgcgagaaaaaaaatgaaaagggcgaaccaaattccgatttctaatcttcgttatgtctaatctaatctaactatttaaaaagagaaaatgcatgacaataaaaacagttcaaagaaacgtgtgagaaaagttagaaaaaagcgcaaaaaaaacacgctaaaaaggttttccatcttccgtaaaaaaaataaaaaaccgcgtgacaataattatttccatcgtcggtaaaaaaattacttaaaaaaaagggaggaaaaaactgtcagaaaaaacacgccatttctaaaaaatggtttaaaaaaaccgtgcaagaaaaaaacatcgtcgattaaaaaataaatcgctctgaaaaatctgtcagaaaaaaaagctaaattgatggacgcttgagccggataggatccatcgattttttgtcatctactacacggttttatttcatcagaaatttgttttaaaaaaaaacatgcgaggaaaaaacgcaccatttctaaaaaatggtttgaaaaaaccgtgcaagaaaaaaatcttctattaaaaacaaattgctctgaaaaatctgtcgaaaaaacgctaaattgatggacgcttgagccggataggatccatcggttttttttgtcatctattacacggtttttatttcgtcatatattctcctgtattggaaaaaaacaaaaaagaacattcgaaaaaaaagtaaaaaacgcacgagaaaataattgttagaaaaaacatgcaaaaaaacacacgagaaaagaaaagcaaaaaagggagaaaaatatggttttcgtcgtcagtaaaaaaacaaaaagaacatgctaggaaaaaactgttagaaagaaatgtgccatttttaaaaaatggtttgagaaaatcgcgcaagaaaaaaaatcgtttatagaaaaacaagtcgttcgttaaaatacaaacattgtcattgacatgattatgtatgaaaaaaatatattatcattagaatttttcacccgttgcaacgcacgggcatttttgctaatatatatatatatatatatatatatatatatatatatatatatatatacacacacacacacacacacacgtgtgttgttagatcagattagattagataggaaaagattgataaattcacattcacccagaggttaagtactccctccgtttcgttttatttgacaccgttgactttttagcacatgtttgaccggtcgtcttattcaaaaaaaaataaataattattaattctttttctatcatttgattcattgttaaatatatttttatgcatacatatagttttacatacttcacaaaagtttttgaataagacgagcggtcaaacatgtgctaaaaagttaacggtgtctgacggagcgcggcgctcctcaccgggagaccgcacaggccccccctttgccggttcggccgggggctcagggtgagatctcaagctctccgtgtatgcgggaagatcgcgacctcccaaaagagcatgaaacacaagcgatgtatacaggttcaggccgctgagaagcgtaataccctactcctgtgttttggtggatctgtgtatgaaggagctacaaagtgtgagccaacctctccctcgttctaggttctgaatctggaaaagatcatcccctttctctatgggccaggtcctccttttatacttcaaggggataccacatgcacccctctctttccaaactggacttttcttctcttcataaatggacggagatttgcacggtcgtcctccgaacatcctcctgacgggacgacacacacctacctccacttctgcctgaggcgggcacgtcgtgggaaggcggctgtgtgctgacgacatgagcagtgtcagaccggtcacaaatcggtcattcttgtccaccacgcgtcggcttagcaacgtgcatgcttgcccttcttcaaacaacatcttgcttgtaatggttaggatgaagcctggcatatatcgatcggggctaacgtgtcatctctgggatgtaacacgctagctccagccggggacgagtgcctagaagctctcgtcttgacgggatggggcgaagcgtgcgtcagaccgcctgtcgccacctaacccgcgatttgaccggtctgtgactggtcacagaccggataatcgagtgcactgcactgcacttcgtgcggcgtgacacgcttaaccgaggcgcaataaatgcggttaggtgagccccgctgtgctcacctaacccatacacgtggagtagaaacgcgaggggtcggggcgcctcggccctcgggggcgaggcaggagtggtccgaccccccccccctcggggagaccaagaggtgggcgcacacatcaccctcgggcccgacgtcccccgagggtgccaggccacgtgggcgatggcgtctgcctcaagcctctagtcatgatactcccggtcccatgttaccgacagagcccccggcgttatgccagggcgatcgcccttcttatgggaagcggccgggcgtgacgccactcctaaagcctggtgacaggtgggaccggtctccatggttgggcagaaacccaacggtctcaaaccatgcacaccggttatggtaatttggctgtcaataatgggcggtctcttcaagactgccacatcacctgagcggcgaatgaatctgggcgagccgatttgcttcgcctggagatacggtaatgtcgcttcggtcggcgagcgtaattaacgcgcgcacgatacgatctatctcgactgccgcaaccgcatatccacctcacgcgccgcaagcgggcgaatgggatcagtggaagcgtgggcgcgagaaacgagggggcgaaataatgggcgcgagaaacgaggagccgggcacagcgttggcaagggtataaaggcactgaggataggatttgtttccttcctttcgccatcattccccttgccttcgccgcttgcgccctaactccttcttccctgcgcccttctttcgccacacgcgctcgctctccatcttctcttcgtccggcgccatggcacggggctccgcactgcttgatggtagcgtgctgccgccttcccgcatcgtgagcgagaagcaggctgggttgccgcgccgctttatgccggaatctgccaccggccgtgagatagtcatgctgggcgagggacgcccggcgccagactacccggggaggtccgtcttctttctcccctttgcaatggcagggctggttccgccattttcttctttcttcatggatgtcctggagttctacgatctccagatggcgcaccttacccccaacgcagtgatgacattgggcatcttcgcacacctgtgcgagatgttcattggggtgcgcccatctcttcggctgttccggtggttcttcaccgtgcagtcggtatcgccaccgtcggtggtcggcggctgctatttcctgccgcgggggccggtgttgaaccgctacatcccctgcgtcctccgcaaaaagtgggatgactagaagagcgactggttctatacccccctcgccgacgaagcgcgcctccgacttccgagccagcccccggcgcaggcctccagctggcgggcgccggtagatctgggggatggctatgacgccgtcctcgaccgcctcgcgggcctgcgatcccaggggctcaccagggccatggtgtacggcgactacctccgtcgtcggattgcgccgctccagcggcgcgctcggggcgcctgggagtacaccgggtccgaagactacatgcggacccaccagggagtcagatgggattgggctcccgaggacttcaagatactggtccaacgggtgctaaatctcaactccgtggaggcgtccctcatcccccacggtatcctccccctctgcagcgatccagatcgcgcctccatcttgaccattatgacggcggtcggggcctcagaggagcaggctcctaagggccatgacgacgcaggcgggagccgccgaggggatcaatctacccccggagggggtcgtgcttctgggccccgcgtcgggggctcggggagcagccgccctaccgactcccgggggaagaggaagctgggaggaacacctcccccatctcctccccgagggggcggggcggtgcgcgccagcagcaggcgcccggagggggccgcgccagcatcgcagcccgagggggagcgcaagaagaagcggctgcgcaagatgggggagacagaaccatcccggggaaacctaatttcccctccaaggtggtcatttaaccgaccccctcgcaggttcgtcccacgctcattgcgaccgtcttttcttctatcccaaaagcaagttttctcttacccatcttgtttgccttctggtttttctttctgcttcagtgatatctcatcgcgttcctcccaccatcccaagtccggccagtccgaggccgaagatccggcggccgcagaggcacggaggcgggaatctgaccggcgagaggccgcagaccgcctacgggaagctgaagaggccgcccgggaggccgcccgggctcgccaggctgaggataccgctcgggaggaggccgcccgggctcgccaagccgaagaagccgctcgggaggaggccgcccgggttcgccaggctgaggcgatggcggcttccgaggcagttcgcgacgaggccgcgggcgcctcgcttgggtccaccccttcgggcgacgcccaggaccaaacaggtccgggggcggctcgcgacgaggccgcgggtgcgtcgcttgggcccactccttcgggcgacgcccaggaccaaacaggtccgggggtggcccgcgataaggccggcgcgtctattggcgggccgagccgcgcggcatcttctccaaggcagcccttccccacgccttccgtcgccccgctgagcgcagagccccttctgcaggccttagccgccgcaaataccgcggtgttggatgggttaaatgcccaggtggaggccctgcaggcggagcgtgcggagctcgacgccgcatgggcacgtgtcgaggaggggcggcactcggtggaggccatggttgaagcgggccgcaaggcacaccgccggcacgtctcagatcttgaggcccgcaaggcggcactggcggagatcgctcgagaggtggaggaggagcggggggctgccctcatcgccaccactgtgatgaacgaggcgcaggactccctccgccttcagcacgggaactgggaggcggagctgaagaaaaagctcgacgccgcccagggggtccttgatgccgccgctgcccgagagcagcgagcgacggagaccgaagcggcgctccggcggcgtgaagaggccctcgaggcgcgcgccatggcgctggaggagcgcgcctgcgtcgcggagaaggacctggcggaccacgaggccgccgtcgcctcccgggagacaacgctggcggcgcacgagtctgcctgcgccgaagaggagtccgcactccgcctccgcgaggacgcgcttaccgagcgggagcgagctctcggaaaggccgaggccgaggcgcaacggttggcggacagcctgtccctccgtgaggcagcgctgacggagtaggcccgccgcaatttggaatccgtccgcgccgagagagccgcactggagcagcgggctgccgacctcgaggcgcgggaaaaggagctggacgcgagggcgcgcatcggcggggcggctgcgggcgaaagcgacttagccgcccgcctcgcagatgccgaacacaccgtcgccgacatgcagcgcgcgctagactcatccgccggggaagccgaggccctccgtttggcgggcgagatagggcccggcatgctctgggatgcagtctcccgtctggatcgcgccggtcggcaggcgggcctctggaaagggcagacaataaagcctgccgccaacctgggaggccttgcccagcgcctctcgaagatggccggggctctccagcagctccctgaggagctcgagaagaccatcaagtcatcctcgagggacctcgcccaaggagcggtggagctcgtcctggcgagctaccaggccagggaccccaacttctctccgtggatggcgctggacgagttcccacctgggactgaagacagcgcgcgcgcgcaggtccgggatgccgccgaccacatcgtccacagcttcgagggctcggcccctcggcttgcgttcgcccccaactccgacgaggagggcgatgccagcggtgcagacgacgtggaagacgaggccggcgacccgggcgcatcggattgagcccccaggcccccgccaatcttcaatttctttctttttctttcttctaaggccttcaggcctgttttttgtatagatcaacttataatctgcaatcaaaaatgatgaaaaaattctttgtgttaattttattttgctatgcggatgagatgaggatgatctgtgccgtggtcctctttttgtgtcttagcttgatttaagggcccgtgtccaagtcccagtcctcgaaaagcgcgggtcggggctagtgcctggggagatccgcatgtcgagactggccaggccgggaacgtggtgaccgagggttatgggtgacccgattgtgggtttttgccgattccccccccggagttcaccacgccccggggcacggctcggttctgggccccgtttggcgattttagctgaccgaaccgagcccccgagggcaaggttgagcacgagtgacctcatttcaagtcaaaattcttcaaaaaggaaaaaacggcacagatacagcccttaggaaattgaaactgcttttattgaaatactgaaatgagagaaatgagaatgtgcatgtgtggcagcccccggccaaccctgcacacccgagggggggtgcggggttggcccgagcccgaaacctgacacccgacccccccctcaggggtagaagcgacgaaggtgctcgatgttccatgggttaggcaactctgtgccgtcgcccgtggccagccgtatggagcccggccgggggacgccgatcactcgatacggaccctcccacattggtgagagcttgctcaatccagcatgcgtttgaacgcggcgtaagacgaggtcgtcgacgcagagtgatcgggcccggacgtggcgctgatggtagcgccgcaggctctgctggtagcgtgcggctcggagggccgcacgccgccttcgttcttccaagtagtcgaggtcatctctacgaagctgatcttgatcaacctcgcagtacatggtgacccgaggagacctcagggtgagctcggatgggagaaccgcttctgcgccgtagacgaggaagaaaggcgtttccccggttgctcggcttggtgtggttcggttcgcccagagcaccgctggcaactcctcgatccatgaatcgccgtgctttttgagaatattgaaggtcttggttttaaggcctttgaggatttctgcattggcgcgctccacttgaccattgcttctggggtgggcaggtgaggcgaagcagagcttgatgcccatgtcttcgcagtagtcgccgaagagttcacaagtgaattgggtgccgttatccgtaataatacggttaggcactccaaaccgggccgtgatgcccttaatgaatttaagtgcggagtgcttatcgatcttgatgaccggataagcctcgggccacttggtgaacttgtcgatcgcgacatacaggtactcaaacccgcccggggcccgcctaaacggtcccaggatatcgagcccccagacagcaaatggccatgaaagtggtatgatctgcagggcctgggccggctgatggatttgcttggcgtggaactgacacgctctgcatcgccgaaccaggtcgaccgcgtcattgggggtagtcggccaatagaatccttgacgaaaggccttgccaaccagggtgcgcgaggcagaatgggctccgcactcgccttcatggatatcggcaagaagctcaacgccttgttcccgaggaatgcacttcaggaggattccgttagccgcgcgccgatagaggatcccttctaccagcacgtagcgtttggaaatgcgttggacgcgttcactcccttcgcggtcctcaggtagagtcttatctgtgaggtatgcttggatctcagagatccaagcaatcaatctaagggagcttggagcgctcccctcgggtcccgaggcctgggctccgacaggcctcggggaccgatcaggcgcgtccgtctcccctaaggggtcgggtcgcgccgacggctgggcaagcctttcttcaaagacgcccggtggggtctgggctcgcgaggacgcgagccgtgagagttcgtcggcaatcatgttatcccatctgggcacatgccgaagctctatcccgtcataatggcgctccatacgccgcacttggcgtacgtaagcgtccatctgcgggtcagagcaccggtactccttacagacttggttaacgactagctgggagtcgcctaacaccaagagacggcggatccccagtccggctgccactctgagtccggcaaggagtccctcgtactctgccatattattggtcgctcgaaagtcgaggcggaccaagtatttaaggacgtctccattcggagaggtcaacgtgacccccgcgccggcgccctgaagagacaaggagccgtcgaactgcatcacccagtgggcggcgtgaggcagctgcgaggggtccgagctggcttcagagactgaaacggtctctggagccggggtccactctgccacaaaatcggcgagggcctggctcttgatagcatggcgtggttcaaagtgtaaatcgaactcagaaagctcgattgcccattttaccacccgtcctgtaccctcccgattatgcaagatttgaccgagggggtaagacgtaaccacagtgacccgatgcgcctggaaataatggcgcagtttcctcgaggccatcagaatagcgtaaagcatcttctgggcctgagggtatcgggtcttggcgtcccggagggcctcgctaacaaagtagacaggccgctgcacccttcggtggggccgatccccttcgctaagggccatatccccggggcgctcctcgtccaagtggcccctcggggcgcactcgtcttctgtgccgatgacctcggggtcggaggacgacaggggcggccttcccacagtggcctcggggccgttctgggggtcgtgggctcctggcgtcgtcggacaagcgggcaaagggccaactctggtcgtcaggggccttaggccaccgttcggctcgggggcctcttctccctgctccctcccgggtcgaatcggtacagggttagcctcggggtcagagggcgatagatgcagccttcccgcagtggcctcggggccttcctgagggtcgggggcgcccagcaccatctgacgagcgggcagagggccgactccggtcgtcaggggccttaggccaccgttcggctcgggggcctctcctccctgctcgctcccgggccaagtcagcacagggtgggggtgcacggaatgaggatcgtcctcatcgcgctccacaaccaacgctgcactaactacttggggggtcgccgctaagtagagtagcaggggctcatttggctccggggcgactagaaccggaggagagctgagatatgctttcaactgagtgagggcgcgttcagcttcctccgtccaagtaaacggcccaaagcgcttgaggagcttaaataagggtagcgccttctctcccagcctcgatatgaaccgacttagggcggccatgcaaccggtgacacattgcacatccctaagtttactgggggggcgcatccgctctatagctcgtatcttctcggggttggcctcgatgcctcgggcagagaccaagaacccgagaagcttgcccgcaggtacaccaaacacacacttatcggggttcagttttatgcgggcggagcggaggctctcaaaagtttccgctaaatctgaaagtaacgtttcctggttgcgcgtctttacaaccaagtcatcgacataagcctcaacattacgtcctaattggctacccaaagaaattcgagtagtacgttgaaaagtaggacctgcattctttaacccgaagggcattgtcgtataacaataagttcctatgggagtaatgaacgcagttttttcctcatcctccctagccatgcgaatctgatggtaaccagagtatgcatctagaaaacacaaaaggtcgcaccccgcggtggagtcgacaatctgatctatgcgaggcagggggtaaggatccttaggacatgccttgttaaggtcggtgtagtcgatgcacatccgaagcttgccgttcgccttgggaacgaccaccgggttcgccagccactccggatagatgacctcacggataaatccggcctccagaagtctcgcgacctcctcgcggatgaaggcttgacgttccggggcctggcgccgcactttctgccggaccggccttgcgcccgaccgcacggcgagacggtgctcaatcacctccctggggaccccgagcatatccgccggtctccatgcgaagacgtcagcgtttgcccgcaggaaggagacgagcgcgtcttcctatttgccgtccagaagaccaccgatccgtgtggtcttggacgggccgtcgcccagtgcaacctccttgaccgggacctcatcggacgtgactatccgctgcctcggggcggcgggggcggatgtgccaagcctctcgtcgccaccctcgggcttggacacgacggcgaggcggtccgcacgctgctccatacaagcgagcgcgactttgaggtcgccatggacagagatggggccgtcggggcccggcatcttcatctggaggtaggcgtagtggaccgccgccatgaacttcaccaacgcgggcctccccaggaccgcgttgtagggcagactgaggtccgccacatcgaagttcacccgctctgtgcggaaattggcgggtccaccgaaggtgaccgggaggtcgatatgacctagcggccaagtgtgccccggcgtcacgccgatgattggctgggacggccggagcatcatccccggggccttgatggcatcaaaggctgcgggggaaaggatgttgagggctgctcctccatcaatgaggacacgccccaacttcacgttgcaaacggtgggagaaaccaccatcgcaatctgccctcccctggcaacgcacggcgggtggtcggtctggtcaaaagtgagggcaacttccgaccaccgcgcccggcgcgtcgcctcatgagtaggggccgcggccagaagctctcgcttcatagccttgaggctccggcgagaaacgtgagcacacgctcctccatcgacggtggcaatggtggccccaggctcttggaaacccaggtcatcatcgccatcatcgatgtcctcggcgggggccttctgcctggcctcacttcgccgacggccggaaggaaccgccggggacttgccttcccggcgctcctgcctcctctcctcctcccacttccttgtccgctctgccaagcttttgactgcgcgacagtccacaaggtcatggagggaggtgttgtggacggtgcaccacttgccggtagggcgctccctgctgggaacgctggcctccttctttttgtcgctcgcaggcctcccctttcgggtggcccgcgaagcgccctcgacggcgaggacatgaccctcgtcgtcggaacggactgacctcttcttcctcctcctgtcacgccgccctgcctgagcggcggatccgggggcggccgaagctgccacaccggaaccggaggggttccaagtccaggcctcctccttgcgagccactcggtccgcgagctgaaaaagctctgcggtagtctggggctctttggaggcgatcttttcgagcatgcggttgtgccgcacgccccccctgaacgcgtagattaccgcgtgtgcagggatgcatggtatggtattgcggacttgacagaaccgctgaatgtacgatcgaagcgactcatcgtcccttcgctgtacggcgtgcaagtccgcttcctcaccggggcgcggatacgtgccttggaagttcatggtgaactgctggcacaaatcctcccaggagtggacagacgcgggtggcaagttcattagccaaccccgcgcttgccccttcagggccatgggaaagaaattcgccatgaccctgtcgtcacccccggcggcctcaatcccggtcgtgtagacctggagaaactcggcggggttgacgctgccatcatatttttcggcgatggtgggccggaaccttgggggccaacggacattccgaagactcgccacaaaggctctacagccgacaccaccaaccgggggcacggagggctgattcccacgtccatgtcgaggtgacactctggacgaggaagcgccctccgttgcgtgggcagcacttcggtcattacgccggcgctcgatgctggcgcgggcgtcctgctccccatgcagatcttcccgggtcgaaggagtcgacgaaggagtggcagccgaacggcgaacagcggctgccgctcgtcgtgccctccgtcttgacaacgcggagccggtggtagcagcaccagaggccttggtggcggaggaccgcccaccagcatctaggcgctgccgtgccgtcatgaccaatttggccacatcgtccagccatcgttgggctggagactccgggtcagggacgacaggcgggtggcgtaagagcgcgcccgcagcttggagcgcgccctggggcgtgctgccgtcgccgtagacgaggaggcgacggtccccatctcgccgttctcctccatcgcccgcgatcggtgaagccgcggatctttcgaccctttcgagcgcctccccctgcttaggactttggcgtggagggggcggtggagtacgagctcgacggcgtgggttcggctccccgtcgtcgccactcacactgggagagaggtcggacgcctttgcttgctcagccatgaggctgatcaagaaaaacttgacgcacacggaaaagtgcgagagctcagaaaacacacgctgagccccctacctggcgcgccagatgacggagcgcggcgctcctcaccgggagaccgcacaggccccccctttgccggttcggccgggggctcagggtgagatctcaagctctccgtgtatgcgggaagatcgcgacctcccaaaagagcatgaaacacaagcgatgtatacaggttcaggccgctgagaagcgtaataccctactcctgtgttttggtggatctgtgtatgaaggagctacaaagtgtgagccaacctctccctcgttctaggttctgaatctggaaaagatcatcccctttctctatgggccaggtcctccttttatacttcaaggggataccacatgcacccctctctttccaaactggacttttcttctcttcataaatggacggagatttgcacggtcgtcctccgaacatcctcctgacgggacgacacacacctacctccacttctgcctgaggcgggcacgtcgtgggaaggcggctgtgtgctgacgacatgagcagtgtcagaccggtcacaaatcggtcattcttgtccaccacgcgtcggcttagcaacgtgcatgtttgcccttcttcaaacaacatcttgcttgtaatggttaggatgaagcctggcatatatcgatcggggctaacgtgtcatctctgggatgtaacacgctagctccagccggggacgagtgcctagaagctctcgtcttgacgggatggggcgaagcgtgcgtcagaccgcctgtcgccacctaacccgcgatttgaccggtctgtgactggtcacagaccggataatcgagtgcactgcactgcacttcgtgcggcgtgacacgcttaaccgaggcgcaataaatgcggttaggtgagccccgctgtgctcacctaacccatacacgtggagtagaaacgcgaggggtcggggcgcctcggccctcgggggcgaggcaggagtggtccgaccccccccccccctcggggagaccaagaggtgggcgcacacatcaccctcgggcccgacgtcccccgagggtgccaggccacgtgggcgatggcgtctgcctcaagcctctagtcatgatacttccggtcccatgttaccgacagtgtcaaataaaacgaaacggagggagtagatagtagctgcatatagagcatgggaggagatgagagtgatgggtggtctgattgggaggagaagaccatcatggatgagtccctccggccgccgacccacgtcgctactgcggcgatgacgacaccaccttgggtcctcctcgaatgcgatgcctacatcgccaccaaccacggcaacgccaccaccgccacgtccaggaccaggaccggccaccccatcgaggtatccttctgggcggcgcccccgccgcgcgtctcctacatgtgcgtccactgccctggattggatccccagccgagcccaccatcatcgccaccgaggctgacctcgtcctcctccgcctcgccttagggccccgggacgacagcttcaaaaccagccgccaagattacttcatctaccacgcttcttccaccgccccgaaactcgacaacaggttcatcgacaaacaggttggcatcctgcgctgccttgatgatggcacctacatcgtcgccgcgctctgtagcgccttcaaacgaggtgatcatctctaccgctctggtgcagatgcttggacctgccatccgctctccatccatggtttggtcttcgatccatcatttagccatgtcactagcaaggtcatcacggttggtggtgaagccggaaccatgggctgggtcgacatcaacgatggcattctcttctgcgaccttctccgcgacaccgctgagctccgctacctcccgctgccgccaccactcgagcacaaagacgacatgatagtaggctgtccagggccacttcgggactttgctcttgtccaaggtcggatcaagtacatcgagatgcaggttcatgtcaggccaggctccgctatcaacggcacctacgcctctcaaggctggattgctgccacttggagtgcaccacccaccaatccttggaagcaaggttggcgccaggactgccaaatctctgcctctcatcttgctgttgatcacaacaccatgaattttgagttgctgcctgagcttggcacacctcagcaaaccttggagagacttcacgtgggccttccaaagctcagcttgcactctgatgacattgtttgcttcatggctaaggtcgacctctgggatgaccagaatgcatgggtgcttgctgttgacatgaagaacaagaggctaaaagatgtggccgagtttggcgcaggaagaactcttggcattagctctgcctacataagcagtaggatatcagactatcttcctacggctccaggtaatttatgtgttctaccggcgcatccactaactaattctgtcatccgttgcattgctagccatcatgacctacaagttttaattgatactcctgcttgctttcagaaatattaaacctgtgagttataattgatagttatattaaatcaattagattgatgcatatgtatgtgctaatcaattggaaacatgtgcctttgtctttactaacaagaacaaggggacattactgtaggacatgatactcattgtttctatgccgctgatgataatcaagttcagaacgctacttgtctggtgttaacaaaatacttgacacagctgtcttggaacacttcagtgagctaataaacatattacatagatataacctatgtacaggcagggaatcatgaaacagaatggggtttatgaccaatgcccagttaaatggctgtgcatatatgactgtaaaatggatgcctttctctataatcgcaaaatgttacctaacaaacagatggtggaaacaaaaactgcatcatgaccatgtgctttcacagaaagtgcatgtcacctaggttgattgttttgctatggaattttagagggaaaggatatatatatatatatatatatatatatatatatatatatatatatatatatatatgatactgtttagttgtcattgagccggttttcacttaatattttgctggctgcaggtttaaagggtaacctgaaacgacaaggggttgtgttgaccgtgccttctcacaagaagcagacccgtgtggtgctgtctaatccctcttggaaaggtggagatcaacaaaattctggaacaagtatggatgataaagaggataacatggatttggacttggacatgttttttggatgaggggcatggataagtgtgatgcatcttcatgccttgctgttgtgttaacttatggctagattatctactgttttatctgtcctatgagtaacttatatgagggggctattgctagtattttgtagcaaggatgaatagttgtatctgtagcacaatcttaagagtgtgctcttgtttatgcccctgtttatttcttatcaatgtagcgaggttgtaaaccgtatggtcctctagctggtgtcaaattgctcacactttatggatgcgtgcctcctggtagagttgggcgtctcaagtcctattatttttcttctgcaatttggtttcctcgcagcttttcgttttctgagaatgtgaattgtgaatctgaaatcggctgactgcaatcaacatttgttatgccctggatggcctggcaatcaacaggtctgtccataattctagatggtgtttaattgagtactagagtattatattttgggacaggtggggtatgttttatcagaacttttgaatggaacaaacttgaagatgcaaactgatgaggacacctagcacaacaccttgactagagtaggatcatcaaccacaaaagctaacacccaggaattatcttagcagcttcactcgatcatatattgtattgtttacagcgataattatctgattagtatcttgcagcattcatggccttgctagtaaattgtatgttcgacctcatcagataataccatggctttggtttaattggaattattagattctcttcccgcaagttggagtcgtactttccgagtctttttcctttggttttttgtttttctcctctcttagaataagtcggtctggcttaatgcattgtgtaacgaatattcttatcttttaatatattgacgtgcaatccttttacgtcttcgagaaaaagaattattagattctctaacgaattgcacgcttacttgatactactactctactagtagagtacctgcttgtatgagacatatccatgaaccgatcagtttgtcagtcaattctggagccgtatcaagttgctagcccaataaaaacttcagacacttctgtcactaactacctatgcctggacctgcatctctgaaaccaccaaattcagacctgtttggatcgacggatggaattataccacctaggactgggaggagtgcctgagttgccttctggccatggtcttgcccatcaattaaatacttgtcgtatactccctccgtctcaaaaaaaaaagataaatcctgtgttttttttccaacatttgactatccgtcttatatgaattttttttataattagtattttaattgttgttagatgataaaacatgattaatactttatgcgtgacttgttttttcaatttttttcataatttttttaaataagacggacggtcaaacgttggacacggaacctaggatttgtttttttttggacggagtgagtagagattaagaaaaagaaatggagcaacgtgttttatcgatcatacattctcaagtaaagctgacactgatgaccttctgaagagttttgtcttcccttccactgctgattcggtaactgaactgaattctactactgatcgaggcaaaaattatctatcaatatctgttgttcagaatcaaggatgaggatttgtgaatagttctttgaaataagagttcatttacaaacaagacttttttttctgaatcaaggatgacgatttgtgccttggtgaactttttagatctttttatccttgttaatgtgagcaacccccaggattgcagctatcttccttctaatcttcctgtataatcttggatctgtgacgtcctttgggtggcaaagagtattgaatctgatggcttttgcttccggcagagatggtggtgcctgaggttaactaggacatgctggcggtactgtagtgctggtgcatgcaacaagataagttgtgagtgcaaaattagatatacattctacaatgatcggttattttaactgatggtttaattctgtgctgacgtatgaatgtaggtggtcactgatcttcatttttgtctactgcaatggacaatgctagaagctcctcaccagaaccatctgcaagaacaggtaaagacaccatattactcttcaaaggcaaagatgttctgcaattcagaataaatttacattgaattgtgattcattcacagagaaatgaactatccagtcaaaaatactctcctacttatccatgggatatttgttgggtggcatcttaaggaagcaattacatatatttagtggtcctgactgacacagcaaatgcctgatgaagtgcaaacccaaatggctgcattgttaatgtgtctgtttacctgatgcttatgcttgcatctcaatttcagcactatgtttgttaaaggcttcaactgcacctatatttcttcttcatgtacagaggccatctcattattggcgttctgttttttcttactacttgccattaggacgaatatgctatagaagaatttgataaatgctcgatccaacatgcaactgcctatttggattaaaggttgaattatcaagccgggcgactaatgatatttttcggtgatcgaaaaattgtaatatgtgtcgaccgttgtttatagtggagacaatatcagcgaagcccaagcggttgcccgatctacccaggaggtggctccgccactgtttatgagctgtgatgtggaccgaaatatataatatgacaagaaaaacaaatgcatatgctttgtgcatggaaaactgaacttgttgtccttttgggttgtcttaagtaaacataatgccaaatgtacgatatagcgcccatttaactttcctctaggtaatagcagtagtgaagccttgaaggtgtcattaactggcattctgagtcccgagaggattagcttgcctgtatttttttatcagattgtgtatatttaggcgccggcgtctgtgcatatcaaattatttggtgttgctgaatgatgctttccataaccaaattaaccgcacatacaaaaaggggaaatggaaagataaggcaaagaaagagatccaaatcaagaatattttttttcaaaatattaaatgttaattttgtcctaggtacatggaaatcgcttcatcaagagaagaaatggatggaggtagacatgccaacgtcttcacatgatggaagatcaaaaaggacagagggcttctttatttagctacggagtcgcggcttcatgtaatagtggtagggacgggatcttcacgcgagtatgacaataatgataggtcttcatggacgagcgatgggccttcatgcgacgatggtgacggcttcacggaactagagcgaaaataatgacttcataaaaagatagcgacaacttcacgcacactaagtggaattgttaattactatgtttggagctctggtgaccgatcgattttggtcacatgacttaagctaattggcatgctagttttatcggatcaggtgaaggaaaaaagttttaaggtggtataaaaatgataaaaatttaacaatcttattcttaagtcagtgaatagatggaagttgaggaattgaggcatatgcctgcctccttcctcctcatgtcatgtgttcctctcctcttcatgtggagtcttgagtcttgacaagcaaagaaggaaggaaacctcctcctcctcttcttcggctccaaatcaaccaaacaaacacagcttccgactctctccctccctccctccgcctccgcccatccaatttcttaccccgttcgactccactcgactcgacccgacccgcaggagagcgggcgtcgcaaaccctagctccacccacacccacacgctcatgccccccaaaccctagaccatgcgcgcctccgccgcccccatggagacctccgcctccgcccgcagatccgccgcccccgaccccaagaagcctcgcctcgcccagcaccccgcccccagggatcccagatcttaccccgctgccgccaatggcaacgcccccgccgtcgaccaggcgcaggtggacgagctcgtcgcgcagtaccggaccgccctcggggagctcaccttcaactccaagcccatcatcaccaacctcaccatcatcgccggcgagaacctccacgccgccaagcccatcgcctctctcatctgcgccaacatcctcgaggtgacccttctcctcttccgctattccattccctttctctccatgtaaaactattgaggcgcctcctgtcctacttactactttatcatgtacgtcttgtgctagatacagcaaacgtgctcccatgagcagccatcttttttgtattctactctacatacataataacatagctaatcgagatgagatccctgtgctgtgcttgttgcccaaacatcaccttctttactaatgaactgcgcactgacctaatttctaacaaaaggtttaaaccacccgcatttcgcctatgttgatgtatgcaaatatcagggtaatgagtgtttcgctatggactgaatttctctttgtctacgatcaaatccctttctatgtgtgcgtgctcatgcactactcttgtatgacgttaaggcacatggttatatacgctttaccgttgcggaatccatttcaagttaccgtgtgacgattttatgcccacgatatcattcactgtatgaatatcagacttactcgtcatggcaaaaggatatcaatggtagggttctatcaccctatgcaagtgttctatgatgctagaaaatatcataagtatcgacttatggttgcaaactgtaccaggcaggcttcagtttcattcctactcttccactatctgatccccagatttgtgctgcactgcatgttgaactgttctcatgctgataatgttctcaaattgtgtacctcatctccaccgttgcacacaagatggatccagatttcagaaatccatgtttatgattgatccccttagcgtgttcctgtaaaggtgaaaaaactgtataaattgtgatgagaggatgtggaaatactgcacctcataactggcctacgctggttggtgttgtcatgtagctgctggctacttaacttagatggttttcgcactgttcacttcttttgtagcctctgctcttcctaggtgatgatgcctactgataactcttgcatttcagctaggctcattatcttcacacgtttcgtgtgtttgaacaaaatgttgttggacttctcaacaagtagatgtaactcaactaaacaaaagatggaaaaacattgggccttctctatgtgagggtcataaagaaaatttgtattggtctgttgtgtagcagatttttctagtcttggagagtggagacacagctattatagcagtgacaccaggttttccattgttgtacttgtatcacattaacatttctgtgattctcttttttcattgtaaacctgtagtacctgcttatgtaattgtattcttataggtagaagggtatgctatttcatattattggctgcttgtgcttgtaggttccaagtgaacagaagctaccatctctgtatctacttgacagtattgtcaaaaatattggaaaagattatgttaaacatttttctgcaagattacccgaggttagtaaataatcgttcttgctcttctaacttttttttttgttgacctgatagttgagatgaccagcttcatggaaaaataatgaatcctggtttctttctgtatgagatcaaccttagttttcttgggcggttccttgttattgtaggtgttctgcaaagcatataaacaggttgattcttccatacacaatagcatgagacacttatttggaacatggaaaggagtgttttccccaacttcactccaagtgattgagaaggaacttggctttcaatcatctactaatggatcatcaggcgctgcaccatcaaagcctgattctcaatccaatcgtccatcccacagcattcatgtgaacccaaaatatttggaagcaaggcagcagctccagcaaccaaataaggcaagccaacttctttttttttttttttgtagatgtagctattcaatgctcttgtcatcctgagtatcgtatcaagactgatagatattgctcccattgaaaaaatatagatatgttcatagcattgtaactgctgctttatactatcacatcactcgtgagattttttcacctcattctattctcccctcgttctgtacagggacaggggatactgggagctggggccaagactactacaatttccgattctggtgatgatattgagaggactagcaggacagctgttgatagaggtgcagggcggcggctggatgctttgaaccctaggactgtaagttcatcatttgatcattgagtaacataagtgcttagatgtatttactttgttatatatataatgcatatgttattatttgactttgatatgcagaatgtacagcgggcacaaagggacccttttagcaatcctattcatgaaaagcaagatagagatatgagggtccttggattctccaacatttcgcagcaggctgttgtgggaactggtcttgttcgtgcaaaacctaaaggccaagatggaagtggcggaccatattatactgctggagttggttcttctgaagaacagtttgacaggcgcagcaatttttatgcaaacaaggatgttagaccatcaggatctgtacgtttagatggtgcacttttgccaactcctgttagtaattctgataggattggtaggccgtcatccaacaaaagctggaagaattctgaggaagaagagtacatgtgggatgatgtacgttctcaaggagcagattatggaggtaccagttcaacaagaaaaagagaatggatacctgatgatggaaatgttggaagctttcaaagggttaaatgggcagaggcgggaggacctttggaccctgaccaacacaaattagatagcttccaaagatttggaaatgcgacgggtcaagatagaagaattacaccatatatggtatgtgaaaagaagacagtactataaaatcatattcaatacttgatagatacagcaagttaatttcttgtacctaatgttgttagatagtttgaactgctggttcgctctcaaatttgcaatttataatattgcctcaaaatcttaggttttacctgtataccatgctaaattttgatgacatatatacacatattccatctttgcactacttttggacaagattataatctgattgttttttcaattgttcaggatcatgaagagtaccttcatggtaagcacgaagtggaaccaagaattgatagggaaatgctcccggaaggacagccgttctcgtcatctcgtggttcctctctctggttatcccatgaaaaacctctcccagacattgtgtcagatcctaggatatcagcgttttccaatcagccagcggacaggcctaccatttatgctggtaccttgtcaacaagtatcacttcatctgtacctgttgggttgtcagcagcctatgctggacgatcaagcctagaaagtgcagcaacaagatcaactgagactataggacagcaaaagaatagatattggtcaacttcctcaccacctgtacagtcaccttctgcatcatttgcacgccagagttcccctagtcctgtagagcttgattactcttccaaaccattctcacagttgggtcaaaattctctggaagactataaccaaagaactcatgccttggctcaaaaccttgcactttctcagggcagacctaatctgctgggtgctccttcacatgcctcccagcagattgaaaagcacccttccttgctgcagtcaaagccacatctcaggacacttgatcaaccgcaggcaaactt

SEQ ID NO: 10161 - DNA, 69790 bp, Oryza sativa
  unsure (1)..(69790): unsure at all n locations
atggccattaactaggtctgtctaaattaaattagggtgggagtagatgattaaaagtgggagtgcgtctggcttgcttaacaagtcattgattagccgcgtgtatttatagccgtccacccggagcaaatgaaatcatcttttccttaattccccacttctccctcctcttcccctcgatcatctctcccttctaatcccacagggcggccatatctggggaactattctaattcctcgaggagatgttctctcatttacctaaaaaccatctaaacggttatacattcatacaacacataaatataactccacaaaatcttgagtccaaactcaactcatacgtcaagatattaaaaaaaagacaaattcagcctatgaatagtagggtactgtttatatctaaatttgtctttattgtttctcgatgtgtagatcgaatttaaacttgaattttggtggactagtaggtatcattatactatacattgtcaattttttttagaatttttcacaactatttgcatcaaatttgaaagaaaaaggtatacgaggggatatctcctcgaggaattagaatccgctcccccatatatgaactttagctgagaaatgcccaggggtcttccagctagctccacaaggtggtgggctagacgatctaagttcgaagcctcacccattctaattatttgatattagatccttccctaatatttatgtcatagatgaactttagcactgtggttatcgcctttttaaagttcatgcaattgttaaagctattaatcttagaaaatcttgtaaattcctaacattatacaattcaatttgtgcttcagtcacccacctcttccttctttcttctccggtaaactcctgggttcaaggtggatgtagggagaggaaaagaggggaaaatcgccaggcttaaagggatggatgtgggaggcggtggcccgacgatgggaagtggatataagcctgcgtttgcggcggggcaaattgaagcttgtgattaggaggcggcaactggtggtggcggatccagcgatgtgaaattgtcgaggctaggagactcaccaccaccaacttggggaagagtatagggagggggttacatgtgtcattgaccccttctggtcaaccggcgaggccgggaggcatcgtgtggaggtgcatgagctcacaactcactaattggggtgacgtagggagtgacgagaggggagaggaagggttagggctaaaggcacggtccataattatcaatatttgttaggtgttttatgtaaataccctaaagttaaatgtctcattgaaggggatagtcattttcaaagatcattctccaaactaaacatattgaaaaacgggtttgcccaaacctgacccatctagcccctcaaaccaaacatatacttaaaaaggttgggtcaacacatcatgagattgatgaaatcactatatatatctcacggttaatgtaacatatcaccaacatgaaataaaaattaattttgaccaacaatacacggagaaatccattcacattctacaaagcatttcttgtcactcaaatatatctatacttatcttagtaaaagatatgctaccatcatcccaactaccatacaaggcccacaaaaagtgagggaaggctttacatttttcctatatatccacacaatctaagatcctacatgcacatgaaaaatatgttagtcgacccttattataaaatttttcatcactccatgacatattagacaatagaaataacttcttttagaggctttaaaaacatatagaatgaactttttttttaaaaaaaaaagaagatccattgcaacaccacgggcattaggcattacgctagttgattaaaatttctaaaaaaatattatgttatatatcattgctctatgaaaatggaagactatatttgaatatttgatctacacgtttagaaagaacataaatctgggactatgaataaggtacatactttttaaaccaagttaatctgattttgggacaaataatttgtgggacagcatatactaagagaagccaatgcatatggtcaaagttattaaatactagagagatcatgtcaatcaattacgtactccctccatcttagattagtgtgctccttttaaactagagaagtatatttattttaggacgaaggagtctaatttcacccatatgttaaaatcaatttcttatggtctagcccgatgtaagtccgaaacataacatatgtgctcgtattttcttatgactttatctttgaactcttgccaggacgtgtcaacgtgggtgtgtagcgggcgtaaaagtgtggtacgtgcatgtgcactttttttaaaaaaaatgaagatggatgaagtaaatgtcagttaattacatttcagcgcatatccttctttgatttggtttgatatactttgggagttagggcacggtacgactcagagaaaggtgcttaaattgctacttgatatgttaatattaatttagaaacaagaataagttctagcatgatctgagatggatttgcatgcatcatattcagtgggcttaatctatcatgcctgcagcatctctgcatggtgcttgatcatcagtaattactaattattatcaacaattcgatatattggaatctgttttttattatatggaatgtactcccggacagaccacaaatgttgggcctagatttattgacactatatttattcagtgttgattcacactaaatttcgcactagcactataataataatacaataagaatatactgtatatatgggctaccgattgatcggtcattaatttagtgcttccaaattaaaatgcatgcgttctgtcctggatatctatctctagcaaagtagattagtagagtagcaaagcatatgcatatgcatgattttgcctcagctaggcttccgaccagacatgacttaaccatgacctaaccgcacgaaatattctacacatgcacgaattaagctccctgacttttttatatgccattcctagctgctgctactagctactccctccatcccaaaatataagcatttttagctatgaatctggacaaatgtaagcaggtacttccttcatctccaaaatataggccagttcccaaaaaaaattcccaaaaacatcacattaaatcttttaacatatgcatggagcattaaatatagattaaaaaactaattacacagtaaggtgggaaatcacgagacgaatcttttgagcctaattaatccataattagccataaatgctacagtaacccacatgtgctaatgatggattaattaagctcaaaatattcgtcttgcggtttccaggtgagttatgaaattagttcattcattcgtgtctgaaaatcccttccaacatccagtcaaacatcctacgtgacaccaaaaattttcttttcgcgaactaaactagcccatagtaatttttagcatttaaattctattttaaaaatatagttatttcgttacctaacatcttatctcaaccaattacaactatggctgatataaatttttcagctatttactctttttaatcaatcacgttatttcttatttagtctcacgtagtttcttagtacctatgttttgctttaaaaatacttatattttagcactgaggaagtagtagccacactggcatccacgccttgatcttttttagataatggaaatggattacatttccggcttctgtcataagacacacagccataagtttaatagtaataaaaaggtaatataaaagtaaatcaaaatgagaaataaggtgatgggacaaatccccaactcctctttattattgactagcgttaaaccacgtaaaatattttagctagcaattcttatggaactacgccacccatagtggaataagagatccttggctaccgattccaagagtgtagcaccattgcgcatagtatcctgctcctcctgtggtagcattgtagaccaaaagtggagccagtaggaagacatgaagataacctgcatagggttagataattgtttaccattaaaaactttatcattgcgacaatgccaaattgaccaacatacagcactagctccaattagaatcatcttcttaatggacctagttacccctctaagccaattaccgaaaatgtttttggcattacggggtgggggatattaaaagcaaaaagcacacatctccaaacaaactgagcgacatgacactcaaagaaaagatgttggattgtctcttgtgcatagcagaaagaacaatgtttgtctccccccattttcttttagccaggttatcttttgttagaattactttcttgtgaagaaaccacataaagaccttgatctttagtggaattttcaagtcccacagaattctctttttgatccgaacattacagttcatgatcgcggcatacatagatttgatggaaaattgaccattcttatggagcgaccatacaaagcagtccttttcatttgacagagttatattagctagcatgaggatcaaatcgttccactcgattagcttttggccaacaatagctcttctaaaagagatatttagcggcgttgtgctcatgacctctgcacagtagactgcttctttcgagccacattatataatgtagggtattgatctttgaaagcacgtgatcccaaccacgtgtcttcccaaaatcttatgtttgtcccattgccacatctaaaagaaccaaacctaagaaattggtctttgactttcattaaaccggcccagaactgagaaatacctatcttgctggacataccagaaagaggtttaccctttaagtatttatttcgcaaaaagtcttgccataggccttcaccattaaacaactggaaaagccatttgcttaataagcagctattttttatatcaaggttatggacacctaggtccaccttgatcttttggtcgacatatgttttcccacttagttagtctatattttcttttacggtcatcattactccaaaaaaaacatgacctaaagtaatccagtctttgaagcacacctcgtggaatttcaaagaaggataacataaacaagggaaggctcaaaagaactgagtttagaagggccaatctcccaccatatgacatgtttttgcctttccatgtgctgagtttcctctcaaatctatcttcaactcctttccaatcaacattccggagtttctgataatgaataggaataccaagatatctaaacgggaaagatccagaattacaaccaaatagttatctatattgatcctccacttccttggctttcccaaaacaaaaaatctcacttttatgaaagtttattttcagccctgagagctgttcgaacacacataggatggctttcatatttttggcctgttcaaggtcatgatctagaaaaattactgtatcatcagcatattgtagaatggacaaaccatcgtccactaaatatggaatgactcctctaatttgaccatcgcctttagctctctcaatgagaaccgctaacatatcaaccacaatattgaaaaatataggcgacattggatccccttgttgcaggcctttgtgcgtttgaaaattattacccaaatcatcattgacttttatacggacacttcctccttcaaccattttagaaatccaatgacaccattgctgagaaaatcccttcatgcgtagtgtttattagagaaattgccatttgactttatcataagccttttcaaaatcaattttgaaaataaccccatccacgccttgatctatcaaagtatcgatcgatccacagtgcttgattaattgaccgatgaatgcaaagacagccgtggcccgtacttgattaattgagctatacctatatgatagtgagcacagtgtaaattaagatgcttaaaatttacggcaaaaaaaaactatatgtactgcaggtacacacgcatggatactggatagatcactgccctgtacgactcgattggaatctgtattatctgcatggatgcaaattaagtcaaataatcgttcgctgctacgaatagtactagtagctaggtagcaattaaaaggtttcatgcctgcgatgcaccgtgactatattgtcttttgcaaccgatccatcgatctgatcgtgagttgaatacatatgcaaagtcatgtggttttgtcaccgactttttcatattcgttttacagagacctctcatgatcttacattcttaaaattccaaaattgcgtcgcagtggtcagctggtaattaagaacaataccgcatgtacaattgcaagatctgtcaaatgaaccaaacacacgtcgcaattaagtcctagattcaaatactattcgatagcgggggcagcgaatgaagatgggtctcttcaattgtgggagctttagatagatgcaatgcactgttcggtgacagacagactgacagagagtgatggtgcagcgcatacaatcttgtgtcaactgaattgaattggaatggatcgaatcgaattttgcaaggcacagattaggccctgtttagttcccaaaacaaaattttttacgttgtcacattaaatatttagacacatgcatggagtattaaatgtaggaaaaaaaaaccaattacatagattacatgcaaattacgagacgaatcttttaagcataattacactatgatttgacaatatggtgctacagtaaacatttgctaatgacagattaattaggcttaataaattcatctcgcggtttcttggcggaatctgtaatttattttgttattgaactacatttaatattttaaatgtgtgtccgtatatttaatgtaacaaccaaatccaaaaattttccccaaataaacaaggccttaatatcaattatcactgctatgttatcaggcagacagagagacaggctttaatattattattgatgggcaacaagttgagcaagttgtgtttatgctgtcggtcggacccatttcaaccaaagtgatgcatgtttgatagatatggaaagcagcccgttttggctatgtcaagtgtcccaaagatttgcttacttaatttcaccaatcatgcattcatgcatgcaccttcgtcatcgatccaagcattgtcctgccctgtcctgcaatctcgaagaccttgcttgttggggcatcaaaatcatctccccgtactcgaaaacacagcaaaatcaacagtcaccttatccaaacatttgtcctaacagtgatatagtacaaaaaagaaatacagaacaaactacaggtagacattttacctacctgcagtgcaggctgcatttgggttgggtgtcatatggtttgaaggaaggctgagctgacacaacccaggagcccatatatacaaatgtagttcttctggttcagcacccagaaaccacctactatgtgatacagtacgtacttttacaaccgaagcacatgcctttgccttccaaaagaaagttttgcaacttcaatcagtagcaaaaagatctgatgtaatcccttctgcagcacaccaacatgaacagctaagtttccgtttgccaatgcaaagggtacatactctttcttacccatataacttggcaaaatagtagcaagatctaatcatcctagttttcgttgcgctgaagctgctgagctccagcataagtaactccactgttactgccagctgcttgttgggacggcagggaaagaagcagaccttgctgtggtagctgagctccattattcaagtgaactaaattaactggtgggggtcggcccagcaatcctcgactaagctgaggagccactggcaactgaagcgataaactgtagccaaaaccagaagggataataacaaaaggtggcgttggcttgtgcgcacactgagtactagccttagcctgggtgggatgtcgatgtacaacctgaggagcttcagcagttgtagaattagcatgctggtctgatcctactaggtgcacagcatgctttccctttccgagcccatatctgctatctgggctcgtttgtggcttgcgttttctcttgccacgcttcaaacgaggtttactgactagctcatctggtttaaggcatccaaacagaagggtctttagctttgatgtatctagtttacccctcatgaaatctaacaagttcaaagcacaatctcgaagacatctgcaaatcttctgcatctcctttttcccaactgacctagcaaaattttgtgaccggtccaagaaatcttcaacctacatgaacaggagtaaaggaaaattcttgttgagggcataatacttaattcaaaacaaatcttacatttaaattgccaattcctttcttccaggtcttagagatccatgatgcttcaaagttgctagcgcatagcccatgctcccataagctctccgctgataatagctggagaacaaaaggccaactttgtgacttattagcgaccataataaactatcacacaatggtaattaaggtggtacaattttaaaacaagttcaagctaatacaagtgaccaaataattgtacacacaaaaatgttaattgcaatattggggaaaaaacgttgaaattaatagtgtgcaatgtatttttccgtgtaatgaaaatagctaaaagccccaaaagcacaaacaaacaaatacatcctgctagaacgggtacattatgagaatttctggacgagtattatcttgtttgggcttgcctaacccaaagttcttaaagaaaatgatacaaggagaatctgagttcaaaaggaacctaggcacagtaatgaacatttaaatgagtcaacaaatcacattattaataaggaaagtaacttaaacataaaagctatataaaagttatatcccaaaggaactcactttactgatcaacgatacaaacagttcagctacagtttctttatttgttctcccaaaccccttaaatgccaacgtattcctctcaacactttcaaaatctgaaccatctgcaaggaatctcatcatcagctcagagtgactcagttgctgccagcacatgaaaaaaaacaaagataaaaaattatttcaaaaaccttttaataaggcagataacgggggtaatattggaggatcccgggtctgcgctgcacattgcaccaatggtaagaagattcaacttatacttattcatataaaaaaggaaaagaagtattaaatgccaaatgtttgttttcttaagcatagatctagtgagttactagtaaaacacccagtttcataaagttcgatgcaacaaactccaaaacgaatgtgtaaaaagacttcatctgttcaattgaaattcaacataaacccctggcatcattccttgatattataaggatatgaaaaactttttagtgaaaatcctctttgtttgctagacatattgattcaaatccaatagttgaaacaaaatatgggaaaacaactaatcatcatataatagtcaaacagtgcattgtgaaatcctctgtacctgcaaatggaaagcaactaatgaaactattgacatggagctcagcgttcgctctctcgggctattcacatcatgtatcttagcccagaacttcaccttcaaacacaaaagaaaaaagaacattgttatcaccttgcatttgtatagtatatctttttttctcgggggaggggattacattaccaggtaacttagtatctgaaaccttggatcaagtgaagaaatgaacttaaagatcattgatcttgtcatgccatctttattttcaaccgtaatatcacactcaatcccagttccccgatcaataacattcacaataggcaccctagcagttacaacaggcagaaccccacagaaaattccattccctgaaaatgtgagtatattactgcagttggagatagatgggcttagaaagatgcataattatagcgggctatttttatgctttctctatttgaaaaaagaaaaaaaaaagtggccaggatggtccattagtgaagtatatcagtcggcacacccagtgactttgtaaagctccaattttcagataagctgatttgaactaattatcctatgattacttttgcagtgcgcttttttcacttttatgagatttagtagcaactgaggcttagtacatataaaccatctgcaatgttgtcagttttgatatcctttttttatccctgtatgagctatcgttgcaattggaagtaagatcagaaaaccaagtggcatgtcacaggaaacggggtcgaaggaagcattccttgacaccggggaatgccgtccccatcctggaaacgtgggtgcattttcattcccaccttataaaaacctctcacaagtagcataccacgttcctcgatcccatcgacctgggaactttgtgactcatgcaaaggagcctaatgataaaaattggtggacacacaaagtactagtgaatatttagagatactgtgctctaggcagtaattactttgatgagaatatagaactttggtgaacttcctaatagcagaaatttttttcttgcgagcatactgatcgtcagtattagcagtaaaattgacagagaggtccaggtcacttctaggggtaaataaatccattgtaaatgatccaaatgcctccacgactggaaacccattattgttacctgaaatgatttgttaaagaggatggccaatcagcatgctagagacaatgtttagcaactaatcaaactatcactttataaagagttgttttacagtcattgggaggtattgacagatatggaggcatattctagatttctagtggtaaacagtggccaagtagtgaagtagagtattgtgaagaacattagtataggatagtagatgaacattggtattagaaacgattacaggggtatgcaataagcagatgagtaaggaaatgaaagaaaaatgatgcctcttagcataccgaagatttggtttgctatgttgttgaagacatgaaccaaggtagtccgttgctcgtaatcaagtggttttgggcgcagcatagtatacacctgaagaagcaaattatcgagaataggaagaagagtgcgattgactgacagggctgccaactcctccgactcgagacattcggcatgcgcgcgtaacactgaagagaaacaggaaatcgaaattaaaaggagagctagcgcaaaatgcatggaagatgaatgggagcagcagctagtagcctagtaccgtaccttggggatcccatgcgcttacctcactgtcactggacctaggtggagcaccaacaatcaaatcaaagaggaaaacatatgagatccagtggagtatgatattcccagccccagcgagcgggaaggaataatacaggattggattggagtagaggacgccaactaactgtgtgctttcggaggaagatgatggcatggagaagaccgccggcggagatggtggcggggatcgagtagtgtcctctcctgtcatgtgggtcctacaagtcagtctcgctcactgctggaatactgactactcgcgcaactactcctgtcaactcctccgacgccccgccgcgctccccaacttgtcgcccccgcccccgcagaggaccggcggatgagcagggatcccgtaccacccgactaggccgctgggtgacgagcgacgagggatgacgggtggttgaggaatgggcgttgctaccaccgccgcccccgccggtgcgctgtccctggccgccgccgccgccgccgtccgtgcgtggccgccggtggactgggtggggtgggaaatgaaatgaggataacatgggctttttagactcgcgatatactagtagttattattagtctaatatacatcctccggggatccacgggtcaaccgcccccgatcctactcatgaccgggaaatcaacacgcacccggcaccccccggcctctttcctactgattaaatttaactgttagtagtacagtatttgataatcacgctgattagcgttaatccttagggttcttcctactacaaaacatgacagacagacagacagacaaccgtcgtcaatctagcaatctcatataccaattagagcaaggataataataatatagcacacttcctacttcctactattagcctatcttaaagctaacatatataataaattagctataagattgtctacaatttttttctcctctctctaggtatttatcttggagattgtgttaagttagctcttgcatgagagccaacctttacatctctcatccacactagctaattaaatcgtgcattcgcgcgaccatgacatgtccttttatgtattaaaattagaactaaatattgggatgtggatttttatttctcgagggaatatcctccactcattgcttgaaacatatcacttccaacaaattcgatttatacatatggccataaaatatgttgtatttacgaagggctaatttgagttgtttcagctttaatatacgtgcgtagatgccacatcaaactggttaattagctggtgaaaacagcggttttctttatcgttagttggaagaaaaaaaatcagcagtaatgcaggaggctgctacttttttccttggagatggccagcaggattgttgccacgtgtctgtgtttattgctctgtgttgggaaccagagaaacgatcacactcttctagatcattctcttgcctcttagcttttgatcaatccaagccatccctccttaatccaatgactaatataatattgtatacgtggctcaatggcagagggaataaacattctacgttcatatgatgatgatgatgataagcttataataggcttatagttcactgttatactttctcttaacgtgatcactccagtttcattcaacaagcgaggtctatgcgtattgtctgcatcaaaattacatgacaatgtgcaggtaggcgcatgcggccagcattttatgttgtactagacaggaacattagttccctcttactgtatcccatcaatcagtttgttcaaatgatcagttgtgaaatgaattagtagctgcctccggtaatcccagttcccaaacaaaacactttctgccaccccaaaaccatatattacaccaaggcagacaagcagggccccaatctaacaaaacaatggaactcatcagagacaagagacacacaagacaacacaggcatagggcatagctaaaattgaatataatcatacatccactaacacctacaagctctaagtaggaaaaagaaaagaaaaaaacatttcttcttctttatcttcctttctctctgtatctacatgatgaagtatgctcggatcacctcaattatgggtgcacggcacagcgggcatttccctccgcttcgaaccaactcattcgcgcattttgaacatgtgcacatgtgcccacatctgatagaaagtcaacaccccaacccccaacaaagaggcaaaacaaaccatcattagtactgttatactgtattagagaagaacaaactacatggacctattattcattatttcagaagaaaagcatgagttcaaacctgtacaaaagagagtcaatcggagtatcacagcatatacagcacgtcccttttctcacatggatccattttgatccatcgtctatagtttctttactttcacctgagataccaaatacaaagcttaggtacaagtctgagccaatgcgacaagcatctaagcatcaggcgttacaaaactgcatatgatgaaagtttattgtataccaaatttatcgttccatgatagatccaaactacctagctagataacaacttaggtcaaaattaacatagcttgaccgcacatctcccaggacttgacatgttattgactggaaggagtataatagcattcgttcttgaggaaccttattatcttagctaagtgacaatttgaattgtaaggcgcgcctcgcaaccttgacagtgtaagcactatgacgaagaaacaacatccacgtatcatataaatatactatgcatcaaagtgatacaccaagggataatcaaagattaatttcaatgctaaattttgttttgttagtgttgttaatagatgagtactttccagatgagttactaaccttgctccccgatgaagcgattcaaggctgcagaaacttcctgccttacagatcgctgtaactcgagctgcatgtccatacaagcttccaacattctttgcatatgactcatgccctgctgaagcctagccatatcagcccttaagtcattaatagcctcccattcctgcaaatacaaaccaaaagaaaatgagcctttaacaacaaatatagaagcaacagtgcactatgcatggaggatagagaggctgaatgtggcaacctaattttaaaaaaaagtgcaagtctcaattaaaaatggcatgttggcttggccattcagaaaaaaagaaattgtgcacttggaacgaactgaggaagatgaaaagctcacacatgtgacaagaataacataggtaataacttacaatatcagagcgatgtatgttttgtctgatccagttattacgatgcaactccgaatgccaaagtggctggcgaggaggtataggcggaggtggaatcactaagggaggcctaacaacattatcatgaagctcctgttcctcttcatctctatgctgctcctggctttgctcgggtgagtcaggcgcaggaggtgctccttccaaatcccaagagagaggagcacgaccttgcctttcaacatatgaccggataagtcggtccaaattttcacgaaaagcactatgaagaagattagaaacactccttctgcagaatgaacactaattcagtatttacgctgagaactaaagaaatatgttgcagagactttcttcatgaaagaaataaaaaaacctgcttaggagttcccttagttctgtactgtacacattatcatcatcagctgggacaaacgtattagctcttctaataagagcagaatcatgatcaattggttgatcagagttgtcatcatgccaattatctgcagtatcattggactcatcatcatcatgccactcttcatttactccttggaaatgatcatcgctgtgccactcgttgtgtacttctgtaggaataaatggattactgccctcattccactctccacgagattgttgaagatcactgtcatgcagctcttcattctcctcgggaagatggctattgtcctgctgttctccatgagattgaggaggaagattgtcactagctaactcatcatgtgattctggaatatgtgcatcttgaccaccttcaacttcggtaccctcatgagatgaaccattgtacgtattttcatgccaatttatttcagattcctctccagtaatagcatgggaaaattgttcccaatctcttctctcttgttccaaatcatcctgccaactctctgcttgactatgaggttcatacaggccttcagcaatactaggagtattgcttccagattcagatactgtcgctgtaccttcaatttgctgaagaccaatattcagccttgtccgttgatgtctctcgagattatattcagaagaagaagggcttgattcagtatggccatttatagagagctcaacattttgagctgaagaatcatcggattggctaactgcatgacccctgacgacgttctccaatctgaagcggaactcttctctagttattaaaaataataagtattgttattatattttatatcccacaaaacttaatgtatacaagtaaattatatccataagttggtttcaagatgatgtgctcaacaaaaaccatatgctctaatatccatatccagttgacaaggtcataattactcattagttgttcagatatagtctagaagctctaattgtacattaacataggtaatctgagaaaagatgcaacgtaaataagcaacatatagcaatggcggcatgaatagaaagaatgaagaggtctcataagaggtaacacatgcaaccaccgagcagctaaggatatactgacaatgaccttgtaggccaataatcacatgcattccagaagagaagtggaagacaagcagcagcagtagtgcagtagcaaaaagaaacacgcgaaggcagtgatagtatagcacaatggagtatgtatgtagtgggtagagagagacctcaaaccagagacagaatgacgctgtcgtagctggccgagctcggtggcggcggtggatggtggccttctgtcgtcgtcaccattgcgcagaaacctcccccggagtagtgcctggtaggggaatccgtagattagattagataggggcaaggcaaatggggtcaacaaacaatagaactaatggtatgggggattgggagcagggtacgtggattcggttgcggtgggggaagtcggagacggcgcggtggtgggagaggcggtggagctcggcgtgtcggtcggcggccatgcgcatgacgagctcgaggcgagcctggcggccgcggatccggaggcgggcgtggtcggggggcgggtcgtcgtcgcggtcgcggtcgcgggaggccatgtacatgtggagcgagatctgggcggggccggggtcgtcgggccagcggcgggcggcgcggcggacggcggaggcggaggcggggtcgggggagccctcgcggctggatccgtcccagtcccagtcgctgtcgctttggcggcgggtcatgaggcgtggcggcggcgggaggtcggccatcgtcggccgaggaggcgaggaggcatgggttcaggattcacaactcctccatttctgagtcttcctgacactgctggagacgacgaccaccacaatggattggatttggatacaccaacaacaacaacaagaagccgatgccctccggctccgacgaggagagtccactccaacccctagctaagcctaagcaaaggagtcccctctcccctcccctcccacccaaagcctctcgcctccgctccctccgattgctgtttttccgccctttcacttctttctgttttttttccctttgtaaataataataataaataaataagcaagacaaatattctggagggaaacaacattccaaatgcatcacattcatcatcattattgttattaacaattatatttgataataatccagaaacacttgtattatacaaagtgaacttattcttaaatattattattgatttatttgtgaaaagtccatgagatgcacatcatgcgcagcgtgcacgatcataaagtctaagagagtgcgatgattttgttcatggaataaatcctttgtacaaatctagagcttgtcaaacaacgacgactactagatagtatttcacaccgcatgataaattttactttggatcatcttttattgtcggtctagttatgtggcatttttgatcaacctcaactcttatctatttacatctaactttgtcatatgtcaagaaaaaaaatctacatacagttaggggagtttgttgacgtgttggaccactctcaattcttttatccatttaaatcgcaaacttatcatatgtcaaaaaaaactacatacacagaagcaagcgtacccaaggccattcgtatgcttgagaggagatacgagatggtccaaactaaaacaaaacacacaagatgattaaagaatagtttaaagcgatacatcggtgataaaaaaaggtggctcaaagtaaaaataactcttaatctaattaactactcaaaataacataatgactctttgcttttaacactatttggaatattgtgggatttgggatacacccccaaacatctttatagactatactcccttcgtcctcaaataaaatttgaatgagatgttatctaatacaatgaatctagatatatctcgatctagattcgttgtactagataatatctcatataatttttggttattttattttagaacgaagggagtacgtttactactaaaatattctccaaaatgttttttttaaaagaacagtgctcatactctatcgaataatcataagttatttttaaagaataatactcatcacaatgcgcattaacattgcttctctgcaatgcgcagagagggagagacggtaaataatcatgcttttctggaaaaaaaatgtaaagaaatgttatcattataactaacacggtttcagtgtagagcatcacaaaatacttctcctacctactatcactaaaaaacccatttttgttgctggatggcaacatagcaccatctgatcttggtagacgcaatattattcttactccctacttttatttcacatgcagagatttgagcttttcttaagagtagcgtgcaaattaaacatattccttctgttttttttatgaactaaggctgcgttctttcaggggagatagaggagattgtccctcgttttccgcacgcacgcttttcaaactactaaacggtgcgttttttacaaaaaatttctatataaaagttactttaaaaagtcatattaatctatttttaaaatttaaaatagttaatactcaattaatcatgcgctaatggctcacctcgttttgcgtatcttcccaatcttctctatctcctcctcaaacacagcctaactaacgtaatacattttgggatgtaggagatattgtttcaaccagaagtttaaaccatttatctgtatttttttatgtagacaagtagtatatctcctcctcaaacacagcctaactaacgtaatacattttgggatgtaggagatattgtttcaaccagaagtttaaaccatttatctgtatttttttatgtagacaagtagtagtagctccatactgaaactgttactcaatcagctcgtcagaaaccaaccaaaaaactataattcagtagtttttgctagcaacagtaacaagaagcataggatgattcagcacaagcatagatagtcatgcgatacgatcccgcaggatatgcaaaataacaggagcagcatcacaaattaacaaaaaaaaaagcttaatctcccaaaatgctctcataatacacgagtttggcagtagctctagctccttcctcgagcaagcaaggtagctggttcactagtggatcaatatttcaaaacaaaagaagatgttaagcaagttgggcaggagcttgttcagcgacaagcttactgcaaagactgacacttcttggtgcagatgctttcaggcagcgtaaggtaattcactggctccaagtttcagttcacagactaatccattgcaactcttcagtttgctcttcattgttttcagtgtcccaaccgtcaaacgcagctatatttctcttgctaaaatgaaggttttcaatcagctatatctctctgtctaaacgagagcttttcttctcgtaccacaataagacatcagcaaaatcagctatactttttgtgcgtataagagcatctacagctcattcaagaactttctctccagttgagaagacattccacaccactgtccctactatgtacaataccacagccacctgaaacacactatcccaagaacctggcagtccaaaaaagaaagttaagacgtaagagaaagttagcataaacacacattgatacatattccacaagaatgaacatgaaattcattattaaaatatggtctgtcctgtttgacatttctagagataccatgtttttcaacatccctacctttctgaagaatgtagccagtggcagcagtaccaaaaactcctgcaagcacgccagcagtgtttgacagtccaagaagtacaccctacatttttttgtaacattgtatcgttagctgatggatcaaagttaaaaagaagcaacttaacatcaatacagctagcagtaacactataatttctattgtgaactagggaattttggagcagtaacaatctatgtgagagcattactgcataacgtgggcctatgtcctggtgattcgaatatagcccagactgtgaaaaggcatcactcccctgccaaagaaattggatatcaagatcaacaagcattaaaagacaatagtcaatagatggttcagaagctaaatccatatgaatagcctttcagaagaatatcaaacctgactgcatgccatacacaatacagccatggctggagttcggactttgctcagcagtgtcaagaagagggctggtccaaggaaaccaatcgattgcatgatctacaaaatacatttcaaaagtatgtcaaaaccaaaagctcagcagtcagcacagctattcccagaagttcatacaggaaacagctattactgaagaatttaccttacgaacattcgttatggaaacccccctcccaacaagagtgtcagcaatccagccaccaatattcgcaaatatagccattgtcagccacggcaagacacacaaaagcccagattcagtaagattgaacttaagaacctggataagagcacctggtgagtacaaccaccaagaacaggatatgctaccattgtctgatatgggcagtgggtattaaattgtaagaacctggttgtagtatgtaggcatccatgttagaagaatgaaggttccccaattatggcaaaaatgtgatactattagagcccatactggaggctttgatagaattagcttccaaggtatggaggtgacgggctccttcaaggtgcttccacctagaatgtacctcttttcggctttgcttagttcgggatcttcactcggggagctgtgtgcctaattaagggtagacatgcactaccagttagcccttttttcaggggtaacggcaattagtcatgtaagaattaacaagaatgagcatctaagaaccaaatagtacggtcatttccagagttacttatgtggttaacataataaatgaaatgacttcaaaagcaaatttttaggttggaagctagtacatgaattgatttatcttacttttctttgccaaagtgcaaaccagacgcttccaagggacccgaatgcgtaaaaaacagatggccaaccgaatctgctgatcaagagaggtgaaaaggctaggccagtcactgaaccaaggtacattccactgtacactaatgcaagagatctgcttctctctgaaactggaacccatttggagagtatgttgttcatggctggcatggcaacaccctgttaaaccataatataacaaaattaatcacataaaggaaaggaaaagcatcagtgtaaaaactttgtttttttttatactcaatgaaagcaaactgagtggtactggcatttttcaccgagatacttgatgaccagttacttcaaaagcttaactttgcttaatttggaggagtatgacaggtgtttttgtgacagacaattgctccaagttagacagaatttccaccctcacatttgcttgcatttcattaaacctaatctagaggaaccattgtccggactattacgagaagtgtgtttatacaaacattccacttgatggtagtggcagtttgaattatagtagagagaggcacagatatctacctctcctatccccatgaaagcccgcatgacaagtaggaaaggaagtccaatctttgcagcaaggggtgtaagaactgtcgcaattgaccaccagacaaccccaaatcctagcaccaccttaccaccaaacctgtcggcccatatacctccaaggatctgcagtttagtatgaaatattagtcctcacaaaggacagattcaaatgtgagagaaactgacgcataaaaatccctggcttacaacagtaatgcacctgagtaagaaggtaaccccaaaagaaggaggactggattaggcctacagttgctggactccagccgaattctgatgacattggaaggatcgcgatactcatattaacctggcagaaggcagtaaagaaaacaggaggagagttataattaatgaccttacataaaaagaaaagaaaagaaaaaagaggtaattcaactgttgttatgaggtatatttggagaaaggaaagggcaactcacacggtccatgttgcacagaaggaaggaaaagaagcacaagagaacgactgtccatcgcttagggaactgctgccaccagggagaaatctcatttgtatctccaatgagaactgcctcggcgggaacatcagaagggctcaacggtgatcccgttatctcatactgctcggctttacagtcggcgcgtgttctgaccggaattttgtagtctggctggacacaagcagtgtccaaactagtgaagttgtcccatcttcttggttttagccaaccagtgtttattggatccgaagtgagaaagcattcaatccgccgcctcttgaggtttgcattgtaaaaccacctggtgaggtagtttgtagaagagtcaaccacaggctggtggaatcgggcagaaagttgaaatctttccattgaagtgctcctggaatagttagagacttggaaaatggtggtcctagtagtgagtcgactgaatttatctcgggtgggaggtgaggaacaggtgcacttgttgttttgtggtggatgctgctttcctgtaaaacccaaagggaagaatcaggttgacatttcgtgtaaatggccatggccggccctgcccttgattatagtcaacctgattacactgactagctagttagttatgatgttgggtatatataggcagttgatgaataaattggtcagtaatgttacaagcaattgaaggcagtaagcgtgtcatgttatacatagttatagggaatgagagagaaatgaatggagtcccgtaatagctagcagtgaatagtactactagtgtagaaaagaagttagtaatagtattacggacctgaggaggagagtggagaggcgaaggttctgctggagagcacggcccccatagccatggcctccgcctggtcagagcacaagaggatctctctctctcactcactcactcagctctgggggagctgctcccctctcgtgttgcataggaaggatcttgcttggcccctggagcctggaggaggagattgggggggaagacgatgagacgagaggaggacgtgtggtgtggataagcaagcaaaagtagagtagcctctcccttcttctcctcctctctctcctgttatttcgatttcttttttttctcccttttattgcaggatatagagatggctgtttctgttgggattctttccgactgaacaaaaacaaaaagcagagcgcgaaaatgaccttaactgaatgaaaagtaacacactagacacgtctcctgttgtgatgtccacatccccatctgctcttggacggaaggcgtgcttttctccacgtacgcacccaccccgccactccatagccgtccgatcgtctccactgccatgtggcccctggttaattggtcccaacccaaagtaggagtatcttgcatttgcatctccactcagattcagcagcgggaaccggaacaaaaacaagcaaggcaatgggtactacggaggaggaggaagattcgcatatgcttattactcactactagtatcatgttggtttgatgtacgtacgcacgcacaccagatggtagctgccatagttaagttaccacaatttactttacaggcactctctcaaacttcaacattacatagtatctctcattcagttcatgaatcaggtcaggtcaggtcaggtgatgagctcgatgctgtactcccacagcctcttggccagctccatgtcattgcctttctcactcgcctcgttcacattgctgtcactgaagtacttcccggacacacccttcacctgtgggtgcaatgcaacataacaagtggtggccgccccctgttcatttacaccacaaactcaccatcaccaacatattacattcaccatgaatttgatgcaccacccagctcccccctctagcccgccctatctagatcgtcaactaaattgcagataatgataagcacaatctggccatcatgcaatgctctctactcttaacctcaggattaatctgccatttcctatatctcacaaaatccaaacaaaaactggtgtactactaccataccagctagagaacattttgaaatgctcagttatcttgcattttgctttttctttagcacggctagatgtctgtaatagctgattcattgttccacccattgtcatgtaaagagtttttgtgtaatagcttttctgtaagggccaaaactagcatctccaacaaatagtgtatccattaaaacaaccagttgcatacaactgatttctatgaaagatttgctaaccattggcataaccacatataaagcgtagaatggagagaaggcccagaatattaaaaaaggtgcacaaccatacctgctgagcatttttaagcaccaatttaccaagtgtccgatggagaactgcatataacaaatataatattcatgagatcagttattacaacagaaaacaagctcttttaaccatgaaaaatctagttttaacccaccactgcagtcaagtaaaagcactagtatttcgtttcacagtatgtggttattttcttccttttggttgctatccttggtccttgctgctattttctttatggtgtggtaagtccataggtggcatgaattttcaagagattttgttttgttacatgtttcagttcaattattttgagttcatgagtgaaagatccctttagcttacaaaagcaggaatactaaatatctcctagagttcaattcaagtatattttaccatctaggatactgtggtgacgaagaaggttcgtgatgatagatccaggatgaagagaatttgcagttatgttgacaccctcatcctgttaaaccaatgatgatagtcaatacaaaacaaaactatgggacatgtacaaatttaaaatttatttcagaaaagtacaactattttatcaaaatatcggtttactgcaactttagttagacatttcaggaaactgcaacaacagtcaacagttgatggctttggcgtaaaactgcacctttatttgcctgacgagtatgggcccacctgtcaggtgaacattaaaaaatcatacagctacaggtcgggcccacatgtcagtcatatagtgggttaaagttacagtttatggttgaaatcatttgctatagtttgtagctttgtcaaatgcctaactaaaattgcagcgatgtgatagttttaacgaaatagttgtagttttatgaaatttactcaattcaaaatggacaacacctgaaataaagacaacgttcagttggccaatacctgacacgatgtgtttatctatcatgggtgtagatttcttactaaacagtgcaacagacagctagctggtgcaatttttagagtttagcagcaaattactagagatagaattcattgctggtgcttgtggaacaacgctcctgttggattacacgctaataaacatatctcaattgaaataactccaaatacagcgttgcaccaaaaaaaatatatctataactggcgacatgatctaagagaagagcaatgcgcaccttaaatctcctagcaagttcattcgcatgcaaaatgtttgcaagctttgactgcccatatgctccaatggagttgtacctgtacaacacaagattgaaccatatattagtacagtacaattcctttgaaggaagttaacaaggaaaagaaaaacaaagtgcataaaagttgcatactccgactcgtcatttatcttggcaaagcggatgccttcccgatatgcaaacctgtgcccctctgatgaaacattaacgattcttccttccacatttgattcacgagaggtctttttcattgtctccaagagaagatgagtcaaaagaaaatgacctgaaaattatgacaggagatacacattttaacgcaatgatacacagctctctccagcatgtttgagagaaaaagggacacattttaactcattggtatccgtaactatcataatgaattagaacattgaggaacaggtgaagtagaaaattgctatggactgttgaaataaatttgactaattagaaggatgcaaagtcttccttacttcttaaagaatatggctggaaaaacatttgcaacactacgtagtagttaatgagaagcttttaaatcagtgtaaccggtgcatgaagttcataccaacatggttagtggcaaattgcaactcgataccatcctttgagagagagaaaggagttgccatcacccctgcattgttgctgcaaacaaaaccaccaaccaatcaggaagtgtgatgagctataaaagaagcattctaataactacgcaaccaaacaagcatgaaacacagacacttgtcggtagtactaaatgtgatttttagggtattcataggaaggagctgtactatcatagtagtataattaacggcagcaagatataaatgaagatatccagtggctgcagaaaaattttgagcaccaaatgtaataaaacacaaacacatgcacaagtcatgccattgttcctggagttataccatttcatggttaaaacaagaaaccatacatttaacatgccctccctgatttttgcgctagaaaagagtaaagaaaagcataggaagagcttgttgtgaccttcagctagtaagattgtttacaataaaaacatggaaatcgtagctaacatgatagaagaaagtgttgtttacagtaaaaataggtccatgcggccgtagtagaagtaatatagcagtaggctagtcatatgtatccagcatgcaactagtactactcctacttgagaaagcaaaaaggaagttgtagtccctctgagagctgaatcataattccatgaaaatggcttccacccactcctggaattggagtatgtcttagcgtggggtagagatgcaggattgaatgtgtagagtatgatgttgcattgtccaaaaaaacaaggtgcaactgaggtagtatagtactagtagctgaatttagtgaaagcagcagtgagtagtgaatgcagtgcaggtaggtaggatactgctggtcctaactgaaaaatgagggaatttgtacttggcattgaaagaggagtactagtacatgaggatattgagggggaggcccttggcggcgaagtcggaggcgaaggcgcggacggagtccatggaggcgaggtcgagctccatgaggtcgagggaggcggcaggggcgtcggcgaggatggcgtcgcgcacgggctgcgcggcggcgaggttgcggacggccatgacgacgtgtgccccgcggatggcgaggacgcgagccgtctcggcgccgatgccgctggaggcgccggtgacgatggcggtgaggccggcggcggagagcccggcggtgacttggtcggcggtggaggcccacgagaagcccgagggcccactccgccggaacaaccaagaagacatcatcaatctctctctccgccgcgcaaccgcaagatgtgtgggtgggacaacgcagtcgctgttgcctcgtcctagtactgtctaccctagtcagtggactactcgtcacaagtcagcatcatcaccatcagcagccagactattgattttattatagaggacgtgcggattggatgagaaaatagttatggcacgcgagattttattacagaggacatacggattggatgagaaaatagtccagacacaaattttagggtaaaaaagtcaagatatgcgaatttgatgctaaaaaagtggcatacgaacaaattttatggtaaaaaaagtcaagatatgagaatttgatgctaaaaaagtggcatacgaagaatttgatggtaaattctctaaattctccacaaggagagcatccatccatcatcaattgacgaaccagaaccaaaaatgaaaaaaaaaacattgctcttgaattgctattcttcagtcatcgtcgatcaaacgaaacaaaatacgccttacaataaaaacataagaaacggagggagcagtaaataccccatttactcctgatatgatatgatggagtatattacaattacatacatgcaacccaaaaccaaaaccaaaaccagcacaacattcactaatcttgtccatgtttgcaacgaatccaatgttaacgcacgcaccggctgtcatatcatataactataactgtatatataaacaaataaattcaatgttcatgaaccccggctgtcatctactccaaaccaaattaaaatgcagcttaattccctgctcgtctaacaaaaagccatcacttcatttcctacggagtagtgcccacacgccaggaacccccctctgccaacttcactagttctagtaactccgattggttgatgatgcagactcaacccttgctacttcgccggctcaacaggatcccacgttacttgcttcagccttcagggcacaggacaagcttcacatgatctgcgtttattgcttccttccatcctacaaaaacagtacatgaccatgattccagctaaacaaggagatgtacttataagtttgatcaaccttttatacggtatgcgagtggataaacagtagtaatggaaaaaaagaaagggtgaccatcagcaccaattggaaaaagaagtggaacagccactagcaattaacaaatataaaaatgcgcaacaaccaccagcaattgaaagagtgcaagaaccagaaagataattactttgagaaaggaaggcagctgcttctttactggaaaagatggcgcctcgtaagcctccaccctctgccaaccctgcattgcagcagcttgaacaattgtttccatctgtcataacgccggatgaagaatgatcctgtgctgttggagtaatactaacttcaacatcattatgagcattgtatccgtttccctcttctccatggttaaatggctgcatcaccttcgttacaggatggttgccaatattcaattgagaagcaggagtcgggtattccttggaatattggttatcctccaagcattcgctgccgtcttcaatggcaacacttatggatcctattaatacacgagacttcttgttcagaacaatctcttgcccatcatctatattcaactcatcttttgggctgtgctcttcaatctcagttcgcactttccatgtccatgttttgtttctatttgacactgcaccggcatttgcacccctgtaatgtgaatgccttactgaagctggatgctttgaaccaattgcagaaccaccagaggcaaagctattttgggcaaagttttctgttcttcctacacgatgtcttgaaaagacttgttgattcaaagtaacacttggattcacttcatggcctggatcatgaatgtcatgttctacaggtaggtcagcaaaactactattatcttccgaagccactggcgttggcaactgtgtatcttcttgctcataaaggccaggatccgaagtggcttccttcagacttagtattccagaagaatctgttgtcccatccacagatccaggaaaacggtctgtgacatcctcatccttcaagtctttcaatctctgttctttctgcctcagtttcttcatccgtttcctttctatcagttcagcttgccttcaagatacagatgatgatgttgaattaaatgattttgcattgatacaaacaataagctggtaaatagtgctttccagcttttagaaattgcaatcatccatggtattaagcactaaccttttctgagcagcttcctcttcctccacgagcaacttctggcatcttaatgcttcagcagccttatcagcagaccatgcttcgacctgatgttttatgtacagccactataaaaactgaatgtaaatgcatatcatattttgcaaattgtagtgaaatcttaccagtgtttgttcaagcatataactagtgcatgcaacagcatttttcaactcaggtgcaactttgtcagcctccccgttaaatataaacttttgtatacaggcggttgggttagtagagagaaacgtattctcacttgcttcgtcaagcatgctaaatagttcattcgatgatacaggtaaccttgaagctgttgtttcaattaggtcctatagcgggtaaaatgaagcttagatatgagactaataataggtttatatggtagagcaggataatttaggtcaaaaaccttaccagaagttgattgccagctctggcatatggcagcggtaatgaagcataccccggcttacacatccatgtggacagtgctgctaaaatggaaggaccagtgacaccctgaaaatgtattcacattccaactttagatcactgtttatgatcaacacactgatccagagacattattgcacatattttctggagttacctctatatccacatctgccaaggacaaaattgttttggcctgatccaacgtaagctgaagagcgtgacaaataaattcaatgctatgagaaacagttaaagtccagcgcatgattaattattatgtcatctatataaggagttgttactcaacatgcatgcatatggactagtatagatgcacatgcacttcatggtgtcaagataacaaaaacagaaactagacagtgaaaaatgcatgctggcggtagagtattcttcacgtgaaaagtacggaagcatttaatagtcaacaaagcttcaatcagtgaaaacattactcaatttaataaataatattgcgattgaacttaatagaggaagatggtgatgttatgatgggcatttcattcaagaataacttactttgtcccagaatgcagcaatattgtctctgttcttcaggaaatcctacagaacatcgacaaatgtcactgcttgcaatgaatgactgaatggtaacagggaatagcttaaatactagaaacgaagtttaatatagtatttagttgtactgacaagtccatgtacatataatcattttgtatgaacaccttttctatccgaatcccccgataaatgtaatcttagccaaaacaaaaaagggaagagataaaagaggaaccttttcaatttggagagttcggcggtgaacacgggtatggcgcctgtagttgattgaggagcaaaattccctgggacacttggtacacttttgcaactgaagcttaggaggcgaaaacaatggccatccaggaagatctgcgacaggggaggacctaacgttgggcattgctgaacccgaagaaattgccactgttagcaatatacacgcaatctgtcaaaggaagaaatcgagaagaaaccaatccaaatccggatgtgttgttgaggagggagggagggaggagggggggatttcgggagaggaatgaatgaatataccttggattggattggaaccgaagatgagaggcggcggcggcggcgcaggaggaagggaagggaagggaagggaagggaggatcgatcggaaattcggtttgcagatgggatgggtacagaacagtaccctagaaccaaccaaccccaaatgaaccgcaagggcttcttggtcaattctcccttctctcaattgaattgaaattataataatttctcagtaggaaccacattttcttttaaaaatattgtatatatctttgtttttttaaaaagctaggtttgtttcagtttaaaattattataatttagttttttgagctagattactataagctactcccttcgtccaaaaaaaaaaggcaaaccctagctattttttggacggagggagtagattataataagatgtgagctgtttttatttctatagattattggatgcatggaggctaatgtctataatactctcatctattttggatatcttgtgtaactgtatataacaagtatataatatgaagtagctaaaaaatatattaataaataaaacattcatgaatatttttatttgtataataggctgaacacgaaatattatctcttagcaaataaagcatcaataatactatcccgaaggagctggatttgcgcgcagctagggagggaggacacgaatgtgtgcatgatcggagaagaaagggaatgcacactcggctagggaaagagccatctccataatcgggaaaggaagggaatgcgcgctggactagggaaggaagggaatgtgcgctcggacagggaaagaggtatctcgatctgtttggttctcgcagtggtgggtaatttacgtaaagtttttaggggtaatgggtcttttgtcacccaataatctataaaaaaaacacctttagaggagattatcatattataccaatatagcttatattttataataatctatctggtttgttttagattactccaaataatttaaatcattataatcctaagctaaatcaaacatggcctaaatttaaactttcaagtttcggtcaaagctaattagttgtacgagtgcgttaaaattatattgacatttttaaatgttttcacttagggcctcatcttttcgtttatgcttatgtttatcagttaaaatttgaatttttaaccttaaatttggagctgattttgaggttttttcatcaaatattatttttcagcctttacttttagatcgctaagaacacatatataaaagttttattcacaaattacttttcatttgcaaatatgtcgttcctcttattctgtgaataagcgaaacgatggctccgtcaatgttactactagctattaaaaaaatatttattaaaagagtaatatgtaatagttttaaatcaaaatatgtgttctaaaaccttataaatatttaagttatgatattttgttgcatgctaagtatggtagtacaatttccatccttcaaagcataatgatcttttttttaaataaaataaatcaaagttggaaaataaaagcactggtcaacagtgacaggtaaataggagcatattgatgcatacattgatacatatggcaatcttgaagatgaaaaattggagcaaccattataatgctaaaataattacattgacagtagtacaaaacaggttatttgacactttgactgttgactaccgtagaccccctatccttatgtacatgcacaggcaacatgcatactgaaaagtagctagctactcctagtttttcttaaaagaaaaaagaaaaagaaaaagaaaaaaatacgcctatactgtaggagtagtaattactatcgacggctaggttgcatgaatagaaatagaagtccatttccgagatttagatggtgaatttgccatgcggagcataatgtcaagcgacctccactcagcgtcgcacgtgattgccggtcgccgcttcctctccaggctgcagcagcgcagcgccaggcggagcagcttctcggcctgcacctccggccagctcccggcggaggcgtccagcacggagtggacggcgtccatcttgagggcctcgcgcacctggtcggcgatgttgaggtcgagcagtccggtgagcacctggaggacgacgacgccgaaggcgtagacgtcggactcggcggtgagctcgccggtgacgaagaagacggggtccatgtagccggtggtgcccatggggttggtgcggcggcagatggtgtccgcctggtcctgcagcggcttgacgtgcaccgcgcgcgccgtgccgaagtcgccgaggcggctggagttggcggcgtcgaggaggatgttggtgagcttgaggtcggcgtggatgatggcgtgggggcggcaggaatggaggtaggccagcgcggaacgctgctcgccgaggatcctcacgcgatccttccatgacagactcttggagttggagaggatgtccaagagggtgccattgggcaggtgctcgtacaccagcccgcatgactccgggcacacgcccatgagcctcactatgtgtggatgctccattctactcagcaccacaacctgcaatcatcccatgcattctatataatacaactgcttccttcttcagtaaactaactacttaatgttaatgacataggaggaggagtatatatatatttacctcctgcttgtactctggaaatccttgcctgccatggggtctcagcagcttgatggccactgccacgccacccagttttcccttgtacactggcccatagcctccttcacctatcaggtttcctgagcagaagttgcccgttgctttactgatcatcgacatggagaaccgtgagatatgttgtggaagttgcagctctgggtatcttcctgttgatagcctcttctccttcttcagtgaagcagcagcagccttttgcctaggtgacaagatgctcctatcatcctcttcttgcagctctttcagtttcctttggagtttgtctatttcttcctgccaacaacaatgtgaagcattcatcacatatacaaacttctccaagaaatcaataaataaattcaaatgattctgtgtttttatgtccatgcttagataggccctgctgtttctgatttcataactggaatataagctagagaaatgaagcatatatgcaacttttaccatcagttcttcagctctttcagttgtacttctaaaactctgtatctcatcagttctatgagcagtctctccggaagagtgctccccctcctcctcataagaatttagttcccctgtttctatgctttcctcatcctttgtttcggtttcctgcacatcacactacagaaagcaaatcagctcttctctttatttatgaacactgcagctttcacaaatcacaagttgtaacaccacaacatttttaccaaatatagttactgtgaaaaccaaccttattacacgcagtgtgaacctaaattatcaatctttcctgttgtgtgggcaaacttgaaaaaacatgcataagttttcaccactagcgctcatgctctaataattatcttatgggtttcatctatccattatctaaaaaaatgttgtaataattgtcttgaaagtaaaattaaggaaaatagccataccgttgccaattcatcagcaccatccatttgaataaccccatcatcatacatgatttcatctgcctaaagtgaaacatattcgagaatacatcagaaattagtattcgaaatctgaaccaagatcatagactgcatgcatttgtttagtgctttgctaggaagccgcttacaaaatcacttggtggtgttgtgtagccatttgaatcatcgctcagctcatgtacagatgccaaagattcagcgctccctccatatccaatgctcccggtatgttccagatgatcattgctgcattttagaatgatctcatccatgaacttgttgctagatttgatccaatattgctgcaggtgttgattatagattttggagaatatctcaaactatacctagtacacatgtgttttccattgataaccacccaaacctgacagcatttgcgcagcatcgcttcctttgacatgctcctgcataataccctggtttagcatgcgcatggagtaatatatgccaatagagaaatggatctcttttgaaagaaggaatggaaattcaaaatgtagaatttgggatcttaccttgaaccaatgataattctcttaattttgagcttctttatcagattcacaacaccagcaagaacatcatcgtgtgaaaggtaatgtgccctaacctgtacggacagcctgcttagataacatgatttctttttcttttcttttttttggccaaatagtaactatcccaccacacttatattttattggttcaactgtcaatatcgttgaagtcaattattcaccatatggtaggaagctcattcattgcatatttggggttcaaatagtagacctaaggcaaaattctagtatttacaactagaactcatttccacgcttttttaggaaggactgcagaaaacattcttatgtactccatagtagtttatgaatttgctatatgcttacaaataagaaaccctgaaaatctcatagaattaatatctgatttatacttgtcagatgagtgggatgcttaaataagcactgcttaatcggactcacatgattcaaactaagaaccgaaggataattagtatcacctttcttgatccacaaaggtttttgtattgtgacaacatcttgaccatcgcatccgtttctttggctcgatgcatctccttctccttttcatctgcaaacttatatagaactttgccacccactgcagttgttggaaaggagcaaagtattgttcatacagcacatgacaatcaggacacgctatgctgttagtttttacgttcatcaagaaaaactattttatggcaatttattatacttccatttcgcagaataacaagagtgtatgaaagccagcgttttacacatgggaaatcacaagtaataggaattaggcatcttccttttactctactgataggaagactaggatgcacataaactaagatggtcatgaatattaaatcaacaaatcatcttttatcgggtacaagatcacctatcgtactgtcaacaaatttccccccttttttaggattgaatggtgtagcgctttctttttaacacagttgaaagataaattgcattggcttatggaaataaatttgtctgaagaagtatgaagatcttactgaagggcatccacttggaaggccagtgaacatgaacaagaactatagtggcccttgggaaccttgcagcagcccataagatgttagccttctcctttctgaagttcttcccaaccgcaatatgaatctcttcctcatccatcttttcttgccctcttctacatcaggaactaaaatcaaattgtggttctgatcttgtcaatatatctggttcagcagcagaagcaagcaaggcttgaaaggaagaaggtaagagtatatctgaacttgatccagaagaaagggaagctaaagtaccttattgtggtgcaccacttttcatcaacttcacttcatggtggtatctgtatcaataccatcaacttcatggtattcttaaaactagaaagtatcagttgaaagaagggccaaaggtggggagagacagccgggggttttaaagcttgtttaccatggtctgaggtttcaacagcttgatggtatccagcagcagtatcaggctgtgggtcccaaaatgcaatccaatcaggaaattataccacttccaacttggcagtattgttttgccctctcagtattcagtagccactaactcctgctgcatacttggtttgcgaaacggcaggttcatttagatcatcaactgcaaatgattttacaagttgcataggagagactgtaatctcatcaatgtttctattcaatttgaatttttaagctaaaatcatcatttttacaaatcttttgtaattaatggcttgtctgtttgttcatcagatagaaacaagaacgaatggtattgttccagctgagggttccgagttttccaagaaatttctgtccaagacgctgtcgtacatgtttgtccttgatcgacgactgactttggaagattagcagtgaagtcttgtatatatctccccggccggtcggcaatataatgcagctaaacacgttattttcaagttgcagaagaattgattagtcgtcattggattggatgcaagctttgaattctggtgtgcatttgctgaatacctgaatggttattcgacatttggccctcatccttctctttccctggacgttgctttcacagaattcttgctccccaggctgtcaatatagtaatgcaaatgaagacatgtcattaaagcgatatgaacagcatataccagaatcattctttctttctaccactgaacaaatcaagtgcatgcgttaagattgaggtttgcattgtaatctccacatcaaggaggcgcagtttcttccagatttctgacttcagaagatcccagttgattcatcacacattattcttactgtaactctttaagcagcaatttggtccgacattgcacctttttataatttttcggcgaattgcatatgcaaggaactttgacaaatttaagcactggacgcatatttcaaaaagaaggttttgtcctactcgatgactttgtgtcatcagcatacctaaccagctagcttttgcacaattcaaactttcaggttagacatcgtggcacaggaaacagtatataatcagaatggttacaacacgtaagcatgataacattataaatggtgaaattctgatctgatagttctattcatacatgtatttccacttccatacactctagctgagcatttttttggctattgctcagatatcacaactctctactacactgacaaagtgacaagtgactacctgtacaatgtctaccatgctactgatggagcagagatagctccgaatttattatattttttacatacaggttttgctaaaaaaaagaaaagaaaagaacaaccgtgtgtatacctttaattagtcattccttcagaacaaaaaaagacacaagacgtttggtttcctgtggtttctgcttattaaccctggtctgagatgtatcttcagaagatatatgacataattttcattgttactttccatgatgagaatccaaacatattaatctgcatttgactgaagccattcttgaattgcagaacggagggcatggttcggcaaaagatcacggtgtggtagatcgaggtttgtcatgggtgatgtatagtgaccactatcaaaccactctcttatagcctctgcttcgtaggtgaaaccatctgcagcaattaaagggtccctcatgacatcctgcaatgcataaaatgcacaggtgaaccaagggagaagaaaactgattatctttccttaggtaacacacaaaaaatttggtgtgtcattgcatcagggttgagaaacacacatacaaacagtagtttacaatggtcatttcattagtaacaagaactgagagctcccataacttgaagttcacagagatgtttgcagaactgatatctcaactgctgtccaggcaaacaattgactgactttctctaaaattactaagaatcatactaaatggaaacagaagctcaggagtaatttggagttaatcaaataacatcaggaatcataaatggaagcagaagcgcaagaggaatttaaatccaatcaaatgtcaccctttgatttctcttattgtatacaaaaaatatttcatctagttatcctttagagactagtatattaaaaaaaatagaaatggatatcattacatagacggaccaattaccaaacatgagagtctgaaggaaatcatggtgaggaaatacttttgagagaagggggagtaataatcactaagtaaagtatatatgactaacctgttgtattggacagatgaagtaggatggcacattaccaaagtcttcagatactgatttaaatgataatgaacatagcatagaggaagcagacctcaacattggttcaagtactgtccaaacctctgtttgcaggtcaggacggttttttcttctgatttcacagcatcttaggcctacccgagacaactgctcagcatgcataagaggccagtctccagctgatgaatccaatattgcttgcaagcaaccctttgctactgcccgttgcacatctttcaaaagaccaaatcctgatcttccagtcaagagtcgcaggagtatgataccaaaagaatatacatcagataggggtgtcagatcaccagaaatagcgtattcaggatcaatgtacacaaaagttccttttgggtgggtatggcggtatagagtggttgtggccttgaattcatcagttaacattcggcacacaccaaaaccactaagcttagccacattatttccatcaagaagaatgttagatgctttcaagtcactgtgaacaatgctgtggggtttattggaatggagaaaaatcagtgcagaacaaatattggaagcgatgcgggtacgcaactgccaactaagaggctttgaattgtccttgcaagccaagcggtcatctaagcttccattgggcatgtattcatagacaagagctcgggcatccttgcatgcccctataagagttacaagattcggatgtcgcaccctgctaaggatttccacctgtaaattatcagcaagaacaacttaactgtctgaaatacaacagtttatttggaccaacaaaatgtcaatcaagtttatagaaggtaagtatataactagaacaaaaacttttacctcatgactgaactgtgacagtgactctgtgctttcaggattcaacttctttacagccacatttgtttgccgaagaagtcccttatatacacttccataaacactttccccaaccttcgatgagtgatcaaagttgctggttgcctccttaatctctgatatcgatagctctgtaatgggaattgttctatccgcaattgcagtagactctccattttttacacgtattgcttctgcctctcttactgctttgtcacgctgcaacataagatccttgataatacggtcagaatgggcgcttcgcttctctaggaccaatatcttctcacattgctcttgaaattttgcagcaagttcatcagctgttcttgcaagcctgtcaacttcctccattgttgttgccaattttacctctatttcattcttttgcttcagttctccaaagtacaaattctctgatacctgcacctgttggtgatattaaatgtgagaccaaggattttgtttaaatctgtaggtatcacttatccaaaacatcatttccagatttatactccacgatatagagtataacaatcatgaaagttttttacatggacagtacgaagaatttctctgctctcattggcatgcagccatattatcattagaataaccattaagtatagcacacattatatgagagataaatataattaatctattcttactttctggagagcctcaaataactcctgctctgctttctcacgcctacatttctcctcataagcttcttgtcttactctctctaactgcatgggtatatgctggagctcattgtcagactcaccacgctctttagtatcttcctgcataagattgggtagcttattcatgcatcaaaatttgtgagagcactgccattaagatattagagagctcccaaaattcaaaggaaaactagataagatgatcaaaagtacaaactggtgagctattagacaaaatggcataccatgtaatgatcctctaacttatgtatgtatcaagcaaatgctccatcatggatccatttcaagtgaggatgcaatgtggacagatcaattagtgatcttaatcagatccaacatcgacgtaattgtgcttaccttttccttatcagagtatctgtctgaactagttgtctcgatatgtggttcgaggtttagtttgtgtagccatgtgtttgaaacacaccaaatctctgacaagctactcgatctctccactgaacattgtgcagaagtagcactttgcctacagtcctgcatcacatcatggccaaagggagcagccttcctagtgtagagaatacaaaggaagagaacatagtaaatgcaaatggatgcaggctggaaagtccgtaatgtaggaacaaagtgaagtgtatgatcagcttacaaccatacctacagtataccagtgtgcctttgcaaatgaaccatattttgcagaaatgatctgcatgctgttctacaactcgtgctttcctggatttcagaaccttcattttcctgaactcttgaaacaaggagttaggttttagagaattaatagggcaaagattactatttagattttagaacgtactgaagcagtacaaacactaagtttgcttcccagaaaaccaaggtgcaagcaattagtgttaacatttaattatcttgaagaatttatttagctaagtagacaaaaaccaacacttctcccaagcatggttccttactagcatccactgtgatcacagtgtttcatcatagttactactactacggataaaaatgcataaaagtattccaagctttggcacatgcgtactttgtatagtgcttatcatctgcggcccccattacaagcatggaaacattatgctcagagatgacgtccaccaatccgtatgcaacatcatctgattcaaccaccaatttctcagcttgtacctagagatgaatagcacagtgaagtatcaatcgagattacggatgacattttgcaacaaacaaaaccaatgaattgatacatccgtgttggcctttacatgtgaatacaactgaattttagttcaataaagtgggaaacaggcagaccttctgctgcgcgcatatgagttggtattgatccaagttgtcactgattctttgcaggttcatcttcttgtgtgcaatcagctcctgctctcgcagctggccggcgggaatcttggctccgactgcacacgacaatggatggaggttgcataagcatttgcagccatacacatacatggactgaaaactctaagaggaagccagagatgtaaacaaaatggaagccaaactcaatctgaatgaattgagttggcctcgattgtaaaaacgtagggggtaaaatggtgcattaaaaaaagagagagaaatgatttagtgtgtggggaaaaaggttgtaaatttggagtcattgagggaactggacaaagaaactagacgatctgtgccaatacaatcgtggtagatcggatcatcaatctagactctagtactagtgtaggtaggaggaagagggatgcgtacggatggggaggaagttgggaggggagtagacatggagcagcacgaaggcggtgccttgggggaacttgtgcagcgcccacagcagcgtgcccctgctggactcctcccccaccgccacgtacaccttctcgccggagaaggacggctccggcgaatcaccggggtacggagagggggagcccgccgtggccatggctttgttggcctcgcctcgccggcgccgctttggaatccttctttgtgttggactctcttcttgttgcctccctccctgcctgctctcactttaatactccactgctaatctcaaaatatataagcatttagatattgtcataagtcaaattatgaggacaataaacatcattagatgcattgtgaaatatatattttagtaattttatcttttttttatgtgatagtagatgctaatgttcttatttataaacttgataaacttagcatagtttaaccaagaacagactcgtaaatacttatattctactagaacggagagagtagcattctacaaatgttttggttatgttctggtgatttgaatagtaaatatcaagattcttatttcaaaccaaactatggacactaccaacatctaattctttttgccgggtgggccaaaggctggccgacaaattttcattaataatgaaagaaaatgacagtttagacatataaagtgtcatttccaatggagttcaagagtatttttaaatggtagtttctgcaaggtcccttttttcgctatattttgaatgacttcaatgcttgtgaaaatacaatatacatataagagagttgaattgaggttgaaaacagaaggcataggatttgtattgcagttgcggcagacttataggttgcaaatgcatttaccttctgaaattgaattagttatgacgatgtcatttctgcatttactaatttgtcaacaggacctatgttagcacaattgactacaggcacacgtctgctcggtgcattgccgttgacgcttaactgttaattggtgattggctcaattaagagtgcattgtctgagtatgttccataaaaatcaatttctaactataaatctagacatagcatatgttcaggtttacagtcatgaattagttttaaattttattggaacggatcttcccttctcttgtaccatgtcctttctttttatttttcaggcccattctgtaaatacatttatttctcttaataaaaaatacgtgtctcgcgtattcctaaaattttgttggaacggagggagggagtatgtgttaaatacgtatacaaccatctatctgtataaaatcgcactgtctaacgtactgttaatctagctactagctatcaggcttcacggtttgaatttcacctagtgatttaagattatcctgcaggaagcatataactacatttttcacacctgaccttgcacaattatcctgtaggagtaacttcctttatatagaacatagtacaatacaactaaccaagattattatgaaatgtgcaactactacaattgcgtacgtaaattacctcgtcaattacaacatatcacaagtctccgtaaacaatcaatgtatgaaaggaaagaagctttttaaaaaggttgaaattaaaggttgaaaatttccttgtccttaacactactaactgctactagtgtctatgtcgaccgcacttgctcactcacaaaaagcttaccgtcatctagtacaccagtatcaccttcatcgacgaccgactgaatgaactccaggtcgtaaagtgtgctccctccgtcccagaaaagttaaccaacaaatatatccagattcgttgtattacagtacagcccccgctaaccactgtcttctttctgaaatatgaaaccttatattggacgtctcgatctaattgatagtactagcttatatattttgtgatagaagaaatactgtaatagaagcatgcatgtgcatatcttcacttaatttatgaaagcaaatgaaatatctttgcttgaaattatctaagctatatatatataagagcatcctagtcatctactccctccgtagaaaaagccaacctataaggggatccctctagtactataaatttggacaaagagctgtccagattcattgtacttttaagattggattttttttttacggagggactatagtgataaggcttaacttgtcagttactcttgtgcaaaaagctaaaacgcgtggaaaaactaaacagaatgtcggtcactgatgagtcctttgctttgctggattccgattgaaacaatagctccgttcatggttgatttgaatctctagctagccacctcaatttctctgtattttcctttcttctacttttttttgataaagtgaggatggagcgatattaaatgatgctatgcagcatatttctattaaaaaaatccattttactctctcgaataattaaaatccctaaactttttttggctaattttgttcccgtaaactattaaaattgttcactttactacttgatactctatctatctcaaaacaaaattatttctgttccttcttgtttgtctaaaataaatttatttttgagcaattatttcactgaagtttgtgaaagtggaaccaaattcgttgggagtacataaagtgggtaacatcttaatatgattaatatcttaagctgattttttaagccatagataacactattatgaaaggtccaaaatatttcaagattatatcatgaacgcttgtttacacttcaaaatctcgaagtttatatcaataagtgtttccaacctactccatatgttcgacaaaaaaccaacataatactagatgaggcatttcctagtatatcgaatctagacatagcctgtccagattcgttgtgctagaaaatgtctcatccaatcttttttttttacggagggagtatgtaaaacaatgatatttttttaaaaaataatatcaggaggtaagtgcaattttaggagtgagaggggaaaaataagaggaagagaaaattacccaacacactctattagatgaggtggtagagagtaggatggtagttaaaggtaaaatagagaaaaaaaataaatgagatgtgattaatgtgataagtagtatgataggattgcacttattttgagataggattaaaatctaggccatgtttacttcccaaaaacttttcacaaaaacataacatcgaatctttggacacatgtatggagcattaaatatagataaaaagaaaaactaattacacaatttacatgaaacgagacaaatcttttgagcctaattagtccatgattagctataagtgttacagtaacccacatgtgctaatgacggcttaattaggctcaaaagatccgtctcgcggtttgcaggcgagttatgaaattagttttttcattcgtgtacgaaaacccctttcgacatccggtcaaacgtccgatgtgacaccaaaaattttcatttcaccaactaaacatgcccctaaaattgcacacttgtagatctagggatgaaaaattttgacatgtcaaattggatatacgaacacacatttgaagtattaaacgtagactaataacaaaataaattacatattccacctgtaaattgcgagacgaatttattaagcctaattaatctatcattagcaaatgtttactgtagcaccgaattatcaaatcatggcgcatttaggcttaaaagatttgtctcgcaatttacacgcaatctgtgtaattagttattttcttatatttaatactctatatatgtgtccaaacatttaatgtgaaatggcgaaaaaatttgctagaggatctaaaacaggcccttatgtagagagagagaaaagagatactttagacatgctagacaacgtgtttttctggcagatctacgcgtaaaatgagaaacatggttaacatgtggtgattgagtattaacttaaaaacttaaaaaatagatttatttgattttctttaaacgcaaattctatatcacaaccacgtaagtttagtagattgaaaaatgtgataacgaaaaaacaagaagtagctatggtcaaatagcactttagaacagaccccgaatatagttccggtattgaaatatagaatgaattgcgcatcttttctatcagcttaggcgcttttggactgtaaagaatgtataaacagttagtactactccaaatcgtgttccacatttctattttgcacatttgcaggcaggcgccgggttgatgagtccatcttgatttgccgctgcggcggcggcggttgcgagttgggacgaacaggccaggcggactgcagggcataggcatggccgcccgccccccggacccggagctcatcgaggtaagtttcggattgggagttcgtgcttgcttgctttattggcttaatttcgagcactatgctatgcaatgctatgcttggtcaactaccgatcgatgatcaattgcagcggctgctcaatttttttttttttgcctcttccggtcctcccccttctctattgtttgggtgccttgagctgttgcacgccacctgtttgtatgaatgccatgccctcgtgcttgaagattctgcaaccaaatgttgcattcgtgctaatattgcttcacatgtactgctcatcctacccatggatcgcaaggagagccttcatttttcaccaatatataattccactaaaaccatgactcagtcatgtagttgtggcgcttatttcgcctcattgaaaaagctgctcatgaggcttatcaactaaagctacggcgaattaatcatctttttgttgttaaactatctagggcctgcattccatgaaaattacctagggcagtaaactcatgcttcacatgtctctttcaaggttagaggtgctagagggatggagggttgttaaggaatacacaatcacatatcgagttaaattattgcacagactaagccaatatcaaatggatatacgcaatttggaggaaagtcatgaacaaataaaagtctgtaccttccccctttctggttgaataagcttaagtttttctttttctcaaacagtatgactccaagccaacagtgacctctccctttccttttttcctgtttgaaactagaacttcaatgctccagtgtttgtgaattatcatcagttttattttttgaaagtccggcagggggatcctatatctccgatgatcttcatccttgccatggattctctgaactcccttttcgtcaaagcggaagagttggggctcctccaaccattggggatcccccaccgggtctccctctacgccgacgatgtggtcgccttcgtcaagccgacagtcggtgagctgcagtaagggttgcaattgtgtcaaatccccgcctgctagccctcccaactttaaggcaggaattgcagagccagagatagaaagaatagggtcttcaattctcagcaaaggccttggtcagagatagcccgagctttggcggcggaagcgactctctggtggttggcacacgcggcgctgccggtgctaaccatttaggtcttgttctaggtcatcccctttctgttgccacgagaataggcttaagctagctgttgatcccttgtatcccgtcccccttctatttttcatttttggctcggtttgtacatacacttaatacaaagatgcgctccttgcgtattcccccaaaagaaaaaacataaggatgaggaaatcccatacaatatccctttcctaaaagcagcttatttgacagttcagggcagtcgagcaacaaccttttcatattagtgcagcatgttattcccttatcttcttcttgaagggcaggagaaatagaaagtgtaacaaaactatcatgccataccagtagttttaactgaaaaatcgcacatacattgttaatttctgaactgcccacactactataaactatccatgctcatggatttttactgcttaccatctgcactttttttttacgataataaccatctgaccttttgaatgatcgtgttgtagttttgcttccatgctgtaacgaacttctaactttgcaaaaggcagagataaaataggcatccattgacaggtggatctagtatccttttctgggtactacatcttcttggttaggttacgttgcaagtaagttcatcctaaacgtgtgagcctcctcaaatatgtacatcacttctatccatggactccaaaattttgagaaagtattagctgcttcagttaaaatgtaattccctacactatacaatttaaactattttcttaaactttagatacacgataaaatacaaaccaaataaaaggtcatagttgctgtttcatttgccactcttgaatggcaaaacgaagggcattattgggaatcagctcgtagtgtgtgaaactgaggtaggtcatgggggacgtcttatgccccctttgaagccagtcttttatagcctcaccttcatatgtgaatccatcagcagcaatatgtggatccttcatgatttcctgaaatattcaaaagatgctagattatttcaaattaaaagtaaaaacataaattcaggagaaggtgatgatgatactgataatagatttggcgaacgcgaagagttgttggtttggcataagccatcacacgatttgagtgcttaatttctttgatttgttatccatgttgaccatcaatagagtaatttctcatgtgctctatttgtgctggtgcttaatattgtttatgcaatagatatacagtggtagagatgctttgaaatttctattaatctactgtctcatgatgtaactgacctgtgtcattgggcagatgaaaaatgatggtatcttgcatttgttgtctggatagttcaccatggcttgtaaaacaccccaggcctccttggcaagatcagggcgctcctttctgtcataccggcaacatctcagtgctaggattgccaactttttactatactcaggtggccattcccctgcagaagcatcaactacctgttgcagcatttcattgttcagggctgcctctacctcactaggaaggcctagtggactcttgccagttagcaatcttagcagcactactccaaatgaatagacatcatactgtgctgtgagctcccctgaagcaatgtatcctggatccatgtatcccaatgtgcctttaatttggtttgtttggtggtaaggtgtgatggtggtgtttgtcagattcaacgaacgagatatcccaaagtcccctagcttgcctacaaagttgtctccaaggagaatattatcaggcttcagatcaccatgggcaatgccttttggtttgttggaatgaaggaagataagtgctgtgcagatgtcagcagcaattttgatcctcattctccatggaagtggatctgtttggtgtttacattgcaaacggtcctctaggctcccgtttggcaagaactcatagaccaaagctttggcctccctgcacactccaatcagggtcacaaggtttggatgtctcatccttcccagaatctctacctgtaatgtattggcaaaatcacatatttatataaagttttttactctctttctcatgtaaatatatagccataagttagaaggattggtgaaaaatacctcatcatcgaactctttctctcctgttatgccttcacggttgaatttctttatagccacagtggtatgacggagaaaacctttgtagacacttccacatccaccatgtccgatcattttggattcatcaaagtcgttagtcgcttctttaatctctgtgtaggtgaactctgtcaaggcaacagcactagtagaacaagatacattgttgcagtttatttggctcatcttttcagcttctttcacagcattgtctttctgacgttgcaactctccttgcacagtctggagctcttccattagagaattggcatgcataagctttctctccagttccattatttgctcatttgccttctgcagctcattgtagatctggaggtgctccttttcaagactgaccttttctctggttagtctttcctctaccgcaattttttctttacagagtgaattctcccgtgctctaaactgcgaaaaaaaaggtttgcaatttcgatataaagttgagagactcatctatcatgtagtaaaaactgtatgtacgtatttcactaacacatttgtgcatctttcaaaatacgacgtattttgaggcccaaaggtactaaaatcagtagattaagcataaattcttcatgatgagagggatatggggataacaaacaccataccatcttagacgcttcaaacagctctttctcggctttctgtcggctctagaggatcccgatgcttcctttcttgaccgttctagctcattgcgaacttgctgccattgttcaaacatttcattctgcatgttagcttccacctgtaaattattaaggtttgatctgaattcagtagttgtcctttccttacttaaaaaaaaggtgcatccatgaaggtatccctagagatttgtttcagtacaatatagcttaccatgaaatgctgatgctcttcggagcttgagcttgaaacaggtactgataatccatccacagtgtccaaatctgtcagagttggtgaggaacctttgctttgatggctggaattcggggagcaaccttttggtgctacgtcgactgagtttggccttataggtgatatattttccacgccgttctctaattgtcttgaaaagggaaagggatgactaatggaattggaccgccgaggtagcgattgctgatctggagagcctaagaaacctgaataccatgacggcaacgacactgatcttggagggaattcagacttatctgacagagaactcccggagctgcttctgggggaatctcctttgtcagcaaactgactggcttccctaaaatggtaaacaatcacaataacgttgttttacaatcacaataagtttgtcaaaatggtaaattcaatgtggaattggatttatgttggagactaggtaggactgcatgaacattcatacctagtgcaagcaagagcttctttgcaaatatataagatctggcaatatggtttggcctgttgatgtacaattgctgcaacttttgattttggtacttgcctcttcctgttcatgaaagattcatgcccatggtcaacattgaaattttcagattatacactaattagaggatctggtctctagtttagacaagaagatgatagccattaaaacctagcttgttaacagtagtttaacgtcatattatgcttgccatttgctaagtaagaaatatacaagaaaggtaaattgctgagttgtattaggaaggggaaaatgcattgttcaagaagtgtttgcttgttggtcctgacgcctttgtcatcaatacttgttagaatgagcgacacaaacatgacaaataataaaatcacatctacggactacaatatgctcagtctagagatatctcagtggttgtgattcatgatgaggcctcagtacaatggaataagggcatcttggcatacactgagaaggaagatgttcccataacaagctttgtaatgtgatgttgatcaataagctcaacaatgccatttgcaacactgttcttctcaatcaccaatttttcagcttgcacctgcaaatttggtgattttgctgagatgacatagaatgggaagcaacttctgattagcataaaggatataaaatattgcatagatttctgtaatttgatgttcttattcaatccacttcatcagaacaattagtcataaagcttaatttgtctaggcctggtacaaaatgtggttaaaatattgattgttatctttccataaattgatcctcaagctgaccatagttcactttgttgaaaaataaaattcccatttcatatgacttgagtgagagtgcttatctgacctttggaaatgctctgcagtaactcaggtactgttctaaaagtttattcatatcgtccttctcaatctttctgtatgctctgagctccttttcttctagctgttttgcaggaaccttacacaagcctgcaaggatggcatcatcgcaggaaaccatgagcaccggcgtggacttcttttttttttttggcagagcaacatgtaacactaaaacaagtattatttcctttttctgtgggaaatatagaagattttctgattattaagaaaatagatgtctggtagcaacttgggttaatgcataacatctaattgacagaacaccactttggttattttcaggttcattgtttgtatgatagctgcggtacagtctcttgagaagcagggcatatggaaaagaaaaaatgtgtgtgctgctgctttcccaattgaacagaccaaaggtgtctttcccagaagttgcagagaaaaacaacaatttgtggaaatggaaatacaaccgttgttgcctgctacgtggtactagttatcatactagtaatattgttagtgttgttgaatgctactacttactaataataacagaagaaaagggcaagtagaaggaaagaaattatataccgctcatgattctgtctgcaggctggtggacatgcagcagcacaagaagcttgttgacatcaccctgctgaggctggagtttcctagctgcccactggatgttggccttgccgtccttgaggtccttgccgaccgacacgtaagtctttcctccgtcatcgtcgtcgtcatcttcctcctcgtcaatctctctgaggctgcgggttcctccgcctgcgcgcaccaacatccgctcaacgcctgcaggtactaccggctgaggagacaagggcggcaatggtgacgacgacgacgacggcaacgaagaacgagcacttgccacggccatgcagcgcaaacaacttaaattaactgccctgccaccacacaaccgacagaataagaagcaaacaactgggagtagctagctaggcaggagaaagaacaagtacctactatatctttgcttgctttattatagtttctgctgctgctgctgctggaggcgacggcaacaacaaagcaaacaaaaggatcgaatctctcacaaaggggacttttggcttcgcttgtatgtcgtctggcaacttttataaactcatctgcttcagttattcgacaaaagaaagaaaaatctctgttaaatctatcttacatactccgtactagatagataggatattattgattgtgagatgaagacatttgggagccggggaagtttcctgcaggtatcatccttcatttttcattcatattccttcttccttaattctttttttgtcttcggtcaacaataggagggcgtggatttgtcctgcacagctgttaacttggaatatactgcctgcctagcttgcttttggtcttgggctagctgtacctgtactcccttttaaaagatcctgcatacaaccatgaccatgaaggaaactctcactcttaccaagtcttgcttctactgtttgccttccatcattggttaaaggttagtaatatgaaaatggaagacttattgtgcttaatcctatgttgggtgaggtcaaccttattagctgcgtaatggagtattattgtagtatactatatacaggtctgtgaatgtatatgattctcggatgtataatttatttgtgcttgttcggtgtcatcattctctcttactccatatatgtatatataagtagaagtaacacaagtagtagcagggtacattgacattgaaacggaacacttccttttgttgttgtatcacgttaatccaacatgaattacttaatcttttctagtcgttggatctgcattactagttcaactgacaaattaaggcggcacatacaaggttgcttgctagggaccctgctggtatatccaagatgtatcaggtatattccgccaagtcgtcagtcatcagacgaagaaatgagagaaaaattcttttgtttgaataaattaattggatggttggtttaagctatgcgattggtcagtcagtcatacgcatttcctatatagaatatagctcaagtatactcactctgtcctattttaaatgtaactatgattttccgtgcacaactttaaccattcgtctcatttattttttttaaaaaaaacatgtactattcatattttatcatctcataacaataaaaatactaattataaacaactttaaataagatggataattaaagttgggcacagaaaattatgattgtatttaaaaaatgggacgggggagtactaggtgcatgtgtccttgttattgttaacaagttgtaattaatgtaacacgtaagtagtgcaacgaattcaattactaatacggccctgtttagttcacatcaaacttccctcaaactcctaacttttcatcacattacatcacatctaaaactttcctactcacataaattctcaacttattttccaaactaccaacttttcctaagcttcttcctaatttcaaaaattaaacacagcctacatttcagaggcagtctagctggctatcgagaagtgcaggccttgggcggcggtgtcgcctcttcctgcgcggatatatggagatggcgtctcacatattccaacagttctgtcagcacccacaaaatcaattggttgttgaatcaccccattcctcaagtcaatgggtaggatccatgccttgtgagcaaggtggtcgatgtgcaagctgagcacgggatgacccacatggagcttctccaagataggaaagtagttgggcagcttaggcatcaaatttgagacgtccgaagcatggagctggcagtcgttgcgccagcaaccagattatgtgttccaactctatttagcgagttatgaaattagttttttcattcatatccgaaaattcctttcgatatttggtcaaacgttcgatatgacacccaaaaaattttatttcaccaactaaacatgttctaagtggtggaggcagctggatgtagcttggggcaggttcctcttgaaggagattgacaagcacgatgcccagccaaaggtcaacgaaacccatcagtccaggagcttgggcggcgatactctctctccccaatctcacttccagggaagccaaaccaaaaaaaagaaaagaaaagaaagcgcccctcttctactcctcggttatgggcttatgggctaggtgcctaggtacttgggatgggcctttgcgacaagtgtgatccagtggaaaaagtacaccaaagatccctcaacttatcgtaagatacaaaatcgtcctcgaaccgcaaaaccagatatacggggtccctcaattatacaaaaccggtcacccaatgtctttggtggttttgaccctggttttggtccggtcactaagccaatgatgcaggaaatgcacgctaggagaagtttggcatgcttagttagtgggagcacttgaggaagactaaagcttgaaaggggcttcacttctaggacttcttggctaagaggatgcttgctataagaagtataagtaggcgggtaacgtttcatttcttccatagaatctcaatatggcgagaatgaagcagggcaattaaagtttgaattcaattcaatagtcaaggtagagtagaaagggggggcgtgctacttaacgcaactgcacttggctaagaaaataggatagagcagagagagcctaatctcccgcttggtcattgagcagtgagccgaggtgcgatgagcggttgagtcacgcactacaagatggctgaaggttggcggcttagtcctcgtgggacccacatagtccccacatgtcaggtgtccacgtcaccctctctttttcccctcctctctctcacttctctgcaagctaaccggggcgagacgggagggcagcgccgtgacggccgccggcggaggcagcgtgcgagcgcgacggcttctccgctttctccgcctcctcgtcccgctcggccgacgtgggcgcgctcgccggcgaacgcgtcggccctgtcagcggcgccggcgacgcgtacgcgcggtgggacgcggcggtggggtgccgggcgctcgcggagaactaccggccgtggtcgcccgacccagcggcgctgcagcacgacagcacgtacgtggttggttggttggcttcttttcggtttgttcgttccttgtggttgagagtgagtgaggtggaggagagagaggaggaagaggaggggattcattcacgtggtttccggagagagcaggagccaacgtgcggcttgactctggagatctctctctctctctctcaagcccaaatcagaagtgagtgagtgagtgattgattgattcctcctccgtgttcctgtccggcatttatgattttctctcctacgttcttgtcgccgtgatgtgcgtgtgccaccgatgaaggcgtcgaggtcgtgagagggagaggaatcgacggagagagagaggcggcggcaggaaaaggtggagaagtcaagaaacaagaacccaatcaccattgagattgggttcgttttccaccctcctctgcgccgatgcgtgtttcttggtgttcttctctgtattgttcgtttcttttttgtgtggatggaatcatggaaatggaataaagatttgcatctttaccatctgcatgcgtggggctccaggttgcagggtatcaggatatatagcatctggctagcgtcgattttctttttcttttgtgtgtctcgaaatgataggaatcgtagtactgatcatttctcccttcgtcggcaagaataattcctctctttatcttggcgcaagaatctaatttgcagtagaagaacatgcatggtttgagtagtaatatcctgtattatgaatctggctgcagaacgcctcatcactgcagcaatgccatcatcagccatggccgtcgacaccactgctcctgagcattggctcgactggaggttcatgctctgcgcggtctggccgtctgagtctactcctgcatggtcctggcatgcttcttgatctggaagtacgaggggccgagctcgcaggacggcaatggcgatggcggcggggacagtgaggatgcacggccgccccgggccgcatccggggtcgatcgcccggcaccccaccgccgcgtcccaccgcgcgtacgcgtcgccggcgccgctgatagggccgacgtgttcgccggcgagcgcgcccacgtcggccgagcgggacgaggaggcggagaaagccgcctccaccggccgccgtcgcggcgccgccctcccgcatcgtcccggccagcttgcagagtagagagagagatgaggaagggagagaagagggaaaagagagagggtgacgtggacacctgacattgtggggccacgtgggtcctatgctgacttaaccccacgtagactaaaaccgaggtcaaaaccaccaaagaatctcgggtgaccgattttgtatagctaaggactagcatatttggtttttggttttggggttggaggacgattttatacccaacgactggttgagggaccatcggtgtactttttccgtgatccagtcaattgaaaaaaggtccacctgacgtccttcaactctagcttaagtttataactagtaaacgtgcacgttcgcacatcatgtcacactaattaattattatgtacaatcaccccaagataataatcttgcaaacaaccaaagttcaagaattatatatattctagtgtaaattggtaactcgtttttagacactttctattaaaaaataaatacaaagcagagaacggtatgaaatgtatacaatggtgccatagctttgatatacacgcactaattaaactcagctctacctagctacatctaatcggaaaaaaaagcctcccttatctacataatagcttcccttcatccacaataagttcaaatgcgctacaaaacaatctgcaataaaaatatcatttaaatgatctccaataaataactcctgtcgtatcaccagtaatgaaaaccacaagccctttagtgttgtactgttgttgtatactccatccgtttcgaaatgtttgatgccgttgactttttagcacatgtttgtccgtttgtcttatttaaaaaatttaagtaattattaattcttttcctatcatttgattcattactaaatatatttttatgtaggcatataattttacatatttcacaaaagttttgaataagacgaacggtcaaacatgtgctaaaaagtcaacggtgtcaaacatttcgaaacggaatgagtacttacaaatgtttacttatcgatactgatattcagacataagctcgctgaatactccagctacgcggtcggtcagtaagtcatgtgcatgtgtccttgttatggttaacaagctgtaattaatgtaacatgcgtacgtagtgcaatgaattcaattataaagtacatttcacttaggcagtctagctagttatctagaacggcaggcactattgcattattactgttccccgtcctccggcggtgtcgcctcttcctgcgcggatatctggagatggtcgtttggacatacgtctcacttattccaaacgttctgtcagcaccagcaaaatctgatggttgttgaatgacccagttcctcaggtcaataggtaggatccatgcctacctattgatcttggccatgaggtgaacaagatgggcgtcgtgcaagctgagcacgggatgacccacatggagcttttgcaagcttggttgaggacgacgggcagtgtcgtagtttggcagggtaggcatcatatgatgtgagatttgagaggaacgtaggcggcagtccatgcgccagcaaccaactccatttagcggccgtccagccatcagcaatgtgtctctctgcgggtgtggaaggcctttgaactcaaactcaacatagttgatgcaaccctctaagtcgatggcaatgtcacgaacatcgcttgcgttgccctcgtcaatgcctatgcctgattcgtggaggcaatgggatgtagcttggcgcaggttggtcatgaagcacattgacaagcacgacgccacgccaaaggtcagcgaaacccatgaggccaggagcttggcgggagaggttgatgaccttgtcggtgtgatggaagaagaaagttaggggaggcgagctttggttggtggtggagtggtagaggtggaggcggtattctccccctggcttcctgatgggagtgagcgcggcgacgatatgatgtagtgctgctgtttggcgtacgtgcggaattagcgggtggtggccacggaggatgccgacgtggttgtcaagaaagaggctgtcgaggtcgccgctgggatgggggatgcgcgtgagcgatggcgagctaccatcggagaggaataaattgtgacggttaccatggccgagggtgaggcggaagaggaggaggtcgtcgtgagcggcgatgatcttgggctcacgggcaaagtcatccgagggatttcatggccctcccttgttttggaggtggcgttgcagatatcggcaaagtaggcggtcttgtcgaggagtgcccagggtggcggccgcccccgccggcttttcttgtgaacgtctcggccgtgcgcaggaggtcgcagggaggagtccttgatgggcttgccaacctccatctctgatctctctctaagacgacttaattagcttgattgatctttcaaggaagaggaagaagagcaccacagaagctggacatacttatatgctggggggccggcctgggcactgggcagcagtgagtagcaatcggagtcggagatagtgtgtttcctctctctctctctccaatctctcttcggccggtgcacaggacaacaaaaaccgccatctttgctcttcgctgtgttctcaagggtgagaagaaaccatccgtgtttttgggagaaattttcaactctaggaatgacttattttgtaatattctcttctctttctctttgcatcacaaatccacaggttaacaatattagtaacagttcaagaatatgaataaataaccttcttatagttcaattgaaaaatattagtatcaaacaaacaataatctcctagttagtaaaacatccgagggcaactacttctcacagctgataatatcattataccataccaattcgttatgtatggatgatggataagatcctatgaacagagagccaatttgaaacttccaatggatttatggaacaatccggttcgaatagaaataatgtgctccacaagcacgtaaggaggatagatgcccaatttatagcggccaagttgatacctccagcaagcagctagctacaatgtttttcacacacactccaaaaacaattgagagtccagaataagctgattatctaccaaaaaaaatctcaaactacacagggcttctttctgttaacttccaacatctaaagctcctgtcaaattcatgccttctaaagctaccttttcctgcgcttggaagacttcactgtcaacgtccttggcgcttcatcagacatcttaaattcaacatactgctcctgcacaaccgaccaaggaagagcaggattcgtgttacatatgttccgtttgaaaataatgcgaggaatgtaaatcacgggattatctgccattttggagaaggacagatacagacctcctcccactttttctggagctgcaaaagctctttacagcatgccacacactcagcatggtaagcagcagccagttctttaatcaaggccttccttttgattattcctatcacttcaaaacaccatggcattatatacaagcacaagaatgctggcaactattttacaaatgaaaaatgttttttagattttgcaagcaatgcatcaacagaactcaatatatctctaatactataatgaggccagtgtaccatgtgaaaatcatggagagataaagctttgacatttcataactcactcatgacaatatactagcaaggtagctagtacatgcataacaattgtacttctattcagtatctggtaggataggatacctgctccaatcatttatatagagtcaaattttttgcaacatactagacttactccatcccgaataaactgagatgttggttcaagaattaccatcctatgcacatctctcagaaagctttataagtgaactgaattatggaccaagggctacgaaaattgaggccatggccatggcatttgataggatctttgtgcattcctagttgtgcagcagatgtttatttcgtgtgactgtgagatttccaatttgattcgtggcgaattgttagttagcaatactagtttacaaaacctgaaccctctaaagcaaatcagtatgagtcgtgatttgttatactctagtaccgaataggagtaaccaaatctagagcacgaacacaaaaggtaacaaaaattaaaggtgcgtgagaaagagagagacccttacttcggctgggatcgaagtgttgctcgtcgggcttcttctccccgttggccgtcggctccccgctgccgctcgcgccgtccatgggatgggaggcggaagatcgccgcggttaggcctttgcttagatccaaccaaacaagccaacacccaggaaaggggaaggcgacagagccgagccggttctctggatgtgtatttgttgggatttctcgcttctaggtcgccggcgaaaaggggctcgctggccggagacgaagacggagacgcagatggagacgagagtgacaatggcggcggcggacgcaacgctccgtcggcctcgagtaggaaagtgaaggaaaccaacacaaaagaggaagtatatgggcctcagcccggcccatgtacagtttttctgcataagcctctcgagcggcccaactactacacttggactctttctctctcattccacttcttgctcgccgccgacgccgccgccggcggcggcgaaggggatcgatcggatggggacgtcggtgcaggtgactccgttgagtggcgcgtacggtgagggacccctctgctacctgctcgccgtcgatggcttccgcttcctcctcgactgcggctggaccgacctntgcgacccctcccacctccaacccctcgtcaagtacgcttccaccattttcgccctaactctcctcttggctagtcggggtcagctgctttggtgctagtctttctcctttgccgcatgctgcgatgagttcggatgggatggggatggggttgccatgcgcgccacctgctcgttcaattgcctacacttggagacagtgaagggttctccggctctgctgtgattttgtcatcttagggttatctgtgttgctatgtaacgaatgagatcgtcggtttaggagattgatttgcctcaactgaattgctgagtccgacaggtgttcgggtgtgcttgtgcatagtcaggcttggtgcatgttatgcacttgtgttggtgggtccgtgtgcacgaacgcatatgcacttctacattgtgcccatgatcctgcatacataccatatggactacttactgatgtgttgtttatgtatgaccttaattgttaattagtatgtgccaaagatgtagctcgagtttctaaaccgtgcttaatattgcttctcaagcttgtcttactgggcgttgcccctcaacatttcatgtggtttttacatggaaccttcagtaattgctttcatttgcttaaatggtgaatatctatcttaaggcaattatagagtggcatgatcaaggcaattttttgcctccctgtaatagatagcctgctttcaggttgaactctgactcatatttatatttatttttctatgctgaataaacttattcttgttcgtcttccttgattgttgagtaatcatggcatagatttagtagcaattatctcaccagcttggtactagtagcctcaaaatcatgcaaaagttccattttaagctcccatgatctttgttgttcaattattcaaattacacatctgtaaagattgaagggaacacttgaacatgtttcagtatttttatggattatgaatttgatcagtatttttttttcagggttgcaccaacaatagatgcagttcttttgtctcatgccgataccatgcatctaggagctttgccatatgctatgaaacatctcggactatctgcaccagtatatgccacagaacctgtatttagacttggcattttaaccttgtatgattactttatatcacgacgggtaagctttctagtgtccattttaacctcttgtttgtttcattgcatatagtggatctaaccattctttattttcctttgcagcaagtttcagattttgacttgtttactttggacgatattgatgctgcattccaaaatgttgttagattgaagtactcacagaaccaccttttgaatggtcagtaagcatgctgttgatgtatatcctttgctaaattacatccccttacatactattgattggcagataaaggtgaaggaatagttattgctccacatgttgctgggcatgatttgggtggcacggtatggaagataacaaaagatggggaggatgttgtttatgctgttgacttcaaccatcgtaaagagaggttaaatccttcctttgtcatttacttgtcattttagttttctctttattagcaaataataacagcaatgtgcttttccaggcatttgaatggtactgctcttggatcatttgtacggccagctgttctgataactgatgcatacaatgccttgaacaaccatgtctacaaaaggcagcaggatcaagatttcattggtacaacactggacatgttattatcatagctctctatctctatctctttttcaaatgctttcagctctagcattactactatacccacacagccatggttgcaggtaacagctcatgataattttgttggaagctgttttttacttatgttttctccatcaaagtagcactgatgaatatatcttctattttccaaatttgcaacttggacacaactttttttatttctcaattattttttagtgctacacattgttgagttcaataataaactattaatattttagactccaaatatatgttatcgtgtatatggtttgttttagttactgtatgggaatcctcttgtgatgtctaattgacatcctgtttcatgcagatgcattagtgaaagttctaactggtggtggtagtgtgttactgccgattgatacagctggtagagttcttgaaattcttttgatattggagcaggtgaaatcttgaaggtcttgttctcgtactgttttattttgttatgtcaataatatgttcaccttttgtcttgatttattgcagtactgggctcaacggcatttgatctaccctatctactttctgacaaatgtttctacgagtactgttgattatgtcaagagttttcttgaatggatgaatgattcaatctcaaagtcttttgaacacactagagacaatgccttcctattaaagtacgaatgattcttgttactttcctttttttcagttcatcgttttgttttattctgtgcatattgacaattgctatgcattgcaagcctgaagattcatgatgagcttattattttacatttcaacagcccaatagacatgtttcctctattactttctccttatggagtcatatttatattttatctcattgggctgtcctgttattacaatactgtattatcagagccaattcaactgcctcttttcctgaatcagcgctatactattatttgtttataaacttcatatataactttcttaagaacgatatttgtatgattgttttgtttagtttctacaacttttgttttttctgtgttgcagatgtgttacacagataataaacaaagatgagcttgaaaagctgggagatgcaccaaaggttagagtaacatttatttcctccatactgtcggaaacgtgaatttaacaaacatttagcaggtggttctagcatccatggcaagcttggaggttggcttttctcatgacatatttgttgatatggcaaatgaagcaaagaatctagtactttttactgagaagggacaggtaaatccatgtactcaatatatctggatggtttatttctttctcagcacatacattcaataactagctacatacaaaccattatagcttcaaacctgtaagtgacaagtagtccaacaccttgaaggggccttagcaaattgattgctacaacctacatgaaacttttaaaatttgtgtaaacaacatgaatcttgatgatgaatccaaacttacgtcacgttaaccatatcctctctgccttcatgttccatagatttctgtatttgcaaaaactgatcaaacatttgtgttgttctcactcagcaaaagaattctagcatcatatatctatgttctacagctatctaattacaaagtatcccattccagtttgggacactagctcgcatgctccaagtagatccacctccaaaagctgtaaaggtcactatgagcaagcgaattcctttagttggtgatgagctgaaagcttacgaagaagaacaagaacggataaaaaaggaggaagcgctaaaggccagtctaaacaaagaggaggaaaagaaggcgtctcttggatcaaacgcaaaggcttctgatcccatggttattgatgccagcacatctcgcaaaccatccaacggtatagctaggctgcgtttgtaagacctttacgatctgatgcaatatattatatgtggttaacaacccttcttggctctgtggttccatcagctggttcaaagtttggcgggaatgtggatattctcattgatggatttgtccctccatcatcaagtgttgctccaatgtttcctttctttgaaaatacttctgaatgggatgacttcggtgaggttatcaaccctgaagactatctgatgaagcaagaagaaatggataatactttgatgcccgtaagtttgcttatgtactttttttcttttttttacaatcggaaccctgtggccagatggtttaattttgcctggagcatatcagccaactatgtttagggttttctttcttggaacctgaaaaaacttgaaatgccaacaaaataaacttgaatgtcaatgttttcatgaattgttttcagggtgctggggatggtatggatagtatgcttgatgagggctcagcacgcctactccttgattctacaccctcaaaagttatttccaacgagatgactgtaagttttttttcccatttacttcattttgtctgtctgtttatttatttctagaaaaatctttacttctatttaattatgatcaacatttttaggtgcaagtcaagtgttcattagcatatatggactttgaaggtcggtctgatgggcgctctgtaaaatctgttattgctcatgtggccccattaaaacttgtaagtgctggaaatacccttcttttagcatccatgatttaggatttagaatttatactttttgacacatgattatctccttcttggaacatatatttttctcacgtatatagcttgtcccttttcaacaagaaattagtttgaaattccctaaacctatttactgattattattgatgcccttgagctatggaaaccatttacaaatacaattatttacatttccgtttatttcttgagggtaaacatgccatcacatactgaagctcctgttacattttcaggttttggttcatggatcagcagaagctactgagcatttaaaaatgcattgttcgaagaactcagacttgcatgtttatgctcctcagatagaagaaactattgatgtgacatcagatttatgtgcttacaaggtctgtataacgtttatgttaacagccaaactcttattatgtgtgacgggcaggcgttgcctgatgctggtgtccaattcttatccgatgacttaaacaacatgaggcaaaactgaatagttgccatttaccaatcatttttactgcactatcactgtatcatatatttccatacatacacaaacttattcactatctttgtaatttcaggtacaactttcggagaagttaatgagtaatgttatttctaagaaggtaagagcattggtttcctccttcactattaatgtattttatccttcaactggtgctaataaatctccttgatgtggacgctatcagatgatataaacttgaaccaaattaagctatcaaactgatttttttgcttataaagtgagccagattcccaggaccattcatgtttcagtagtaataagattataaccagaaaaggcagaacttcttctattgttgcaaaaatgttacttcatatgcaatatgtatatgaatgaccgaggtccttccaatgcagttttgagaaatgattgattccatactggttactggatggtccattctgttgccctagtcagtcgaatgtttttcagcataagaagcctttcatgacaaaattgtctgtgaaccagataccacaagcctgtgattatttctttttttttttgcccatacaagaatatgaatgaccgaggtccttccaatacagttttgagaaatgattgattccatactgcttactggatggtccattctgttgccctactcagttgaatgtttttcagcataagtagcctttcatgacaaaattatctgtgaacctgataccacaagcctgtgattatttttttttttgcccatacaagtatacaacctttgggggctaacctgaaactgcactttgttgttatggattagcagtaagaaagcactaacactggcactctgtgcagttgggtgagcatgaaattgcatgggtagatgcagaggttggaaaaacagatgacaagcttactttgttgcccccgtcgtcaactccagcagcccacaagtcagttcttgtgggtgatttgaaattggctgattttaagcaattcctggcaaataaaggtttgcaggtaagttttcattttcaaatatgttagtactgtataatattaagttcttggatatactggcccttcacgtttcagtgttgagagagagagagagagagagagagagagagagagcatgtcctgacagttacaactgttactcctgctcccatacagaaccagttgttagatggctcctcttaggagtacacttaatattgtttgcataacttactagtagctggaataccaaaatcgattaacaaaactgtaataggctaacttggaagcagatgttaaccaggctgtaagcatgagtaattatagctgttgatacattctgaaaccattgaaattcagggctaagagatttcttgcaggttgaatttgctggtggtgctttacggtgtggtgaatacatcacactgcgcaagattggtgatgctggccaaaaggtaagtagtggtgaagtagc

SEQ ID NO: 10162 - DNA, 8568 bp, Oryza sativa
  unsure (1)..(8568): unsure at all n locations
aataaattataattacgtaaattttttgaataagaacgaatggtcaaacatgtgagaaaaaagtcaacggcgtcatctattaaaaaacggagggagtattttttttcaatatttactgggttgtcccacttgagaacagatagcacctggacctgggaagagatcggtggcacctgctgggtcagatttgctggctttcggcatgtgccataaaccgtatttcaagctacacacttgaaacactagtgcagcaatatgatattttaataagtagcttaacctcattgatggggtcgagttaaaacaatggtggattcgtcctctttttcttcttcttcaggttagctgtcctggaacagttgttcgtatttgtactttgatctgaaccctctttcttgggatttgctttttgtaatctaaagcttgctgattcatcataaagaatgcagcaccattttcacatgtatccctaaacaattgtagaagtataaagtaatagcatgcaaactgctgacgaagttcacaaactgcgtagtgtggacttacgtccaacaaaaaatgtacacatccgtccaaaaacatcaccatccagctacctactgtaccatccgatttggttcgatgcagccagtacatatccatgtacgaattgcacaactcagctgcaaggatcgaatttttgagtgctttcgtttcgtcgtcagatgagcacactatctaacaaagtgtcactgtcgtcgaacctactgaatcttcagacaggtcttgctgaggtctgctcgaagagttgtttgaactattcttttataagatcgcatatttctgggagaaagagttgtttgaactcttcttcagatcgcatatttctggtcgagagagaaaaaaaagataccagaagataacaacagatctcccgagatcaatgccgtgatgtcaacatggaaccagactacacctgaaaaggcactgaaaaagaaattgaaacgcgtgtgcagagccaaacgtgcaaatatttgctgggtgctcagtactcgcctcaactacaccttatctcccgaatgcaacaaggagcacgtggacgccttattcggaacagcaatgcccataggttcagacttcagactgtttcagtagttcacacggccggttggcctgtatataaatcacgagaggatcgatcggaagtcaagaggagataggagacagcgaaagcaaattcaacgggcaagaagtacgtgtatttgccttcgagttcttcaggattcagagtttcagacgacaccaaggcccaagctaacattaggcgatggacgagcaaaaccagtggctcacggagccggcaagtacatccagtccttccatgtaagctctgaaatcttcgagcaaagcgtatgacgaaatgattattgcattgttaatgtcaggagcctgaagagttaacctacatgtatcatcaagaagagcacgccaggatgcaagagcaattcgctgggacgccgctcgtcgagcaaccagttcgatttgatcagttctacccagcatccatggcgccaaaccagttccatccgtctcactgctccagcttcccggccttcggtggctcgtcggcattgccaagcttggcgttcggagcggtggcgacgaccaagaaggagcaggtgcagcagccgtcgccttcgtcctcgaacgtcctctccttcgccggtcaggttcagggtagtaccaccacgctcgacttctccggaaggggatggcagcaagacgacggcgtcggcgtgttccagcagccgccggagaggaggagcaggccgcccgcgaacgcgcaggagcacgtcatcgcggagcggaagcggcgggagaagctgcagcagcagttcgtggcgttggccaccattgtccccggcctcaagaaggtgtgtgtacatgtgccccgatcatggcgtgcattgattccttggcaaatgcggcattaacacggttgtccatttctctctcagacagacaagatctccctcctggggagcaccatcgactacgtgaagcagctggaggagaaggtgaaggccctggaggaaggctcgcggagaacggccgagcccaccaccgccttcgagagcaagtgccgcatcaccgtcgacgacgacgatggcggcagcgcctcctccggtaccgacgatgggtccagctccagctccagcccgaccgtggaggcgagcatccatggcaacaccgtcctcctgaaaatctgctgcaaggagaggagagggttgctggtgatgatcctctccgagctcgagaagcagggactgtccatcataaacaccagcgtcgtgccgttcacggattcctgcctcaacatcaccatcactgcaaaggcaaggctagctttacctgtctactactcctagatcatttgggtttcgcatctgtgtaaatgtggctgtaaaattgtaattagatggttgttgttatagctggttttgacaggtttcagttttgtgcagatcgaagagggtttttcgacagcggttgagcttgtaaagaacctgaccgtggctgtcagaggtttcaaatgaaggcagaaaaaaaaaaggaaactggtgtacagaggacaagtgactagtataagtattatgcagtggcggatccaggaaaaaattatagcggggctaaaccaaaatgatcaagagcaactaagagagatttagggttggttttaggacttttttagcctttttagccttttaagcattttaacaacctcaaacaaagtctatattagcccctcatatatgaatatatagattataattttagggggtattatgggggctctaatggtatattagggggtaggggggtctaaagaccctccgcccccacgctgtctccgcccctggtattatgtacgtaaaaaatgtacaattggcattatatgaagagaccaaagatgtattgattcattcgaagaagtacgtagcgtataaattgttcggatctcatgttagatgattagtgcgtggctgaccgctccataaactctgctgagtgggagttggaggagttctctagcattaggctgcgttcgtttgttcgggttaggaacccatctcctccgcacagaaaacggagtgttccattagcacgtaattaattaagtattaactttctttcaaagttggatcaatatgattttttaaacaactttcggatagaaacttttttaaaaaacgcaccgtttagtagtttgaaaagcgtgtatgcgaaatacaagggagaggggttgtgaacacagaccaaagaacacagccttaggagctttagggacagtggaaagcaatgaaggtaggaggggcataaataacgccagagaaagagaaaatggtagaatgggaggaaccataaggggggaatgagactcccctataactttataactttatgcagtttacagttgcgatactgacatgtgggccatacattggtaaggtccacatgtcagtgccataactgtaaactacacaaagtcaggggatccgtttccacacgggggagataggctagctttaagggaaaagaaaaatagagtcggaggggtggaggtcttgggctagctagcgggcctcgccgatgcaaggcagagggtcgcagagtgcctctgactgcatgtggctagcggcaaatcaagaaagtgaagaaggtggtggagaagataaaagaggaaattagggagcttcgtgtatcgctatatttgatctaatggtaaagaattcgtaagattagaggcctgcctggaaacattgaaaaaaattataagtgtaaaaactttacacttgtattttcaagtgccccaagaaaataatccttgtgatctttccagctgtattgtaaatacacctcgatttttttttcttgtttgggtaaacgctacccctgaaaactcagcactgtcatgaactgatgaattgaacaacatgctgcatctgggcatgttggtatacacaccattatccatgttagagtactatattgcagaacacattcatatcaaagtaatatattgcaaactacatgcatgtcaaaataataacgtggaatactagcagttttcctttcggtatatatgacaagaattgagcaccaaattctaaactcctgccgaatacataggagaagaaagaaacacaacggtttaactattataaggatgacaagttctcttgtagtttgtgtcacttggccatttgttcaataattgttctagcaagactattttcatgttatgaactattataaggatgacaagttctcttgtagtttgtgttgcttggccatttgttcaaccagtacaacatgctttcctcattacaaaatggccatgtgttgcagatgtgaaatcttcatatattcattgtgtaggatcgtaaagggcatttcccaccccaaaaactagacattgaggtgaggggctccccacttatatcttaggtcatttgcccttttacaaccaaaagctagccattgaggtgaggggctcccccacttatatcttaggtcctttgccctttcacaaccaatatcggactattcaacagtctcccccttcacacattggtgtccctcagcccttcaccgccccttcaccgtatacgggccccacacccacggtccatcaggtatacggactccgcaggcacccacggtccatcaggccttcacacactgtgtccatcgggccagagatgttaacctagccaggctctgatactaattgtaggatcgtaaagagcatttcccaccccaaaagctagccattgaggtgaggggctccccccacttatatcttaggtcctttgcccttccacaaccaatgtgagactattcaacacattgcagnnnnnnnnnnnnnnnnnnnnntgcaaattttagtgttaaaagtgaatgaaagtcgggcaaaaaaatatgaactgcaaaggaagcagaaagcagaaagttacaatcatccagtcaggctacaagcgattagcattttaatttttcaacaactcatgaaggaccaagatccaattagcaatatttgatatgtactataaataaatatctcatattaaggagcctaaatttgagcattagctcagttttagcataggcaatgttagcatcacagggttgtcatcacatgccgcctatctctacgactcatggagtcctagcctctagcctaacaccgtgtctatgctatttattactacctttatcttgctatgaactaaaaactaaggtactctatctaagcagagcgatgcacacacaacaatgagaatatatcttacttaaataaaaaaataacaactaaaggagatcatgaatacacttataaaagaagcattcgtcgaggtacaagatcggagagagtgacaacatctccggaactcccctcactcaattcctactctactagagcaatgcctaagtatctacatatgtgaaagcaacaagctctctccaacaaggatgagccacgtcacctgaataacaatagccctaggatgatagtgggaagaaaagtggaccgttagatcatcgggataatacaccaatcagctatcaggatagttccagatgaaaggtcatataacagtgttagtcaaagtagcttagtcaaacaaatatttaaaaaaaccatccggaagatagcagaaaaaggcagggataaaaaaccatcgagattctctcatataaaaatgagaagaagactacccaaattaaatctacttatagtttatcattaaattattatatgatttatatattgcacaactttttcactgaagaaaactctctggtttacataactcttacatctgatcggagggcaacaaaaacctaactaccaactaaggtacaataaccttctaaatttttaaacttaacacattataatgcgtcaaaccttttataatttgaaaataaaaggatggtttgaatataatatgttcattattcctctgcaactcaaatcaatattttgaatggtgccactttctatcactaatacttttggttagtatgaatcatgaataccatgcatatgttcttctactaaggtaagtgccacgtttacatgccaaatttctttatggacaaattatagatcttttatagtaattgtattataaatttgtacaaggagtagtaaaagtataacagctaaaatatagaacacattatgtaaaactttaggaccatcaatatgtgttgttagacttcttaaagcatttaatcaccagcataattttgaaataaatcataaagcatttaatctactgaacataaatcttatgttcaatctattctataactaggtggtgtttttggaatatatgaagcacaggttctacctcctagcaacaactatcaaactattatacctcttgtcaggtgatatattattaataaactatttactttcattcttttatttcataatgttcagcacttatactttacgaatttatggaagacaaattccatctcattgcccacaattatcaaactattatacttctatccaactaacataatatggaaatgaaataaaatatttgactgctatccttctaaatcatacactttagtatggacattatgtctatatttttataaattacacctatcattgcacgactactcaacctttctatatatgtactattcatatatttaaattatcatcagatatttctttcagctttaccattttaataatcaatctatttacatgtatacaggtgcaacaatatgctccagtaacaagttcttcatatgaacgaagaaatattaccaatcaacttatgatagactttagcaagctatatataccttaatattttgttatgaacactactgttagtacatgtcttccaaattatattatacatggttgtccaactacaaatgcataatgatgggacatcaagtttatatatattcacaatctgcagttcatacaatgatttcaggcttataattacttcaggcacatatttgttttgatggtctgctggtgctgggtgtgtgtattaattattattacctgatgcgtgtatattgctgacctacaggattaaaatttgcgtggactacaaaggcagttcatcttaaccgcttatctctatagtgtatcatgctcacttgcagaggtgcttccatgaggagcataatacttcaacatattaatgatttcaggctttgacaattgctcttcctgttgctacacacttcaacagtgttttaatatggtcaatggtcatggctatgctactgttcggagtcacctatgtgattctaaggtttcataaagtttcataaattatttgtgattcaaggcaacaaagtatcattgtcattaacagaaactcaacttatcgtttcatcttgcagaacatcgtcatcttacaagggctataagcatcaggaatcttctaaacatgattggtttgggcaaatgaaaaatacaaaattggactcagaggtattgcctccaaatagttgttactacttggactcagaggtattgcctccaaatagttgttactacttttaactagctatacaagaccaagttttgatgtcttctaagctttcctgtatatatgttactgttgtgcttgttagggaatcttggaaaactaaactctatagttatgcctaggggaaaacagcgtgggggcggggcctctttagacccctacccctaatataccattatagcccccataatacacctaaaattctaatccatatgtttatagatgaggggctaatatagactttgtttgaggttgttagaaggcctaaaaggctaaggcccaaaaaaatcctaatccaaccctaaatgtctcttagttactcttggtaattttggtttaacccccgctaatcctaacccaaccttaaatgtctcttaattactcttgttaattttggtttaaaccccgctataatttttatgctggctccgccactggttatgcccaaatgcttgtagtgcctaatcagcttagatggccctatacttgatcttgaacatctacactttttcagacaaccaattttactatttgttttgctttttaatagttgacatagttagccggtaagcaatccatccatgatcccagagtgctttatcttttcccatgctgtcattctcgatttattctactgccagctgccatttgacatgttattgctttatcttttcccatgctgtcatcctcaatttattctactgccaactgcccttcgacatgttattggtggtgcacttgctatagcattacattggtgatgaagtgatgaaccagggggttaaaatccaagttgtgatgtggcgatgaatcaacgatgagaattggacaagaacccaagcagacaagtaagatatgaaagtgatgcaagtaattatgatagcaatcatgtccgatcaggcttctcaatataatccttttaggaaagggatgagattggcagcattttttttactcttttgattgagattttgct

SEQ ID NO: 10163 - DNA, 6860 bp, Oryza sativa
cagcgcccgcccggccagcggcgcgcgcatcaacctcgcctccttctacctggtcggcatgccggtcggcgtggcgctggcattcggcgcccgcctaggttcgccgggctgtggctgggcctccttgccgcgcaggctgcctgcgcggtgtggatggcgcgcgccgtggccgccaccgactgggacgtcgaggtggcgcgtgccaaggagctgaccaaggcgtccactacaggcagcggcaccaaccaccagcacgagtgcaacaacagcaacaccaacaccgccaacgcaaaggctaacaccaaaacgacaacgtctcccgccgccaataacatcaatgccggtggcggcggcagcagcgacaaccgcggttacgtgcccatcagcgagagcggccacaacgacggcagcgacgacctggagaagctggaggaagggctcatggtggccacgagtggcggctgctgcggctgcggcgacgcgttaggcgtcgacacgaaggctggggacaagcagcagtgcagcaacggtggtgccggtacggcggagggaaatgcggggcagaggaggggctcggcgtcgtcggagagggccccgctgatcagtgtgggggacgacgaggaggccggggaggagaacgacggcgacggcggtggaggtggccacgtctagctagctgctaatcaaccagcgtggtcgatccatccatcgattaattctggagaggttttgatcgtacgtacgtaggctatgtttgacactgatcggccggtctccatttcatctttctctccatcttgatttgggggtgaggtttagttttgtctgtataaccaagctgagcagctaattaatgagagtattcaggaaaaaaaaagagggagaaaaaaacatatatattcttcccttatttttcttaattaattatacttctatgtacaaatactaattagtttgggtgtaaattataattaaatcaattgatggtgattaattaagaattgacaagtgcatgcatgttgctgtttggcatgatgtggcagtactgtttgttgtgttgagagtgggggtgtgtgtggctttgggacctgtatatatcgctgttcccctagtggttacatacgtgacaaccaatggtggtgccccatttcggccatttcccaactgttccaacatcgctaagagaaaaaactcgcattggccctcctttaagttttctccgagatggctagcacagctacctagctagctacctttcttccttttgataaagtcgcaaccatttgatatctacaagcacttgggcgaaaaaaaggcacccttggtgttttgcgatttttaaatattactactgcatatgcacctttttatttatttctggctcctcgtgcaaaggaaagatggtgcgtgtgactcagtttctcatgtcttctatattgagataaaccttttgatcaaaaggctcttgccacaaatattaatttgccattgctcaccacacaagaagtgctctctcgagggtaaaaggatcacactagctagcatgaatttatactttctgtgcagatgtagaaatgtggaatataacccttatgtgggaagaaaggatctatatcataaccaaaatttgatgatgcttgccttagtgtccgtagcttataagatgagagagagagagagagagagagagagagagagagaaacctagagtgctagaaattcttgaacttaaacaaatcgtatggcaagctcttaatttggtgagccccggattgcgactagcatgcaactgttggggacatctaaatgtgttccagccctgctctatcataaaacaattattgttaaggtgtttattcctcggcccgctctttctatgagtggttcaaaaacatacttttgttcacaaatagatgtcatttgaggaatatttttccctagatatataggccctcttataagttgtcgagactcgagacttgtaatagaactagtgggcgtgtggggctattaattgcagttaacaatattagtttgaaagtggtaaatttgtcaaaataatatgatttgattgacgaccgcttcatatgcccgaaactaatatgacgttcaagaagaacggtgcgaatattagatcgcatttttcttaagactataagcgtacgtggtccaacatatcttttatcctttagtgttttcttatctatatttaactagttgatacccacactttgctatgagatatgtggataaatgcatgttatacattatagaaataatagatatatatatttaaagaatgtaaaaaataatgtgaagataatgatttgacattatttgcatattgagttataaaaatatagcaaaatcgtgaatgatatgtcatgtttgcatcatatttaaaactctagataataattgctagtggtgataatgtgatacacttgcatgttgagttttagaagttagtggacatatatatgtctaggttcgtatataaaagttgatttttttttcaataacaaagggaatggccacataggagcgttaaggaaactattcactaattttgtactcatatactagtataagacccttgctggactaaaaatcacacatagcagtaaagtttgccgtccaaggatacctgcaaaagcaccatttgcacattcatctccctcatttgcacctgctgaccagaattccctttttcaaaaaaagaaaagaaaacaaaagtcccctgatgagactcctgcctacagtttttatccgagaagacttggggtgtttagatacaggggtggtttagcgtgtcacgtcggatattatatatgtgtcgcatggggtgttcgggtaataaaaaaactaattatataatccattaataaattgcgagatgaatttattaagcctaattaatctatcattagtaaatatttaatgtagcaccacattgcgaaatcatggagcaattagatttaaaagatttgtctcgtaaattagttgtaatatgtgtaattagttatctttttagcttatatttaatactttatacaggtgttcagacgttcgatgtgacatggtgtaaactttttaggagggatctaaataggccttaaaacaaaaaaaaaaacaattggaatactaccgtgtttgagagtaccatggatttcagtagcagcagcagtcaatccacggacaggccaggaggcaggcaggagtgcagggcagagaagcagagtctgcagagagaaaatagattactcctacttgacaaggcgttgccaaaagacgaatcagaggctgcccaatcgccacgccgatcagatcagttgcgacgagacgcttcgggcacggcatggagagacagccgatcacaagcgcgaccaccatgcatgtcaattttgtcatgcatatgcttgcgccgatccattagaccatttacagtccgttctcctcattcgaggtgcatcagagtatcacgtagactaaggttatgggtctaaaatcttaattcttcacagtgcaaatggctttagttctaatatttttgtttcagttctaatatttttcataatttgtgtggatgtccaaaatttacactgaacaccctagaatctagaaaaaaaaataaacccctcctcacccctctctctcctcctctctccctactatggcagtttggcatcctccttcggctaccccgccgccggtgcccctctccccctcccctcctctctccaccgacgtcgacgccggtccgagcgtggttggcaaggggcaagcagccggcgagctccaagctacgtggtcggcgagctccgaccgacagagcgggctccgggtggcgtgctcggcgaggggcaagcggccggtgaccctgtctcctcccatagccggcgcccctctccccctcccctcctctctccgctgacgtcgacgccggtccgggcatggtcggcgagggacaggtggctggcgagctccaactgacacgacaagctttgggtggtgtggtcggcgaggggcaggcggccggcgaccctgtctcttcccacggccggcgctcatcatcttctcccctggtcggcaccctctgagctcggcggcgcggatcgaacgcctcgtcaatggctaagaaatcggcaccggatctagcggctcaccaacggtgtggttgagtggcctcagcggcgagcgggcggcggtaggcaggccctggtagcctcctcttctcccccggtgcttgttctcgcttccgacgccatcttgtgttgctgctctcgttctcctttccgctgctcttgcacgagagaaaggagagcgcgggaggggaaaaggagcgcggccgcttgtcgaagccacgagcggcgaggccctgacctccacaacacggagctgcgcccctctcccgcgccgcgcgcccttggtcaggccgaagaacgggtgaccagttttggctccgcgttcttcacgggacaacgctggtagatgatgtggcggcaaatattctgttcctcacgctcgggccgaacgacacgtccgcgcattgtgaatggccttatgtcacagagttgcaccagctgattgtgaaaattcggttatttttacaattaaatttagcttgtgtcaccattgaaaaacattttcgattatatgtacaaacaatcgataagaaatcatgctcataaaaaatcatgggtaaatatttaggaccatctgtgaaaattgttttaaaaggatcatctattaaaatagagttattttatagggatctctttagaaatcgtctatagaagtcactattctcacacaaacccctaagggaacatatattttcacaaatggttccttataatggatggctatgaaaattgtttgactacattaaaatatgatgggccgaataagcgggtaagtcctccctcccttcccgcaattccctcctagccttcatgcttatcgtcctcctttctaccatccggaagtggcggatcgacgataactgtggggctcgggagcgcatatcgatggtggcagggccaagaagagtggattcgacatcgatagatctaagtagcagtggatcgatggcagcgagttttggggctgccaaatttagcggcgtcggcctcgggaccactagatatagcggtggtgatcctcaatatggcttcatttcagttacagcaatgatgaccgcaacagggtctaagactcgacaataacatcatgatgatgaccgtagtaaggacgtcgtctcggctgttgctaccacttttgcaaagggattatgaagagggacttgggaaatttgatcatgacctatgtagaactgcgattcgatgtagttttcatatttttttttacaaatatatttgcaagtaaagactactgtctatgaggcaggtaatttatcagaggcgagcgagtcacccaaccgcccacctgtacaaaccaaaattagtcacctgtatacaatggtagactggtagtgctttcgtaatagtgtgctaatcaaacaggaatacgatgaaacttgtgtactagaattgtcagataaagcaccctgatcttcttagatttctttggttatctttcgctttgcatggtagtattatcaaacccaacccactagataggtggcgaactggccaagtttatttatgtcaccactcaccgagcatggcccaaaggcaatatgggtccacaagacaagtcctaacacatatattcatctgcatattgtagagaaaaaaaataaatgtgcactttgcacatcactatatatcttttccttcttttattttttcgtaagtagatagcctaagttgactaaagtgttatttaatagtatcttgccgataggacatatgacttggtgtcttgcagattggactagtgtctaatgcatttataggatcatgtcatggtgtcaacgctttagtgatactatgttcattatttatgttttccgaccatagtgaaaaattaaaggtccacattattctaaaaaaattgctggggaatacgagtcatcaaattaactgtttgctttatatatcatacaggaaggaggaagacaaatgggtgtttgtaacaatatactcactcgggtcacagtctcacagataagtgaatactacgtaattaatttgacgctttcacacaaacacgacattgacacgaccgatctaggcctcctttgaaacacatgaagtaatgtcaatgtcctgtcattaacgcatcaataggtcagatattatggcttattaaaccctacaggaagtgaatcctcatgaatttgtaaaaaaaagtgttattcagtagcactacagaaaaaacatatgaattttgagatacaataagagaaaacatgaaatcttgtctctggctaactttcctctaaaatttatatgaaatgagctattctataggaattccaaaggatttttttgaaggtcatttatttcaatccttcatgattcctccatttttttcctttgttccaaagaagcctttatttcttatattctccttcttacataacctagcaaaattttagtatcataaaaaatatttctgagactaatttacttaaaccattttaacattttctttacaatgaaaatgttacacatagctagacgttggcaacaaggatacgaccacaaagttctgttttaaagaaatagagaaaatacgcaaaatgaggtgagctattagtatatgattaattaagtattaattattttaaacttcagaaatagattaatatgattttctaaaacaaatttcatattttttttaaaaaaaacacatcgtttagtagttcgggaagcgtgcgtgcggaaaacgaa

SEQ ID NO: 10164 - DNA, 13119 bp, Oryza sativa
  unsure (1)..(13119): unsure at all n locations
agctcaattgtccgtgtttgccgtctggctaggtcacccttcaaatttgggcttcagcgtactagcattgcttgggccaatatatggaaaatctgttcattataatgagccacatcatgttgggccgacacagtgaatgagaaaatcccaaacatgaattctaacacattgagggtgtcccctcatatacttttttctctttaaaatttaatgcagatggttatgaaaaaaaaatcaatatagagcatagtagcatctatcccttgattgttatcattatgtcaaaatggagttgctagaaatatgacgccatatgctatttcagccactttgcacagtagtgtcacgccccgaactagtcccgaccggaactagcccgtgacgctccaaattaacctgttaatcgataccagtcccaggaaacagtgctggtatcacagggagacagagtatcacagcaacagaggtctctttattatagagtagaagtacagtcatgttgggctgcggacagatcccgagctcacaactgcattacaaaaggaaaacggaagccaggacttggaccattcatcacaggcgcgacttgggaactaggccgaaaccctaaaactcatcgtagccgacttgctcctggaagaactcttcgtcagcaggatccacttcatcttcttcagcaactggggggggattatttatatagagcaagggtgagtacgggagtactcagcaagccaggggaaataagtgtttaatgcaggcttcaaggaaaggctgttgttttcgtaattgattttgtttgaactcttttctaaaaattctaagtgagtgcttctcaaacgacacggatgagacagtgcgtctcgtccggtcggagtatgtgcaatgtatcagtctttaggattgcaacaaggttggcacccggccaacagcttttcaaacggccacccgggccaacaactttttaaacggccacccgggccaacaacttttcaaacggccacccgggcctagctgatcccatcagctacagatttttcaaacatcgaaccccttttcacaacagcaatttcacaagcagtagtcagacaaaactacgctaggaatcacctcacatccgcccttgaccgtgggcacgactattcgaacagttcaatgacctctgcagagggggtacactttacccacacgacattactaacccggatcacccagcccgtggggatcagccacgtcgggagacctccaagctttcatgacaaggcatttcgaaagccgacacaggtttaccatatgccgacgagaggggtcccagaccaacaacatgttaggtcccagaccatattgtgccaagaagcccaggggtcctccccgacaccaccccggcgaatccacatgtctctcggcatcaaggctcccctgataagctagttactcagccaggggtgtcccattccacccatgtggtcgtacttgtcttatgtttggatgaaattacaaggaatcggtccttaagtgcgagagcgggaaaccatacacccggtacgttccccggtccgcggttttggaaattcatttagttcgcaagcaccgacccaggtgtcgggttttccaagtcttttgtaaaactccagttttacccaagttgtttctcagattttaagtttgaaggcgaccgtcgatactcgcgcagagtgcacgaatatcgaggtgcaactgggtggttacaaggggacatggtataacaattaataaaggaaggatcaaatgcaacaaattaggtaggtctgccaatctgccttgcagacgggacaacagattaagtgtgatcctatcaatgcataatatttcgcaagcaatataattaaatttcaaatataggctcaagatgttcaaaggtggcttgccttgctcgagatctggagcttgatcctcgaaattctcgcactgcgggtcttcgggttccggaactacacgcgaaacgggacaactcaacaaacggcgaaaataaagccctattaaagacctctaagcgtgccactagatagatctcgagatttgggaaattttagaagttgaacggagtcaaacggaattacggttgggaagatattgaatttctaagattattggatttttggtctaaaggaaaaggatttaattaaatcctttttgaaaaagaaaagaaaagaaagaacagagggatggaaattagacttttcctcgggcggctagggcgcggtccaaggtaaatggagcggctcggccgagcttaacgggccggccggcccaagacggcccaagcgcgcgcgcgggagggaggagagagagtccggtggaccgggctcaccacgcgcggtcccgggtgggacccgcttgtcagcggctcggctcaccgtgcggagggagtacgtggctcatgcgcgcgggcggggaaaggacgcggtgcacgcgagcggtccgtggtggacgcaggtgcggcgggcccacgcgcagcctcacggctcgcggtggaacgcgcgcacggggagggactgaccggggtcggctcgatccggtctaggctgagctggcgccgacgtggcgcctacgtggcggccacgtgggctggcgggaggtagacgacgacccggcctcgaatggacggcgggcggcggcggcgagcggcggagcgaaccacggcgatacgggcaacagcgagcacaccgggcggttgcacgtgacaagggaaggcgagccatcggctcggattcgccggaggttgctcgacggcggcggattgcggcggtggcaatcggcggcgggagaatagggaaacggagacgaggtcacgagaggtcgattcccgccggtgagagcatctacgcggcttcgggaactcgacgctagcgtcggattgggtggaactacgccgagcgaggccggcgacgagcgggtgctacggagctcgagcggcgacggcggcgaacacacggcgaacgacggcaacggtcggggcggcgccggctaactacggggaggctactcaagctactaccgaaagctagggggaggagatggagcgaggaggaagaacggagagagacatcaccgagaagaggaggggcgatgtgacgagaggccagcggcgcgggagtaatctctccggcctcgggccggggaagaggaaggagagggcacgcccgaagtccccttccgcgtcctcgaacgcaccggctctcccggcgcttggcgaaggacggcggaggcgagacagagcacgggggcggcggcaacggtgaggaggcgaatgggagaggaagggaaagggggaggcttgggtttataggatggcaatgtcggtttgggaaccgacttagggcggtcaagggcgcgagctggcgctcggcggtcgcggccaaagcggcgacagggaggatgacgccggcgaggaggaaaaaggggaaaaggagggggagaaagggggcttgcccctttgccgattcgggaaaaagggggaggggagcgggggcgacgcggcagagagaggagggcgcggcctccttcccttggcggcttgcgcgcggagtggcgggggccgggcggtgacgacggcgatgacggcgggcggtttggagcggagcggcgacactggcgacaggcgcggcagacgctgacgacggcggcgaccgggcggtcggccactcggcgcgcgcgcgcgggaaacaacgggcggcgtccgcacgggcgctcacacgcgaacacggcgcgcgggaagcgtctttgcgagcggggagctcgcgcgaggggaggggcgctcggcgcgggcgactcccgcgcacgcgcgcgcggcgcgcgggcgggccggagggggggagcggggaaaaaggcgctcgggcggctctcgcacgcgcgagcagcgtgagggcggggaagagagagagagagagagagagagagagcgggagagcgcccggggggagagggagagatgggccgggaaagaggggaagatgggccgagcgagattcggcccatcgaccttgggggaggcaaaatagacttttgcggaggaatttgattggaaggaattggattcggagttgaactcgacgatagatcggggattgatatcttgagatggcacggacactagacaacaagcaaagaaacaaatttcgcaattagggtttttaagagataattttcccgctaggcgccacgacggaacgggcgctacagaccaacccccctaacaagaatctcgaccccgagattcagcacctaagggagcaggtccgggaactcggcgcggagaagatcttcttgctcccaggttgcctcgtcttcggaatgattgctctattggactttgtagaacttgatggtcttccttcgagtctgacgttctgcctcttcaagaaccttgatcggtctttccttgtaggtcagattcttttccagctcgatattacccaggggaacttgctcttctggaactcgaagacatttctttaactgggatacgtggaacacgttgtgcacatctgcgagaccttcaggtagctcaagctgataagccacttcgccacgtctggcggttatgaggtaggggccgatgtagcggggtgctaacttgccggacatcccaaacctcctcataccacggaggggtgatactcgcatgtatacatgatctcctttttcgaactcaaggtcacgcctccgattgtcagcgtaattcttctgacggctctgtgctgtcttcaaacgttctcggatcagcttaacttgttcttctgctgacttgagtatgtcaggaccgaataccagtgcttcgcccacctcattccagcacaagggagtgcggcactttcttccgaacattgcctcattcggcgacatcttaatgctggcctgataactgttgttgtatgagaactccgcatacggcaaacaacgatcccaagtgccttcgaaatctaaggcacacgcacgtagcatgtcttctaggatttggtttaccctttcggtctgaccatcggtctgcggatggtaggctgtactaaaattcagatcagttccgagggcttcatgcaactgcttccagaaccttgaggtgaactgagtgcctcggtctgacacaattttcttgggacagctaaatctacatacgacatgggtcatgtagagttctgctagtctctttccatcataggtggttttcactggcacgaaatgagctgatttcgtgagtcggtccacgattacccaaacggagtcgtacccgctgggggttcttggcaaaccggtgatgaaatccattccgatctcttcccatttccactcgggaatcggtaggggttgcagcagaccagctggcctctgatgttccgccttgactctttggcaaatgtcacacagggctacgtattctgcgacgtctcgcttcattccagcccaccagaaatatgccttgatatcttggtacatcttcgtacttcctgggtgaatggagtaggcggactcatgagcttcctttaggatgagatctcttaactccttcttggccggtacacagatgcgtggtccgcaccaaactgtgccttgatcgtctatggagaaattggtgtctttcttctcctgtattctttttattaattcttttatcccttcgtcgtctttctgagcctcccgatttgcgactctagggtaggctgtactgtcaagctggcagggacacctgactgtaccacggtcagtcttaacttctccaattctctgcacaggtgatcttggtcaggccgtatttgagctacattgcaataggccttgcgacttagcgcatcagcgaccacgttggctttaccaggatgatagtggattccaagatcgtaatccttgattagttccaaccatcttctctgtctcatatttaactcggtctgagggtgtaacatcccggcctagggcttaataggattaatagaatactcatatcaacaagttgcaacttcttttccggaagccaatctccaaagaactccagggttaagcgtgcttggcctggagcaatttgggatgggtgaccgaccgggaaattcttcccgggtgcacacgagtgaggacaaagtgtgtagaaaagacatgtgttggtctgtgagggcagtctatgacctatgaaagctatcatatgtaagcgggcccggcctgggggaaggcgggacgttacaaagtggtatcagagccgactctcgcggtttcacgggcgcgtgtgtcgcagttgcgcaggcatggtgcgcatggctggtgtagaccgagagtggttacacagcatggcacatgcgctggcactggacacatggacgtggccaagaaaggacgttcctggcctagggttgatcgacgggggcgtcgatctctcttaagggggtgagggtgtaacatcccggcctagggcttaataggattaatagaatactcatatcaacaagttgcaacttcttttccggaagccaatctccaaagactcccagggttaagcgtgcttggcctggagccatttggaatgggtgaccgtgcttggtctgtaggccagtctatgacctatgaaagctatcatatataagcgggacatgtgttggtctgtgccagggttgatcgacgggggcgtcgatcagtgtgcccgggtgcacacgagtgaggacaaagtgtgcagaaaagacatgtgttagtctgtgagggcagtctatgacctatgaaagctatcatatataagcgggcccggcctgggggaaggcgggacgttacaagtagttacacctcatttatgtcccacttacatatgtaattagtatgtaatttttaaatttacatttataattttagtacttacatatgtaattttgagacttacattgtatatacactaaaattacatatgtaatttagggacttacaatgtaaatacatgccgactattttttgatgaaaaatatgacgccataaatatagctacacccatgtcaaaaatcaatttcaaactatatttacaaattaagaaagaaaaatattcaggtgtgaatattaccaaatactagtatcatacattgaatctcttttttatttctcgatacatagtttttttagacttcagattttctatgtggtatatgtatgttgtataaatgctattaaatttttaaatatttttttcgtagctatttgaatgtttattttacaaacgaaagatttcccgagcgattgaaagagttcccttcttcaaataaaagaagagtttcccaaactgatgcccttttgtttcctccggggatactgttgtaaaaaaaatacgaggcacggcaccatgataaattaagggactataataacaataaaatattaaaatatgccgtcataaatttagcaaatccgtaaatgaaataaattgatcttcaatccgttttacagtacaagaataactcagtccttcgagctaacgggtcctcctcccttaacttccattgacaaatctgcagctcttccggacctccccctggctgcccgtcagcggctggatgttccccatgttgaccatggacctggcgaagctcttgaagaaggccttctggctgatggcgaagctgttgacgatcgccgccgtgggcgcgcccggcgtggacaggagctcctggtcggactggaggaagccgcggttcacctcgatgttggcgaagtagttcttgtcgaaggcgtccggcgtggtcgggtccaggtcgttcagcgccgacgagttcccgccccgccgcgggcagctcttcgccagcgcccgccggtagccggcgtccagcgtcgggtccggcttccccgtcccgctgaagttgtacagcctgtccgtcacgaactggcactgcaccctcccgaacgtgtgcgcccctgcccatttacattcattttcacccacaattttcagtttcagttgattgctattccctccgtttcaagttataagacattttaactttgatcaaagtcaaactgctttaagttgtaaaaaaatagtaatatttttaacacaagacaaatttattataaaaatatattcaattattgatttaatgaaactaatttagtattataaatattactatatttatctataaaattaatcaaagtctaacgttttataatctggttcggagggagcagtaggtagcgtcgtacgttatctccctatctgttactctgtttatttacctgagagggcgacgaggtcggtgacgtcgaggccgacggcggcgaacttctgctgaagggtggtgaggttgtcgcgggggctggggaggttattgtcggcgccggtgaggttggccgtggtgccgtcgcgccggccgaggggcacgcgccaccgggggcctccggactgcacgcattgacacacggacattgtgggcgtcatgtggccgtgttggagtaaagtgcggcacgaaaagaagggatttggtgtgggatctcgacgtctggtcgtcgacacagccgatgccacatgatgtgtgcgaggacataatccacgtcgtaccatgtggtctctgttttttggtgctcataggattattatttttttacagacggttaatgttggtgagattatgatctatctgcagcattgcggttcaattatttggcaccgacgtctagctagctttatgtctcgctccagtccagttcccagcccagtcacgggcatattgtaggctgtagcgtcaacctttctactggagataaagctagcacgaactactagcttgccagtacgttaatttgtcactatgctggcgtgaaaagtatgtgaaagaacgtagctaaactgcttcgttggttagcttccaatgaagttgacgtgcgattgttatcgggagataatgacgggtttacgtgcaaagcatatgcacgtatatatatacttcgcgccggcagatcgatttctcgcgagcgtacacataccagttcgacggagatcttggcggcgatggcgaggatgtcggcgcaggagacgacgccggggcaggcctcctcaagtgccgccttgatgtcgtccaccaccgggtacccccgcgccgagttgttgttcggcgtcgcgaacttctccgacacgatgctcgtgctgttgtccagcaggatcgacgcgtcgcaaccctggaaaaaacggaaacgtcgcgtcagacgaacatcctgcgtggcgcggcgtacgagtgcgcgcgtgcacgccggcaatggtgtggcaatagctagctcacctggacgaagcagtcgtgaaagtggaggcgggtgaggctggcgaaaatgcgggggtcgtcctgccgcgccctcttcagcacgcgccgcacgatccggtgcacgtccgggcacgtcccgtcgtagtacttgtcgcacagttgcgccgacgcgccggccgccgccgcggcgagggccacggccacgaccaggaccgcggcacgaaccgcagccacagcgcccatctctctctctctctctctctctctctccgctgcagccttgagctagtaacgtatgtacactgctcactccgtgacgcacaaatgagaaatgaccaagtgttaagtcggtgtgacgaagaagaaaggaagctggctatatatagacacgcacacgcgatcaattaatctgacatgtgtatgacatatctcgccatgcacaggcttaattgtttaagtatgacaaactaactagcggcacctttgcttgaacccgaaggatatataaccaatcattcgcggaagaatcgaacgtgttaacaacgtagatagctcttcggctatcgcggcgtcgttttcagagtgcaacgcatgcatgcatgctggtgtgcgaacagaaacactgtgctttagaatagtttcccctttgcatatggccttcccttccctgtgcgttcgttgggtgcacctaattctctcgcccgatcgtgtgtgctagtgccaccagattcaggcagtacaacgctgactcccgtttagtttcagtttgttgcaggtgcagcaatgcagcagctaagctgtgatgccttgactgcacggtccctcgctctccccatcactttctgaacgaataattgcagggccaatgaaagtagtagtagctggcaatatttggagccttcttcttccatcgatcgatcagagaggtggtcgttggtcgtttggaggggaatgatttctccggttgagtggttgctgacaactagtgctatatccgtacgtggtaagcatacacaaattaaggacaacgtacctgcttcttccctctgaatattttgtgtacagtatgtagcttgtacagagttctcgtcaaactaaaattaaactcctcaccgacgtttttccatgacattttagcgaatttttcaccctttgtccttctccaaactaaaaatctgcctgtcatattcaggatcatcaaggcatgatttttggccacatcatcagtcactgtatcatgcaccacgtaatgaaaaagtagttgcagtagtagtacgaaaaagctaaacctgattggatgctggagagaaggcgaggcatcgttctcggaacataagtggtcgatgatgagattaggtggcagatcgatccagaaatgcaaagtcaaaaatctaaaagtttctttgcaacggagtcgttagcattcattccggttttttccttgcttgttcaaggagctgcatcattcagttcggaggacgtacccgagcacctactgataaaaccatatggcagttgcatattctttcttttactctgatagacacagcgcgtttgtctgtgctctaataattggtgatacacccactgaaaatgcagctgcagattcgtgtaggacgagcaactttgcatgctaattgcttattctactcgtgcattggagagagaatcctagatagcttgaacaaaacgaaacatgtagcgctccacaacacattaaaaacgacagattcacacttgagtccaagaagacgatatagcttctggcaaatccaagatggggtcatggcagatgcaaaaaatctttgcctttttgctcatcagttgacggccctgcagttcttgcgaatctggccggcagagccggtgagagggctgatgttgcccatcttgaccatggagttgccgaagtcgcaggagaagcgctggccgttggcgctgtaggcctgcaccagcgccttggtggcggcgacggcggggtcgccggagctggagacgaggccctggtcggaggcgaggaggcccttgttggccagcaggttctggtagtagtggttgtcgaacgcgtcggcggagttgacgtccagcgccgccagctggtcagcgccgccgcggcacacctgctgcaggctggacgccagcgacgagtccagcgtcgggtcgacggagttggtcgccgagaagttcgccagccggttgctgaacagcaggcagcgagatcgcccgatcgtgtgcgcccctgttcaggttcagaagagttcagatcagtcttggattgattcgtagccaaacataactatattttgaaacggagggagtaacaaattggtgcagaaactagtttttgatctgacaaatgctaaatcatgcataatccacgtaaactgctatgcatgccacaccgagtagagtagatgcgacatcgttattgatatcataatttgtgtctttatcaattcatttgtcaaatcccaatcaatgtttgattgaagaattgacgaggtaatttttgctcgatgcatgaagatataggagatagatagaggtacctgataagaccacaacatcggttgcgttgagaccgacatccttgaacctcgcagtgataacgctgatcgaatcgaaagggctaggcaagttactgttcgcccccgtctgatttgccaccagaccatctcttcttcccaggaggacatcataatcaggtcctccactctgcaaagaccaacacagatatattcagcatgactgaaaaatcaattgttcttttgctcgattggtaatactatagtgctttactatcaaagatgaattttcatccctccattcgagacataggaacgtacaagtagtactccgtatttagctgcaagggctactatgtcggcgcaggagacgactcccgggcaggcgctctcgaggtcggcctttatcgcatcgatgacttcgtaccctctcaccgagttgttgttcggcgccgcgaacttctcgctgtttgtgccgtcaaggaggatggacgcgtcacagccctgcagaattcacagtgtgtcggtaagaagttcagagttcagtctctgaagttcagtaacatatatcacatgaaagttcagagtcctctatacaggttaattgagatcgttaatttcattttcttgtttcggtatgtgtacgttttgaatgcgacttgcatgcacgtagtgtatctagcgcactgcaatgagcagcagaaaaaggggaaaaataaaatagttggatgattacattacgaagcagtcgtggaagtgaagcctgagcagggaggcgcccatgcgcatctcggccttcatcgcggcggccaagagggaccggacaatgcggtaaacctgggggcagcaatagtcgtagtagtcgtccgtcagctgcccgctcgccgccgcggcgcgaggcccagcaagancggcgatattgcagaggaaactcaggcagctagccgtgcgatctccacgagtagcgtactccatggccaatcgatcgaattgtaattgatcttttacttatgcacttgtgattggactcgatgtctactcgcattgcttcttgcagtgctttatataggctgttcaaagtggccagtgattcagtgttgtcactgtgtcagctcatatcatatggaattatggatatcaattctttttggacaaaggttagacctcgtgcatgaatggcagagtaaatgggcggctagtgagagatcgatgtgtcgtcgtcagcttccataactggtaatcagttttccatatgctgcatgcatggcgatgggtcattggacgctaggacccttttcagcgtttctgaatctctgactctgaagaagtgtgtgatcttc

SEQ ID NO: 10165 - DNA, 807 bp, Oryza sativa
agggatcccttttagggtgatagtggctcaattatatctctaggaaagtaaatcacactcctatgtcaaagttttgcaatcctagggtgaaatgatctcaagtatgtctctagaaatgtaaattgcacaaatgtaaatgcgacaatcaaatgagacaaggagacaagagatttttcaccgaggtttggaaactcgccggtttcctactccccgttgaggcgagcccaactccaccgctcaaccacgaagccaccgcacgccccctttgtcaaggggtgggcaaggcgggagccggcccacggagaggactacccaagcctcgatcactagggtagttcttccttcactccgaaggtggtgaactccaaaccactcacaaaccggcgccgggccttctccacaatcttctcggagagatcaccgggcaactcctccacaagccgtctaggaggcggcaacctccaagagtaacaagcaatgacccggcatggagatgatcaagtgccacactagctctacaatggaagcaaatgcacttgactcttggctaaacaaccctctaacacactagatggatgaacacaaagctcaagtgagtgtgagagaggtgcaaggggtgtatgcaattgaattgggtgccaagagagcccccttgctactggtgggggagtatttatactcccacccaccaaaactagccgttgggggcgaaatcccccaactctgtgctctgccggtctgacctgaggtatgtggccggtcagaccgtgctactctgcaacgactagaaaactagccgttgtagcc

SEQ ID NO: 10166 - DNA, 3896 bp, Oryza sativa
gacccgtacctacgcgccgccgcccagctcctgcccctgcgtgccgcaccgtgagagagagagagagagagtgtgtgtgtgtgtgtgaagagataaaggaagaggggaaaataagtatgacaggtgggtcctatattttttttaataaataaaatgctgactggattgccacgtgtacgccacataggacaaaaccactttggattaggttgaagggggtaattcgtccggtattgaaagttcagtgtgagcaatgcctggtttttgggtttatggggtaattcggtcgatcgcgatagttcagggggtaattcatattttttctactttttcttaaatctaaacataggctatcaaattaaaaaatacaaaaaaaagtcaaatcagtgttagaaactgaattgggccgcagatggcatgggatggccacatgtcaagtgaagcccatgcaagcacactgaacaacaaatacaaactcttaatttcccataaaaacaaacctaagacaagttaagacacatcataatagttcatccgttttttaatatatgacgccgttgattttttacatatgtttgaccaattcgtcttattcaaaaacttatgtaattatcattattttattgtgattaaattttttgtcaaatgttctctaagtatgacttactctttttatatttgtacaaaagaatccaaataagatgaatgtttaaacgtttgtcaaaaatataacggggtcatatattaaaaaataaagatgaatgtttaaacatttgtcaaaaaaaagaacggggtcatatactaaaaaacgaatgtagtactatgaatttgtactgttcggattttttataatccggattttagtttagaatatatcgcatctcatcctaagtttgttttttaaggacggagggagttgcgcttggtagggcatcgaaaaaatagaacgccagaatgactacgacgataactttgaggccggttcagctcctcgtcgatcttcttccctacatctcatcttccctacttgttctacaaactcgccgtatcttctagccttgtatcctaaactattttcctcttcaggtacaccaaatatatgtgattttcattgttattagaattagagaaaaagttgctaacaagtacatgcatggtcctaaatgtttaaagcgaggtcacatttaggtccagaatattgtaaatacaatatttagatactttttaatgtattatagtaggtccagtgcacgtctgattgtgttcgacagccgacgtggctatccaccatgcctacacatatgtagttagccccctctatggcgggggggggggggggtgagggggggtaatgcgcgactagtcgcacggctcccccggcgcgcgactactctgtacgtatgttaacaatcaaatttggtaatatctgcatcggaaagaagattggattgaagcggaatcaaacatgagaattatcgcggaaacagagtaagaatcggctgaggtttggatcggctaagtccgagtcagactgggttaagtgatacaaccgattccgacaatacaacttgtatccgatatcgggtttgagttgacgtacttcaagatgattgccatacatggatagagtcctgggaaggcgattaattgtatctattaattaagatattttatgtaaattccttagagataaatatgggtaaaagtctgccgcaaagacttatggtatcttagagtttgttagagataatagtcgtgtccggtatgggcatatcttgtaattctcgggtataaatagaccccgagccctatgtaattttaaacacacgttcaatacaatttcggcgcatcgccaccctttcgctttaattttattttgacaagttcttgctttcgtgttgagctgcatcggtttcgatcttcgacaagaggtaaaacttgttatgacggcttacgttctcgagattcgtcgagttatcatatatcttacataatctttgacaatatcgttatctaacctactatcgactaacatctgttagtagaaggcagccgattaggttaaattttgacgttgatttagattatataagatatctaccactctatgaaactcccagcggcttgattgtctagatattgttcttcttttcgtacttaatgctgcatcagttgagtttgatctattaagtcgtgcttagaatcggagtttcagccgatcttatctgatttaactatatttgctctatatgtttcattgacacgttaaatctgccctttatgtcaaaatattattgcatctaattatattaagcttctgtttagtatattctgcctgttttaacatcttaacatagagtcgtataggagtattagccattatatgctagatctatctgatcggctatgctatgaacatatataatcctgttattaatgtatatttcgatctaagtgatttatacggtctcggcatggcgaccgaatctatcccaatcacttgatttaagtatgtatcgatataaaaattatatattgttaatatctacagccgatcgaatagatttagttctttattacctatttgcaaccgccgatcgatttacatatgacatcggctcagagataaatgatacgtcatcggcacttagccgatcggctatcatttataggtttaaactgcggtttctttatatttatttcttgttgattgcaggatcaaatcaactggcacgctagcatacccgaagacgagttttggacctacactggaattaagcagatctcccaggcctcgtgtttttcgtcatcaacgtactagtactagtctattacaagtagtactactacactaatgttataataatactaatattattactatatatatatatatatatattatatatatatatatatatatatatatatatatatatatattatatttatatatttttgatgtataaaaaatatacacatacaaagtttatatacgtgtcgtatataaagtttgtatacacgtatacaaagtttgcatgcgcgtacacaaagtttgcatacacgtacacaaagtttgtatgaatgtatacaaacttttttataggtatacgtaaatgctaaaaaaccgaaaagaaaaaaacggaaagaaaaccgcaaaaaactgaaaagaaaaaaaaagcaaaaacagaaaaaaaaaccaacagaaaaaactgtaggccccacctctacgcatgcgctgtcgtgtggccccctccgcgcgcgccacgtgcctcgccgcgcggggaggcacgtggcgcggctgaaataaggtcagtgtcctacaaccaaaaaaattaccataattttcgtgtgtagtcaaacaaagtcaacttttttatgatatccttcaataaatatcatatttcttcgagtgtcatgtagtaaatagtttagaaaacaagatacgtatacttatcctgcactcattttcgacctaaaattgcagccattggttcaacacacacacacgagtgcttttggctaaaatttcataaaagtattaattttaagaaataacattaacagttgtcctctggccctgcatttcatcaatattaactctaataaaacacataaatatcaatcttcatcctaaaacaaatgaatgaatacttagggtttgttggcacacttttcaaacatcagtgtgtttcgtgcaaaaaagttataatattagagttactttaaaaaatgaaacagaatctttttaaaataattaatacttaattaattatgctaatcacttttgtttgcatgcagctaagggcagtcccaatctctacctaggattgtatctatgacatttactatattgctatatagaacttttagtttatgtggtactatattaatta

SEQ ID NO: 10167 - DNA, 2699 bp, Oryza sativa
atcaagattggcacccggccaacagctttcaaacggccacccgggcctggctgatcccatcagccgcagattttcaaacatcaaacccattccacaacagcaaatttcacaaggcagtagtcaaacaaaactacgctaggaatcacctcacatccgcccatgaccgtgggcacggctgttcaaacagttttaataacctctgcagaggggggtacactttacccacacgacattactaacccggatcatccagtccgtgcagaatggccacgactagagaccttaaggctttcatgacaaggcatttcgaaagccgacacaggttcaccatatgccaacgagaggggtcccagaccaacaccagattaggtcccagaccatactgtgccaggaagcccaggggtcctccccgacaccaccccggcgaatccacatgtctcttagcatcatggctcccccgataagctagttactcagccaggggtgtcccattccacccatgtggtcgtacttgtcttatgttcggatgaaattccaaggaaacggtccttaagtgcaagagcgggaaaccgtacacccggtacgttccccggtcagcgattttggaaattcatttagttcgcaagcaccgacccaggtgtcgggttttccaagtcttttgtaaaacccaagttttacccaagatgtttctcagattttaagtttgaaggcgaccgttgttacccgtgcagagtgcacgattaccgaggcgcaactagggggtgcaagggaacatggtataacaattacaatgggggggtcaaatgcaacaaattaggtaggtccgccaatctgccttgcagacgggacaagcagattaagtgcgatcctatcaatgcataatatttttcaagcaacataattaagttcaaatataggctcaagatgttcaaaggtggcttgcctcgctcgagatcttgagcttgatcctcgaaatcctcgcactgcgggtcttcgggctccgaaactacacgcgaaacgggacaactcagcaaacggcgaaaataaagccctattattgacctctaagcgtgccattagatagatctcgagatttgaggaattttagaagttgaacggagtcaaacggacttacggttgggaagatattgaatttctaagattattggatttttggtctaaaggaaaaggatttatttaaatcctttttgaaaaagaaaagaaaagaaaagaaggagggagggaaattagacttccctcgggcggctagggcgcggcccgagagaatggggcggctcggccgagcttaatgggccggctggcccaagaaggcagcccaaggcgcgcgcgtgggcggggaggggagagagagagccggtgggccgggtccatcccacgtgggcccgggtgggacccacttgtcggcgacttggctcaccgtgagcgaggtgcacgcggggcgtgctagggtttggggagggaggcgcggcgcatgcgcgcggttcgcggaggacgcggtgcggcgggccacgcgcagcctcacggctcgcggtggaccgcgcgcgcgaggggcggagggaagcggcggaccggggtctacttgacccggtcgcggccgaggtggcgccgacgtggtgcctacgtggctgccacgcgggccggcgggaggtagatgacgacgccggccggaacggactgcggacgacggcggcgagcggcggagcgaatcatggcgatacaggcgaaggcgagcacaccgggatgttgcacaggacgaggggagacgagccaacggctcggattcgccggagggagctcgacggcggcggattgcggcggcggcaaccagcggggagggaagggggaaacggcgatgaggtcacgaggggccgattcccggcggtgagagcatctacgcggctacgggaatccgttgctagtgtcggattgggcggagctacgccgagcgaggccggcgacgagcgggcgctacggagcacgggcggcgacggcggcgagcacacagcgagcggcggcaacggtcggggcggcgccagctagctacgggaagactacacatgctactaccgaaaactaaggggaggagatggaacgaggggagagaacggaggaaggcactaccgagatgaggcggggcgctgtgacgagaggccgacggcacgggagtgatctctccggcctcggccggggaagaggaagaaggcgagcgcccggagtccccttccgcgtccacgaacgcatcggctctcccggtgcttggcgatgaacggcggaggcgagacagagggacggcaatggcgctgtggcggtgagcgaaacgggaggaggaatcgatgggagggcgccttggtttataagacgacgatgtcggtttggaaaccgaccttgggcggtcaaggtgcgagctggcgctcggcgctcgtggccaaaacggcgacagaggcggatgacgccggcggggaggggaaaaggaaaaagaaagggagaaagggagcttaccccttgctactttgggaaaaggaggagggagcgggggcgaccggcagagggaggaggagctctgcctccgtcccttggagactagcacgtagagtggcgggggccgggtcatgacgacggcgatgacggcgggggcggtgtggagcggagcggcgacacgggcggcaggcgtgggcagg

SEQ ID NO: 10168 - DNA, 17579 bp, Oryza sativa
agccagcgcgcgtgcccgagccgtgtcgctcaaaccgccgcgccgcccgttgcttcccgcgcgcgcgtgccgtggtggccgaccgcctggtcgccgccgccgtcagcctctgccgcgcctgcccgcgcctgccgcccgtgtcgtcgcgccgctccaaaccgtcccgccgccatcgccgtcgtcatttcctcggccccgccactccgcgggcaagccgccaagggacggaggcagagccctcctccctatgctgcgacgcccccgctcccctcctccttttcccaaagaagcaaggggcgagccccctttctctccccctttttcctcctttttccctttcgccggcgtcacctcctggcgccgttttggccgccagccggagcgccagctcgcgccttgaccgccctaagtcggttcccaaaccgacattgccatcctttaaacccaagcctccccctttcccttcctctcccattcgcctccgcgccattgccgccgcccccgtgctctgttcgccgtcgccgttcgtcgttgcgcgtgtcggaggagccggcacgagcaaggacgcggaaggggactccgggcgcgccctctccttcctcttccccggcccgaggccggagagattactcccgcgccgtcggcctctcgtcactgcgcccgcccgcacggtagagcatctccccgttctccctcctcgctccatctcctccccttagactcgggtagtagcacaagtagcctcccgtagctagccggcgccgccctggccgttgccgtcgctcaccgtgtgctcgcccgccgttgccgcccgagctcggaagcgccgctcgtcgccggcctcgctcggcatagctccgcccaatccgacgctagcaacggattcccgtagccgcgtagatgctctcgccgcgggaattggcccctcgtgacctcgtcgccgtttcccccttccctcgccgccggttgccgccgccgcaatccgccgccgacgcactccctccggcgaatccgagccgttggctcgtctccccttgtcctgtgcaaccacccggtgtgctcgctctcgcctgtatcgccgtggtttgctccgtcgctcgccgctgtcgtccgccgtccgttccggccggcgtcgtcgtctacctcccgccggcccgcgtggcagccacgtgggcccgccgcatccgcatccaccgcgaaccgtgcgcgtgcaccgcgtccctcccccaccctagcgccgcgccgcgtgctccctccgcacggtgagccgagccggtgacaagcgggtcccacccgggaccacgcgtggtgagcccggcccaccggccctctctctcctcccctcccgcgcgcgcgcttgggccgccttgggccggccggcccatttagctcggccggaccgctccgtttctctcgggccgtgccctagccggccgaggaaaagtctatattcccttcctcttttcttttcttttcttttcttttcttttccaaaaaggattttcctttagaccaaaaatccaataatcttagaaattcaatatctttccaaccgtaaatccgttggctccgttcaacttccaaaattcctcgaatttcgagagctatctaatggcccgcttagaggtcattaatagggctttattcttcgcacgtatattgagttgttccgtttcgcgtgtagtttccgagcccgaagacccgcagtgcgaggatttcgaggatcaagcttcagatctcgacaaggcaagccacccttgaacatcttgagcctatatttgaacttaaattatattgcttgcaaaatatcatgcattgataggattgcacgtaatatgtttgccccgtctgcgaggcagattagtgggcatacctaacttgttgcatttgatccttcctttgttaatcgttacaccatgttcccttgtaaccacccagttgcgcctcggtatccgtgcactctgtgcgagtatcgacggtcgccttcaaacttaaaatatgataaacatcttgggtaaaacttgggttttacaaaagacttggaaaacccgacacctgggtcggtgcttacgaactaaatgaatttccaaaaccgcagaccggggaacgtaccgggtgtacgatttcccgctcttgcacttaaggaccgtttccttggaatttcatccaaacataagtcaagtacgaccacatgggtggaatgggacactcctggctgagtaactagcttatcaggggagccttgatgccgagagacatgtggattcgccggggtggtgtcggggaggacccctgggcttcctggcacagtatggtctgggacctaacctgttgttggtctgggacccctgtcgtcggcatatggtaaacctgtgtcggctttcgaaatgccttgtcacgaaagcttggaggtctcccgacgtggctgatccccacgggctggtgatccgggttagtaatgtcgtgtggataaagtgtaccccctctgcagaggttaacaaactgttcgaacagccgtgcccacggtcatgggcggatgtgaggtgattcctagcgtagttttgtttgactactgcttgtgaaattgctgttgtgaaaagggattcgatgtttgaaaaatctgtagctgatgggatcagctaggcccgggtggccgtttgaaaagttgttggcccaggtggccgtttgaaaagttgttggcccgggtggccattgaaaagctgttggccgggtgccaaccttgtttcaattctaaagactgatgcattgcacatactccgaccggacgagatgcactgtctcatccgtgtcgtttgagaagcactcacttagtcgtttttagaaaagagttcaaataaaatcaattgcaaaaacaacagcctttccttgaagcctgcattaaacacttatttcccatggcttgctgagtactcccgtactcacccttgctctatataaataatcccccccagttgctgaagaagatgaagcggatcctgctgatgaggagttcttccaggagcaagccggctacgatgagttttagggtttcggcctagttcccaagtcgcgcctgtgttgtttggtccaagtcttggcttccgcttcccttctgtaatgcagttgtgagctcgggatctgtccgcagcccaacatgactgtacctctactctataataaagagacctctgttgctgtgataatccgtcttcctgtgataccagcactgtttcctgggactggtatcgattaacaggttaatttggagcgtcacgggctagttccggtcggtactagttcggggcgtgacagccagctggggacatttcattgttttctatgagactgtctaggctcgtttttcttagatgatgaaatagggcattatggtctttgcttaaaagttacagccaattattataatctcacacttaaaataagtgaaattaaaaaaacttaaaaatgaaaccaatcaacaagaagaaacaaactaaagagtaaagattgtcaacctaagataattatacaattattgaattctgtttaaatttggattttatgaaaccaactcattgccccggatgcaacattccaatatgatttatagattgctgtgcattaggaagggtatatacagtggtgtgatttcagctggctgggaaatttggcacgcaaaaatttcaagtgacgtgaagaacataataatatcatctgttcaaacatcttgtagatagttttatagtattatctaaaatactgtaggaactgcctatataatcagttcatttcgtgttaagggtggaacccatgcacccacgtcgtgacgtcgtccatcccattttctccgtcttgccattgctagggggcaaccccatgtggttgcgaggattacattggcgggctctcttcctctctcacaccccatctatattggttgagaaagtttgtattccctctatcccaaatataacaatataaaagaggattaaacagcgtatccagattcattatatctaatcttttttactagattgctatattttaaaagagagggagtatatatctactaataaaaatgacaaaaaattgtgcatatctaacaaataccatcatactatacttgcaagagcaagttcccaacactcccctctcattttccgcgtgcatgcttttcaaactgctaaacagtgcgttttttacaaaaaaaaatttctatacaaaagttgtttaaaaaaatcatattgatccatttttaaaaaaaatagctaatacttaattaatcacgtgttaatagaccgctctgtttttcatgtatgggagatgggttcccaacacccacctccaaacacagccttagagcatctccaaattccactctccaaatacttatatatctaactctttaactgatttgggtaatcaaactaggtgttcactccaacagtctctctatttacatctccaaaataacaaagggacccacatataagcctctattaccttcttcctcttctttctcttctcccacatcgacccatccccgcgcgaggtggacggcgaacggcgacggcgactgcgacagcggcagcggcggcggcggcagctcctcgtgcgggcgaggcggaaggcgacggcagcggcggatccccgcgcgcgaggcgggaggcgatggcggcggcagctccccgcgcgcgcaaggcggacgacgacggcggtggctccttgtgcgcgcaaggcggaaggtgacggcggcgccggcggcggatccccacgcgtgagggcaatggtgttctgggcggagatgatgaagacagtggcgttgagtggcgacctcggcagcggtcgacggtggcgtcggcaacgcacgacgacaaggcagcctcggcagcagagggcaaccggcggcgggcccggcagggggcgacgacggcggagtggtggcgccggcggagctgtatctggggagtggtgaatcggagaaattgcagagagagtgtgggatgggaggggaaaaaggtgtgggatccatgtttggctaggccattttggctggccaaagttggccagcgtgagaagtgctttggccagccggatggcttggctatacggttggctagtctgttagagcatgattttgatctaaaattgccaaaatttggcttagagagtggagtaaggaggctgttggagatgctcaactttcaaaaatgccggtttccattagctcatagactatatgtattgaagaaaagtacatttttttcttatatagtagtttgtgcctacggagtcatgtagatatttacattacctcatgcgttccaaattgctgatcacgtggtatattagcagtttgttagcacacgcgagctaacctcgagagacttgtcattaatcaggttcatagcttatgcctacattctaccgaccgagttaggttaggtaggtgcacgatttgtttcagtctgagatatctaatctgctcaaagtccggagccacaactgacaacaacaaaattcggcaggggcggccgcgcgcggtccttcgattttctccgtttctttccaatcctctagacttccgagtgggattggttcttcgattctccccgtttcctgcctttctctcggtctctcgcgcggggaggtcaagtccatttccgcaaattctcaaaaaaaaaaaaagtccatttccgcagcggagccatcctcgcgcgcggtcccgagaccggtaaccacaccaacttccgcaggccagtgggggcgaaagcaagatctaaccgagaaagtgagggcgaagtgaggccccgcgccgccccgcgcgataaggacaaggatttttctccgtttcgtcctgatacgatatgcgtgacgtgacggcggcagcgagcgaagggcggcaggcaggggcattcgcgaagaggggaagaactttccgacgtcacggcgcgcgcgggcaacttgcgcccaacgggaggcaaccgcatgggggacggggcgcgtgcgtccgtgcgtgactcgtcgcgctcttacgccgtggcgtggtgttccgttttgtgcttgcgcttggcttgttttgttttgttttggggtgctttgcttttgcagctgaggtgccactgcccaccacgtactactgtgcaaattggccgcaagaaagcgatgcttggataggtacttgctccgttgctcgtcgtgtggcctggatcagtggatctcggaggggataagcatgcatgtaccgtgcgtgcacctatagaagtgtaagtagcgagaggtgaactattgggcgaggcaactcgaaaacttgataggtggcacggcagcgaacacaagtacacaacatgtagtagtagatctttattttttcaccagtggtatggctaggaacgatcgtggaagcgtgagtgaatacggtgaattttttgcggtgatgtacaacgggccaaccttttgattttattttttatttttctgtgcgtggggccaggttagtgtcaatttcagcgtcgttttccaatggcataaacaatgctaaatgacgcacgcattgttcgtgataggatatccatcccgtctctctctctctctctctctctctctctctctctctctctctggccccggctatcctctccctttcttcttttttaggcgcaacttgtcagttgaacccatctcgctcggtattagctttgcgttcggttctcgtaaagacggaataaaaaaaccgtaatacctttgtgaagtaaaagtaaccaacccccatcattcaatccaatccaacctgaggtacacgtgatcgaatacgaagcgcgcacgatggcacgagaggcgcggcttcttccgcctcgcgcgattcgcaaccgtccgttcctgcctccttccatttaactgtggatccattcctgcctcacccctgcaaatctctgtgcgccttgcaggttggaagaaaaagacaagagatacgaagtggtctcgtttcatctcgtgcgctagaaatgctgagatgatgcccagtttttttaagaaagtttctcgtggaattatggtggtttgagctcacatcagccgcccctgttggaggaaatctaacgtccgaaccatatattacgaagtggatggattaggtgtgccatgtttagtttttcagataatgatgcgatgattagctagcagaattccagcaactaaacatcgtactacgtagaaattagtaattggcatacgcgcgcatttgtctcattgtggaggagtgagtgcttgaagaatctcacctgctggccgtatttggtacgaagccgctaagccatcgaaataaatcagtggaaaacgaaaaactcattgctagtcatccaagaagatggatcaaccaactatgcttaaacgtgcagacgattgttggaaagattcttcacccccacttactagtgttctgttttgtccgatcctgtgtatagaataaatgccaactattcttactcgtagctaaaaaacagagtacagtggttcaatgtgaagaaccgttcctggagtatatcccatttcgttttctcaccgcaccaaaaaccaagcaaagatttaggcatgtattgcttgccatcgcacgatacctgatagttgatcaatggattcactgttatctaaccatcatgaataagacctaagcagcgacttgatgtacgagtagttatcggagttcctctcgctggcattgaaagaaattgagacaggacgctggcagagagcgattggatcactgaaacctttttggatcagctgaatttcaatttgcaagagatagtaacatcgatacattaacaagttgctccataattcttaagaggttataccacttgaaacataacatatcttatgtttccatatttaggataaatgccatgtaagacacatgcatggctttcgatcacctggtgagttgcttgtgatattaataagtcctaaaagagacaacttccattctcaactcgcaagtaatctacattaccatgttacttggaggtgatctataatattaatagggtagaatggttggatatatattagagcactgagtctacctgtatataaatttataattgcttccaaatgacttataatcttgcccacagttattatgtaagaaattcagctactctctccgtcccaaaatataacaacttctagcattaaaaatttatcccaaaatgtaacagcttatccaccaatattctcttcacaaccaatcacaatccttcaccattcaatttcttcacttacctccacgtctcaaccaatcacaatattctcctattttattatatctactttcttaatagctatatcaaattataaaacttctaatattctgggacggaggcagtagcaaattcggtaaagtcatcatagttcacaaatattataaagattatgagcattttcaaaactcgcctatagctctgtactgttctattatattattgcatataaggtgaaaagttcacaaatttttcaacactcgcctatagctcttagactgtcatattgaacgggatagcaaactttggaccaactcactttgcatttgcctccatgcatctcctcattgccaacccataggaagcgcacctcttgttgccttgtcaatatcttgaatggattgttttggcggcttcaacactgtgaggacgtatgttgggatggcacttaggactgagttcaccataatctagcgtccccctgcatataagaacgatggattccatctcaagagacaacccttaatcttgtgttggacaagctgcagatgtatactttgtgcaaatggccaagggtgagccgtagtccaacaagttggtgggaaggtagccctcaccatagaggagttgcacaaaacgtcatcgagatcaatttcctgacatcgtatgggtgccaacaggccctttccgagattgacatgcaactctgttgcctcgcggaagtccctaagaatgccaataagattttcatagctccacttcattccttgctggagtgaggaaaacagccgcatcacccacatataagattttcggatttaaatgccaaagttgtagtatagtactaatataattatatttataggtagataaaaaaatatcggtattaaaaacaaagaaaacgactaaaagtaaatttacaggagacatggatccacactttgagagagtgggaaggggcaaataagcatttaccatttttcgatgtggcgttaaataatttgtcacttatatgtttatgatttgtaggtttatgtggtaaaatattacatctaaaagtgacaaataattaaatatctctgtcgatgaatggagtaaccacttcaggttcagtagttcagtgccgggactggttgatcgccacctgctcttcacttcagcagcagctgaaagttgttggcacaccacattacccgtcgccggctcgccgctaacgtgccgaccctattcactctagaaccccaaaaggcagacggctcaacgagagcgcgggcgcaagtggggctgaaaggggggtgtacgcgaacgccctcccttctttctgcagacgcccccaacattcggggcacatgcatgaacaacactctgattaggatggctcaacaaatgccacgcacttcatcatagagaaaagaagccacgccctccccacctcgttttcctcatttttatggcgtgcaggaactctcgcgatccgagtttttaaagtggccgaggcatcgggcgcagccggggtccccactaggccactcgagcagcggcacgaagatgaccgcttcgtccacttcaggtagcccacctggatgcagacccttcctgttgcatcctggagatagattggaatagagaagtctagagaataaaactagagattagtagtagatgttttgatgacatgtacctgagcaaacgaggtggtactctggatcttcagctaactgaacatctgtttgcagatccagaagaagatgatactactagtagcattttattcatcccagaatctgaaacctgagcatcagagtatctgagtatgcgtctttcagggtcacagaatcgaacctcgtgcagtgcaataccacccggagaacaaatttcattctggcaccagttgcaatttgtaaacaggatgtttgattagaacaacaaagtctcaacctttggttgcccttaacacaacgaaggctgattttaagacagcttacaacaggaggttagtcgtagtcactgaagccggcagtagtagcaaaatttcgtggttgcgatgctccctataagtctggtgccatcacaaccacgtttagccggcttctttgccctcttttctaccctgctgtcaaactaatgctatgcacgaagaattagctacagtgcacgtgtactatatacacctcctcctaagcgactctgtacgtactacactgtgtttctgggaatgggcagaagattgggtcggcatatcacctgggtttgttcaaatcaggaagcataattggtcaaccattcgagactctgcataaaaggattactgcacgttatatgccatggcacgctaaagatccgggtaatagtcaaattgctgcaaactgtgtacaacacttttcaccagaatcataatttgaggagaaaacaaaccattaggcattcaggcagatcatcattcttcgttctcatgtgagtctgcatttatgtgaagagcaagtggttagacatttgtattctttgcaaggatcagtatgttgtgaattggaataagcatgtgaagacctaggtgattcatggcatttgtcatctggctacgagataaaatgaaagcagcaacatacaaaactgagcaaaagttcagaatctttttccttaaggaagttctgaacgaatagcagactgcagatataagagaaatagcatagccagtgatggaagattaaagtatttacctccataaccaaatggcatgatgactcattgtttgtggcaaggcaagcaagggctaccactgcggctgccacagtggagggccagaaggagagatgtttgtggtccagaagtgagagcaaggccaagtacttcgccaggtcctcgactctgtcatctgcattcgcagccttcagatagaacctgcaaagttgaaccaaacaattgtaagtttcttattcattctgtccagctgacacagaaaatgaagcaaacacacaggcatagtaccagaggaaatgatgggttgttgtgacaaagcactggaagtcaaggacctcctgaaccagccactccatggcgacgacctcacttcggctgtaagtattgatccctactttgaaagctttttgaaggatgctgaaagagatcgtattattaggttcctgtagagtgttctaaagaaaaggtctatattgcacattgcccttgacagaaactaggcgcttgaaacaaatgcgcatccagaggcaaactcataagttcaaaagtgatacttcgtgcaaagtagacaggcaaagaagaatagttcctgggttcacttcacatgcttctgtgcagtaataagtggcacataaaacattcatttactagcaagttctcagggatacaaataaggtctactttcaaaaatgttgaagattcatatgagtttagtctttaaaacttaagggaaaacacagagaatatctcgcccaccagagcgctgatgtaatagctttattgtaacatcaaaaacagagaaataaaactatatcaaggagatctatgcaagtgataatttctcaaaatcgcatctctcccaataattgatagcttagttctttttttcttaaaaaacaatagctcaaggatgccaactggcgcggtaaattattttgagagatgcttgatcatagtcaacacaatcaagaaacttctggtgtgtttggttctcagccaatcaaaaccataccaatattttggtctgcctaaaattttgttagctttctttttgtcaccaaattttggcaacaccaatatttttccttggtagcaaactaaatactaaactaatcaatcttgccaaaaagtttgtcaacaaaccaaacaagtcctttgccaagattttggagtggctaaatcttgccattgccaaaaaattggtatggcccacaatggcttagaaccaaacaagcccttcatttctaaaatacccatcgtgtgaaacctttttgtagaacaatggtccaatggtctgagttctcacatgcagtgctcagtattgaaagtgataaatagctactagatgagatatgagttaccatcggatgttcctgttgttattaagttatttatagaacataattaaactcataaactcatgctaatgtctgttagaattaagttcaactttcagaaaaatcaaactatcaaagaatactaaggaatttgcagcattgcaattgagcactatcccatttaataatacatgctatattcaaatgagacgaactatttaggtgagtaccagacaagcagacaccaacaacttgcagaagtattcatactgaaactggtcatttaagggagccattaccaattatagggttgattctcttcaatgcgggttgccaaggtggtgcaggcgattcccagcaactgcaggttcctagagccctttacatatccacgtgtcaagaagcggtccatcagccctatccccatgaacacggtctctggctgcagcttcatcgcttgtgaatgctagcgatgcatagagaacaagtcattctttgcaagttatgtatgaactctatgtaagaacaaacatattctccacaaatgacagtacattattttcagaaaaatcaaattacaagtataaatgatcatatcacttaagtacttatcgctgagttgcccaaaaaaacttcaaacaaaaaacacacagcgatttcattttcaaaggctacctgaagtttcaatgcaaatataaactgatggaactagagttagaaaagattaaattcagatgatggtggatacacaaaaaaagggaatacactggcaatatgtttttctaacacttattgcatatataggtttagaagtaaaaagtgatgcagacatttctggaggccatatgccaatgcccaatgccatgggatttcagatggcaaatgactacagagcaactttcaggtgcgaaaataaacacctagaaaaatcctatgtatctcttttcttttcatacaagcatgccattacatccaaaaaaaatatgcaagcatgccaaaataagcacctagaaaatctttatcactgctctatagaacttgaatgcgatgacataaaagttaatgactagagttacattgaaatcactaggattaccaccacactgctggcagactaacacggggaatgctgcaaaatgtacaggcagctaactgtgtgataaacgaatcagcaaatgcaatgcgtatattggtatcagatagcttcccctacacaaaatatgcaagatcacaaccggatctgctacctcagcactcccacccagcacagcatttacactgcagagtagcatgttagtgcaaaatgcaagcaactactgttcttgcagaacacatcagtcagacagataagctgatagaatctagatcagtacagcactccgaaagtatacatgtgcattatcagcacaatacccgtgcaacaaacatctgcagctaccacacaacaaattgcgctcgagctagatgaattattggaccaaggcaaagtcatggtcgcagcatacgtgtacaatgcagagcatactgacctccatgatccagttcaccatgacaacgcgctgctccacgacggcgcggccgtagctgccgagcatggaggagtacacctcaatgtagtcgcgggctaccacccctcgccgctcgcgccgccggaaccgctcgtagctcacctcattgtccaagtcctcaaatctcttcccctgatacaataattcccatctgattacatcaaatgtcgcactgattcgggagagagcagccaaactccaacaaatttgagagaagctgtgtggaacctgcttacctctcccgcttgtagagcgacatccgtggcggtgggcgttttgggatgcgtgaaggggacgaactgctccgccaaggcgaggaacagggagaaggtgggggagggcacggcgttgtcgtcgtcggacgacgaggacgactcatgaagggggctaaacgagcaatcggtgcagatgcagggaccactgggcacctcctcttcatcatcgtcttcctcggtctcagacagcgtgaggtcctcgcgggctgagaagtaggcggtcgtctcggcgtcgttgccgagctgctcggggcaggcgaggtaggactcgaggacggaggcgaggcacgacgactcggagacctcgacctcggcggcgcgcggcctcgcgccaccgatgatctcggagcactcggaggcggcgggctgctcctcgtccacatcctggtaccgaggccgcttctccgggcgctgagctgcgtcgagggaggtggggcaggtggtgaaggtggcggagatgacctcgctgtggaagcaggaggaggccgaggtggacgactccgcgggtcgcttggctgccgccgccgccgccgccgcgatctgatcagggagcagaggaggagccgccgccgccgcgcctcgccgccggcggaagggatgggagcgcggcctcgtcggcaccgatgcaagcatggtaggaggcattggcgtgcggcgctgtgtgctttgtgtgtgaattgtgaatttgtgatgctacgggcctacggctatgttcgtttggcttgctagttatatagccgtgacttgaggcgtggagaggaagggggagaggagtgttcagcaaccttcggctgttcgccgcatcgcctgatcggtgaagtgttttttgaacttccaaaaatcctcaagccacgactgtgctgcgacgatgcacatgcgccgctcgcgctccattggatggcctgtgtactccagtccgtgtagattcgccggcgtatccctgtgggtcccagatgcatctggtgcacgagcgatccgccggaataacggccttgcctcccgtgtcccagcctcccaggcaaatcgaggcgtttgcttccagtggggaatgtcgggctggggccagcgcatatgcgggattggcggacggcggccaggttgtcaaaatgctatcctgaccctgattaattccttacccgaacaatctcgatcgaacgatccggttaacccagttgggatcggggaagaattacccaatcccaaccaggttgtctccaattgggtcactgcatactcggatcactacgtttttaaggaagtacagttgaagctcgattgtttgaatctgctggtattccggtggtatttcaagttacacatagctcctttgatttgtaggaaaaatgaaggaattttggaggatttcaatcctatgaaaaaaaaatcctatgaaggcatttgaaacaaaggattgaatcttatccaatcctttaaaattcctatggaatggataatcctatgcacattttggaggaaagttagcaataggtctatcctcttggaacatttcctctgagtctatctctctcatctgattcctgtgtttttcctgtgatccaatcaaatggccattcctgtgttttgcaatcctctattttacaattgtattcctgtcagaatcctgtgtttttcctattcctctgttttttcattcctacgattcaaagggcccttgaaacggcttggataaggtttggagcaaatagctcggtaaagaggaaatgaaagaaaaggaaagtgtatgcatgtagatgggaccctgatggactgattgatagtctgatacacacttctgaagaccgtcatttgccgcagacttcagaaacgtctcctctgaatctgaattctgaacagagtaccgaaaaccttggttcccttgtgcatcaccctggggaaacacaagagttcccgtaaaacaacattcactactaaagtcagtgaactaaaacacttgcatcaaaggatgcaagttggaacattctagctgtaaatcggtaacctgatcttgattagagttggccgctatacaacggaggtcgaagaactactacaagttacagtgtcagcatatgtgttctttaaaaatgtaaaacatttgattgatcaccacttaaacaaacatatctgtttgggagcatactaatgaggaacctgagaattccatcgcaatcatagttcacatgtcctgaagcatcccttggactggaggatctgaacagagttcagaaaaactacaggaaatgggcaagtaaatgaagtaactcatccacattttgctcacacaaatcactctgtgctgcaccctatccccaccaatctatttcagcgtaacaaaccctcaaagccttttcttgctgtaatcatgcagcacggaagcatttttcttgatttgaaatcaaccaagcatgatacttgtaggagggttcggatcacacattggttaatgtgacagcacttcagagcacctcctcagttctgatatttttggtgctagctcctcatcaccatattgctttagcaaatccatcaaacgatcagcacaagaagcctctatgagaatccccctctcagcaaccttcttagccaacgccaaggcctcaccaacatgcccttccacacacagcctaagcaacaaaccattgtagacatcagtgtcacagagcaccccgttctcttccatgactcctatccagtagcaagcatccaatagcctattcctattgcaaagctctctgaccataacactggccgcaagagggctcagccgcacccctttcttcatcatcctctgcacaagcccttcagcttcaccatccatcccaaccctccacaggcaaataagcagcacattgtagcattggtcgctcgacacactcccatcgctgaccacacgctccactacagcataagcgtctgcgaccatctcctctgaacagaatccgccgacgagcgttcgcacgaacacccggttgggcatcacccctcttcctgtcatcctatccagcaagctcagcgcctcccccatcctctttttcccacacaggcatttcaccaaacacgtatacgacaccacgttgggcacgcaccctgcacccaagctccaacccttcatctcttccaccagcctcagcgctgcatccacatccccgaaactgcacatcccgtcgagcaacgcggtgtacacggccacattggtcacgcacccaaactccggcattttctcgatcagctggcgggcaccgacgaagtcccccgcggttgccagcttatgcaccgaggtcacaaccagtgggacgctcggcgagacaccgcacgccgacatgataccgagaacggcacagacatctccgggagagccggccgagcggagggcggagcggaagcaagcagcatcgggggcgaggccgaaggagcgcatgtgccgcatgagagcgagggaggcgg

SEQ ID NO: 10169 - DNA, 5642 bp, Oryza sativa
agcgctagccctctcccttgaccgccctaggtcggttcccaaaccgacattgcctcccatttaaccaaggcgccctcccatcattcctcctcccgtttcgctcgccgccaccgcgccattgccgcccctctgtctcgcctccgccattcatcgccaagcaccgggagagccggagcgtgcgaaggacgcggaaggggactctgggcgctcgtcttcctccgcttccccggcccgaggccggagagatcactcccgtgccgtcggcctctcgtcacagcgccccgcctcgtctcggtagtgcatctccccgttctccctcctcgatccatctcctccccttagactcggttagtagcatgtgtagcaccccagtagctagctggcgccgccccgactgctgccgtcgctcgccgcgtgcccgccgccgtcgccggcctccctcggtgcgtttcctcctaatccggcgcaagggacggattcccggagtcgcgtagatgctctagctcgcccgaatcgatctcccgtcgcgccgtcgccgtttcccccttccctcgccgccggttgccgccgccgcaatccgctgccgtcgagctccctccggcgaatccaagccgttggctcgctccctctcgttctccctcgtcattccggtgtacaccccgtcgcccctcgtcgtcgcacggcgtcccggagaaaccgccgccgcccgccgtccattcgcggccggcgccttcgtcttcctccagccggcccgcgtggcagccacgtaggcgccacgtcggtgccacctcagccgcgaccgggtcgagccgacctcggtcggccgctcccttcggccctgctcgcgcgcgcggtccaccgcgagccgtgaggctgcgcgtgggcccgccgcaccgtgtcctccgcaaaccgcgcgcatgcaccgcgcctcccctccccaaaccctagcacgccccgcgtgcacctcgctcacggtgagccgagccgccgacaagcgggtcccacccgggaccatgcaaggtgaacccggcccacccgctccctctctcctctcctccccgcgagccccttgggccgtccctcaggccggccggcccaatggcaaggccgggccgcgccaacccctctcgggccgcgctcaagccgccagcgaaatctaattcccgtccctctttcttttcttttcttttctttttcaaaaaggatttaaataaatccttttcctttagaccaaaaatccaataatcttagaaactcaatatcttcccaaccgtaagtccgtttgactccgttcaacttccaaaattcctcaaatctcgagatctatctaatggcatgcctagaggtcaataatagggctttattttcgccgtttgttgagctgtcccgtttcgcgtgtagtttcagagcccgaagacccgcagtgcgaggatttcgaggatcaagctcaagatctcgagcaaggcaagtcacctttgaacatcttgcacctataatgtaaatctaagtatttctttttcgcaaatattgcatgaataggatttacacaagtaattcggccgcggcttgtgagatagcctgccggccccccaatcctaattgctgcaattaccctccttgaattattgaacacttaaacctcctttgtcaactgttgtgcttcgatgcacgggccctcaggtacgtgtaccggaacacccttccccccccctcaaaatataaaatatccaacgatgggtaaaacttgggttttacaaaagacttggaaaacccgacacctgggtcggtgcttgcgaactaaataaatttccaaaatcgcggaccggggaacgtaccgggtgcacggtttcccgctctcgcacttaagaaccgtttccttggaatttcatccgaacataagacaagtgcgaccacatgggtggaatgggacaccccgattgagtaactagctaatcgggggagccttgatgccgagagacatgtggattcaacggggtggtgtcggggagaacccccgggcttcctggcacagtatggtctgggacctaacctgttgttggtctgggacccctctcgtcggcatatggcaaccctgtgtctgctctcgaaatgccttgtcatgaaaacctttaggtcaccagacgtggccgttctgcacgggctgggtgattcgggttagtaatgtcgtgtgggtaaagtgtaccccctctgcagaggttatcaaactgttcgaacagctgtgcccacggtcatgggcggatgtgaggtgattcatagcgtagttttgtttgactactgctttgtgaaattgctgttggggattgggttcgacgtttggaaaatctgcggcggctgatgggatcagccaggcccgggtggccgtttgaaagttgttggccgggtgccaaccttgaaaccaattcaaagactgatacattgcacatactccgaccggacgagacgcactgcctcatccgtgccgtttgagaagcactcacttagatgtttcaaaaaggagtttgaataaaatcatttgcaaaaacaacagccttcccgttgaagcctgcattaaacacttatttcccatggcttgctgagtactcctgtactcacccttgctctatataaataatctccccccccccagttgctgaagaagatgatgtggatcccgctgacgaggagttcttctaggagcaagtcggttacgacgagttttagggtttcggcctagttcccaagtcgcgcctgtgatgattggtccaagtctcggcttccgctttcccttttgtaatgcagttgtgagctcgggatctgtccgcagcccaacatgactgtactcctactctgtaataaagagaccactgttgctgtgatattctgtcttcccgtgataccagcactgtttcctgggactggtatcgattaacaggttaatttggagcgtcacgggctagttccgttcggggctagttcgggacgtgacaagatagatgcaatcttgtcaggcttctcaagctaacaaggccaactgttggacagaaggaacaatgaacaagtcgaagagactgaatagagtcgccactctcattagataaaagtgagcatgggaaattgtacttttcctcatttgaagtcaacacgagagtgagttctttaatcccagatgtaatagcaatctcaagccaactattgagatgataataggtgttggcattggaaaaaggatgtaattcaaggctaaatgtctttatacctcctgagtgatttttcattatgcggtcaactttgttgttgtaatctctaactatcccaccctttttatgtggcactttattcaaacccatcgttttccaactgaaaatgaggttgggatgacacctccagaaacgtagaaaagcctgagacacgcaagcagcacgggcagcatcttgcagtggcaacaaggaatgtatatggtgccatatgtcctgcatccacaagcatttagaaaaatctcaatattggaattcaagagtaaataattaacacaattagagaaagcaaaaaaaaaaaagatacatatatagtggcattctataatgttgctctacacatggttgtataaaatgcatatggcattcgaatggagtctgagctcatttttcagtttgtgtttgtgtattgtgcacgatgtgattattttttaagttgtagtagaaccagtttgtttgacaaaccaaattttggtgcaaccaccctcactagggaatggtccgttgccatccctatgtaggaccgtacaagattgcagtattgcaggatttgttcacaactcaatattttgctaacgatcaacccaacggtttgtggttagagcaataacggtgacattagctccctctgcttacaaaaagtcttttggacattgacacggtctccaaaacagaacattgactaataatttacattataatctattgttagcctgataagattatgataatatgaaattactttctgagacatccaaatatatgattctggcatttacggcgtacctctggaaggtccggacctgaatatctcattctcttcacacattgagaattatcttgttggcagggagattcctttcttttagcacattgagcaagaaattgatctgcaacatgttatgctcatgatattacatacaagaagaaaacaacaagaccaaggttgataccagtcacaatgaaacacgcagagaacaaaattggatccattagttacagacaagaatttcagtagagggaacttgttacagtatataaaaaaaaacgtcaattgagcatttgaggtattattgaaaaatgatgcaaccgtcccaaaagaccatcagacaatgagttggaatctccaacctcgtagttataacatctaaccctgctcactgttgtgtttggctgaataattcttgctcctcttaaccatgatagcctccaccatggaaaggaagaagcgtgctatatatccaactaggtatgttttgaaggtcacataaaaaatggacaaacagcaaaacacattaaaaagaggatttttcttcaacgttctgtaacgtatataagcttaggaatcggctttaacagtttagaagtggtatagcacagcacgtcatgaatcgaataagaaaaagcatgtcatgcggatagcacaatataggactagatgaattatatggacctaggagccaaataggtggcttacaggtttcgatttggagacggcgctgctcccgccttagggacattaaccgattcagctcatgtagtcccctggcgcgatgatatctcggatctagtcgagaaatcggaggcatcgggtcgggggcacctcagacttgccttctctcccgcttcctctactgatctaatgtctttctcctctcgattctctgattatttgaacccaatgctgcgctcgcttacaatttctttctgaatcaaacgagacgcgaggggaggaaatcgagtcggcgccgccgggccgggcgacctaccaagcctactcatactagtatactactacactggatgaggaggacgacgacgccggatgcacacgatagcaaagctgggccctaaagatgagactggacagaaaccgtgcaaattaagcgcacacaccgggaaccaaaaagtccaatttaagtcccttattataggtcagatttgatttgtatcctcaaccgtaaaaccgggtatttgacccatccaattactgaaaacttaaaaattgactcctttttgttgttcccatggcagttttaggaagatggattctcacccgtttattgcatgccaactaaatgttacgaaaaatttaaaaaattaaaaatatatatcaatatgtaatatatcattccataactatgcaagttcaaattaaaattctacaagtttaaaaaaataataaatttaactgcaaataaacgtatagtaatttgagctttgtttgttatttttattacaatttatataagttgattttttaacttgcatggttgtggagtgatatattacatattgatttatcttgtcaattttacacggttttaatagttgaaggggtcgatatatccggttttgtgattgagatatacgaataagatctgacca

SEQ ID NO: 10170 - DNA, 12100 bp, Oryza sativa
aatcccttatattgtgggacggagggagtagtacttatgtactatgtgagtttttggagaattttgagcatcttgaaataacctcgatagtacccaaatcgtttggtttgaaaagaagtgatcgaactgagtgaaacatgaccaggtctgtaccgttaaatttcaatttcctgtaactctctgtctctaaaatcctgtatatacctgatgtttgaatctcctgaaaatgtagatgaagattcagtgtttcacgtaaaacgaggtggtgataacgtgtgattaattaagttttaattattacaaacttaaaaaatagattaatctaatatattagagcaactttcatatgaaaagttttcgcacgaaacgcaccgtttaacagtttaaaaaacgtgccacgagtatacaaaatttcatccaagccttgttggagaaaagaacagggcacgttgagactgaagcaagtaaatcaaattgcatgctgaccttcgaaagatcttcctaaaggtttcccttttttgtgtgtgtgtgtgtgtgtgttaccgaatcccctacttctttttaattggagtgtcactaacaacctaatgttactcctttacagataatgtcgagcatgttaatcagatcaaccttgagattgctagctgggtagaaagtgactatcaaatacagtttttcccgtcgaactattcatcttggttttgcattccttgttccagttgactatctgcagcttactatcagcaagtgatatcattatttggtaccattacttgttggtgagatatatatgttcgacatatatggtgttgagttcacacacaaacctttggtaaattggtaagcttattttttgaaaatatattatcgtttagtgatggtggtgtgcataactaataagtacaaggctaaggtgtatatatgtagtcctctcggtatatatgtatagttgatgatggtttattcaatatacaatttcctcttttttccatgtatagctggaaataagaaacataatattggttctcagtttatttgctccatgtcacgcacaatatgcttgaaagtgtattcataaacgatctgttattcaaatgtcagttctgaattgtcataagaaattcctgtaaattaactgtttagttttttttaaaaggaagacaaaagctttgacttttttatattgataaaggagtttaactgtttagttaccttgtagctttccagttgctgtccatgtccagtatattttcctaatatcttctttttagcgaacgtgaaatattttttttcactaaattgattctctctgttgtaatttaaagccgatcccattgatttgaggctcttaaatatataaatctgcctgtggctattgcgaacttatttgttctttttcctgtgccaggttcaatgaaaatgttgtgaagaaagctgtccacctgcaggttggattcctaggggggttgactgttgaggaataaagcaatccaatggatatttcaaagtaaaatggtctaatgatagttacaggttcaggaaccttatcatcagcaattgagatgggcctcagatgaggaagtatgtccccttcgttccagtcaccaaacattagctaaaaaacgtgtcccctgcactaatctagctgttattttgatcatatgtcataaactgttcaaaaaataagtccactgactgttgtccccagtctatgctgttccatgaaatctgtaatttaatcaaacgttgaagaaccggaacaataactcttatcttaattgcgtccccctggtagtactgttactgtactactaccgaagtacggattgtagttggtagcaagagcaggtcaaagatttcatcgaggaaaaatatttgacacgcctttctctaacacaagcagctactcctattcgtttggtcaaagttgaggtccaatgtgttcatcatctcggcatctcgctcgtgagaacgcaacgacaatgcgctatattctgcgctgacaggtggggcccagaaaggatgaagcgcgtccgtagactccgtacggggaagttgctacgtaccgacgccagctggactttgtactccaacaaacggcagcgatgacgccgaccgacctaccttcccgcatgtggacccgacacgtcagcctctacattcggcctttggacagcgtcctaaagatctcgttattttttatatttattttctaaaagatttaaaatataaatttccatttcaaatattttacatgaaaatactcctcccggtagaagtatatttttaaaactttgaaatgataatttatttttaaattctttttaaaaaataaatataaaagtttaaacaatccaagatctcgctacttccggcccgggccgacctgccgcttcccttgatatgacgcacacgattttactgctggccccacatgtcacaagcacagccacgaattcggaacgaaccataaaccgcacccgcggacgtgacacagccacgctgactatcgtgccccacaagaaatcctgcacgctgttaactgaaacgcttttgactgacgggtgggaccaaatttacgggcccacaggtcattcaacaaggaaggtatatatagcaatatcgcataaagtattttgcaggccacgcgcctttcgtgatctctggtataaaagtctactcctaccaattaacctcctactactagtacaccagacgacaacacacacacaaaaaaaaaaaagaagagaaaaaccgaacgaaaatcccctcgcgcagacgactactacatccttctcgtctcatcccgtcgacccgccgccgcctcaatctcgaagcctcggcgaggctagggtttctgcgtctccatgggctctaagaagcggtcgcctcagcatccggccgccgcggcgccccctcccgccgtcggcggcggcggcggcggcgaggtctccggcgatggtggcgcctcgacggcgaacgggccggtggtgccgaagccgtcggaggtggcgccgttcctgacgaaggtgtacgacatggtctcggaccccgcgaccgacaacgttatctcgtgggccgagggcggcggcagcttcgtgatctgggactcgcacgccttcgagcgcgacctccacaggcacttcaagcacagcaatttcaccagcttcatacgccagctcaacacctatgtgagattcccttgatccctgtgttcgtttgtttctgatgcgcgaattcggtgccatttccagttggttggacgaaatcggtagtgaaatctgagtttctgttcccaatttgttgtttattatcacggctagacagcaaatcttgcttgcaattataaattgggcagtagcttccgatgcactgcatatgaatttgtttgaatcgtgactgcgtgttatatgatgttactttcttctattttgtgccttttaagttgattgcgtgtattagggattatctgccattttggagttaatcacttattaaattttaactacgttggaagctgttggcgatatagttggatgcctttcttcttctagtcgaaagacacaatagaactagtttctgcggtggctttctattcaacaacaacttctagagttctagtacataaaacacgtcattgggggtggggactaatattgttaattttgagaccagtttctgttctcttaatgttttgtgaatttgatcgtatgaaagctggctgtagaaactatgccaaactcttggctttaaattacaggggaatgatatgtgttgcctatcactacttctaaaagtctatttcccccatatttgtatttagtgaacttcagaactagagaaagcatgatgttataacctaccatcatgctgtataagaagaatatgttccctcttgtttggctgaaagaaatgcatgtttggttgtgctgatattgtactgctattatcttcttctgtgtcatttgcctcaatacattgttttatttgaatttgaacttccttttcacaatcgaatttgtctgatgaaatataagattatgaatttgctcttttattgaactatatggacacttaattttgtgcttttggcaaatccatgtcctcattttgatttctggataaatcactggactcttgcacccaggatttcttctgatgtctaattacttaaatgcgaaaatcacctgacttttgctcactgggttgctttcctgtagttaggagtagttctatttaaccatctattagttgttcttggcttcatatactcagtaaaacttaaaaacaaagcctgaaaagtgaaatctccaatgggatcagtagaaacattactttatctgctttcattgatgttctctattcttttggagcatatgttttatattagctgaagttactcaagtttcctttcataatcagggatttcgtaaagttcaccctgatagatgggagtgggccaatgaaggttttattatgggccaaaaacatcttctgaagaccattaagaggaggaagaagtcttctcaggaatcacctagcgagatacagaaggcgcctgtcaaaactgcacctggtactgaaaatattgagataggaaaatatggtggccttgaaaaggaggttgaaacccttaagagggataaagctcttctcatgcagcagcttgtagatctcaggcactaccagcaaacatctaaccttgaagtgcagaatttaattgaacggcttcaagtaatggaacagaaccagcagcagatgatggcacttctagcaatcgttgtccagaatcctagttttctcaaccagcttgtgcagcaacagcagcagcagcgcagatccaactggtggagtcctgatggaagcaagaaaaggagatttcatgctcttgagcagggccctgtaactgatcaggagacctctggccgtggggcacatattgttgaatatctcccacctgtcccagaaacatcaggtcaagtaaatccagtggaaggagccatttgttcggccaactcacaaccagttccaagtcctgcagttgccacacccatggacatgcaaacgtctaacgttgctgatactctcggttcatctgaggagcctttcgctgataactctactctacatgaatgggatgataacgacatgcagcttctgtttgatgataacctagacccaatacttccaccatttgagaatgatggtcaaatgggccctcctttgagtgttcaagattatgattttccgcagttagagcaggattgtctgatggaagcacaatataactccaacaatcctcaatatggtaatgactaattactgtataccctatgtttttgttcatcattttgtggaaaacaagcgtgatgtcattttagttaactgtggagtttctatgtgcatgtttcatgccaaatgccaaacaatggatgtttacagaccacccttttagtctgttgtgctaggatttggcaaagatgacatggagccttattcaaagttcaatacttgcttctcaaatggctttgatatttccttctgttatttcacgaaagtagtgtttgacaactagagtgatatttttttttatatctggttaattggacaattttgatcacagccaaacctcttgatttagtttcctcaaccaaaacagatctaagctgtgcctgcgtcacattgattattttcccaatcagcctattctttgtttgatcatatcggtttcaattcactctgcagtacttctatacatgcctgacatcttccctttttcatcagctgatgtcattaccgaagcttgattggtggtccaggagcatacttgcagtaacattaggtgggtacagtccatttttaacatgaaaaaggaattattccttaatgtgctttgttaatggaatgcttactttgcgttgcaataccaaagtaccaaactgaaagacataccatccttgtttaattcctctagccgttgtttcttacagaactttaggctagtatttcgtgtcaggctaggactatatggtcaactaaccctgcaaccgcctccaaattgaaattcaatcgaaaaaatattgaacttaatggcttgaactgaatgcttactaaataaacatgattggtcgttaaaaaaatgccatcagccatttcttgtaaataaatacacgaagctatattttttttatttgtatgaccaatgtttgttccagtactgatccagtttcaacatctgcagttcttcggtgaccaacctccgggcgcatctgcaccattggcatcccgaaatggcgtcctcagggtgtaccgatgaattatgctaacacagaagaagatataactctaatctggttgaccatacagaactacctttcttgttcaaggcactttttggggacaggggacgccttttcgcagttctcgtcgtcttacactagcgatggttgctaccatcgaattcatttggtgtatatactgttgttcgtcttataaaacatgagcagttttgtacatttaccttgcgtatcatgatcgcagctgtgtacctctgcattgcattactcttacctttttgcacaccaggctgccggccatcttgcgtgatgccgtttatgtagaagcgcctttccggctttccgtcgtacagagtccaccggttttttttggactgctgaaggatgaaggatgcattcactgccgtttattagcggacgaccaacgattcctggacatccaaatttaaaggggaacaagcttccagcaccaaagaagcgcatctggtgtagtggtatcatagtaccctcccacggtactgaccgggttcgattccccggatgcgcattttttggttatagccctaggttctgtgtcctttaccatgttctgtgtcatctttttgccacgaacaaatgcttgacgatgacgttgcaatgctgcatagcctgaacaaacatccatgttctgaatagccgcacgcgcttcaattctcagtttatcacacatgaaatggaggtcacgactcgtccgacgagtcccgaccatcgcgcaccgcagcagcggccgctaaagcttataataggctaatagaactgagcaatagaacatgccgacctctgtaatcgcactgctagaaaaactatttttcagacgatgacatttttttctctgacgggtatgccacttagagctaaatgaccgtctgtgaaaataacaactgagcgatatcgtcgtccgcttgcaaaaaggttaaacatgttaaaaacatcatctacccaccaaaatgctaagtcagagcacttcgccctcacacctctccctcctctcccctctcacctctcctctccttctctcccgccgcgggatccagtcggagggcggtggtggcggcggctaccggcggtagcaacgcggagggtggaggacgcggcggcttcctcccagatccggtggagaccgcggcgacggcgcagagggtggtggtggcggcggctccaagcgctggcggttccccttcctccctcctagatctggccggagaagggaggggtgatggtagcggtgcagctggaggtgtatagggcgagggatggggtggtattttttttattctcctaaaatatctccgcaaacgagtggatacgacgcccgtgaaaatcaactattttcatagacttgtgcgcataggcgggccgtcctcccgtctaggaaaatgatttttgaccgcctgaaaaaatgatttcttagcgtcgagctctctcgctgcctgactcatggagagattgctgggacatgacgcaaaggcccaaggaggcggagccacgagcccacggtgaactccgacctgcgatctcacccggtcacgccgctctgtgcttctctattcacatcgtcctacctgtccatctccgtcccggttggcctcacaccactcgtgccggctcgccgccgtgcctcgtcatctctcttatcccgtggtgccccatccgcatcgcccgatggcaaaccgacggccttgatcgcccaaccggatcaaccaccgcccccgtcttaccgttacgttgatccagtcagtcgcgtggggagatctgatgggccaccggccaggccgcccaagtttttgcacctgcgaacccaccgggcgggctcctggtgggcttcgccttcggcgaaacgcccgcggccggtgcccttcttcttccgccgaggcaggaggcagcggcggcttccggcttccttcttgtggctggtcgaaccgtctccgatgataccttccacgcaagcagctagtcgatcgcgccaacgggggaaaagccattcctatcatcctgtggacgcaataatgcgccgtcagttatcaggtactgctgcctccacttgtgctgctgctctccataaatgtccaacttgacaaaacggcgactttgttgtaccctggcccattcgatctgcagtggtacacatatgatacgtacccgcagcgactgttgctcgttttcgtttttgcggccgtgtggccgtgtccaaactgggcgcagagccaaccctctccacgtcggcttgggaatatttttggtggccttgctacttgataaatatcttttgtttaaaatgtgttcataaatacttactccgacttataaaaattaaaattctaactccgaggctttatcccataaaaaagtatttctaatcacgtgaaactcaacaagtaatttaagaatgctaattatgtggattaattatcttaatttttttaatcaattatatatatataatgtatgtatgtatggggttcattatcgtggtcatttgtctatccttctaatatgtcctaaattagctagaattttagtttttaggatagaggaagtaaatagtaatatttaggttatagcttctccatcctgaccattccttatttattttttattaaatcctttatgaatacttatattcgtgaacgaggaaagtattttaggatcatgattctgaagtctgaagaaagtattttaggatcatgattctgaagtctgaagaccattttggtcaggagcctgatgaaatttcgtagcaaatttttaccactcaatacaggccaaaataaatcaaaaccaactttattaatattttaaatttaaattatagctttttaagtgtcgtttttttaccttgcttgagaattgagatatggtggggggattttcaggatcctgtggttctatatgaggagagtcccctagtcaatatcatgcgcatatgagatttgacacacaagatgcatatatatatatatatatatatatatatatatatatatatatatatatatgacactctcactacacatgctaatgaaggatccaattggcgatccatcgctgcacatgtacaatgtgttgcctatagcacatttatggacgttttattattttgctcactacctaatggaatgagtacaacactgcagtagttgtgctgtctatctaaaattaaaacatatcgtcctttcgaccggttgttggagctacattttcagctcacagcgacccgggttagtttcctgtacccgtttttgttctttacatcttctgtttatgccgctgcatctctgtcgtatatgttggtatgagtcaccacatgaatccagcaactctaaaagagatttctttttaatcaatccactaatactaaagctagctcaggcttgctgtattcactcagtcacaactttatctcctttacagatcgggaggcacaagtgggggagtttacaaaagcaaaaccattgaagaaaaatggcatgtgtcctggcccattggaaaatagaataatttcttaagagaaggtaccgtgtctgtgtgcgtatgtttttttaggacatgtggttacgcagtacctgttcatttgaagtttttcaaatgaagcaatctgttccatgccgtcaagtttcctccaatgttatagatgtctctaatataagttagctttacagtaagcagcatgtggtgaatttatgaatccaagaaattcgatttgtttttggtaatatcgcttttataataagatctttttttttttcgaaaaagacggcaggaggactgtctcttatcattaatagagaatgagagaatacagattatttacaaaataagaccaaattgttttatgatctgaaggagcacatgttttatgatctgaaggagcacaatatcatggataatttttcttgctgtgctctgggtttcacgtagttgcagaacttgtagcaaacatatcattcagacaattgaactagactctttagtctctcattacgattgcacaaaattgtgtcttgcaatttgtaatttggccaagaacgaacttaaaaaacaaacaaatccttggatggcaagaagtgaaaagagaggaagaaaaaaacacacgggacaaagctgttcgtccacgtggcagagattatgtacacgtcatctctgattggttcctaaatctgcagagttaatttaaccggcggctcgattggctatagatcgccgctctgctccgcctcggcgacgagcgcggcgagcgagcgctgcgcatcggcggcgtcccgctcggcgatgaacgggtgctcgagcagctcgccgaccgacgcgcgccgcccggccttcttctcgaggcaccgcgacacgaagtcccggaactcctccgacgcggcggccggcatctccggcgcctcgccgaagcatatggcgcacatgagcgccgcccagtcggggcgctgccccacggggagaagcgggaagtggccgaggtacagctcaaggatcgctaccccgaggctccacacgtcggcggcgtacgggtcgtagtcgccggagtaggcctccgggtcgaacctctccggggacatgtaggccgccgtcccgacgtaggacgcgcaggggtcgagccgccgccgcaggaccttgcccgcgccgaagtcggcgatcttgacctcgccgtcggcgccgaggagcaggttcgacggcttgaggtcgcggtgcacgatgcggagcgcgtgaagggcctcgagcccgagtagcgcctgcctcgccacggcggcgatggggcgctcccccatcgggcgcccgagacggcgaagcaacccagccagggaacccccgggcatgagctcgagcgccagcgcggcgggctcctccaccccaccggcggccgacgggaccaccgcgtggagcctcacgacgtgcggggcatccgccgcgagcctgagtatctcggcctcccgcgccgcggagaggtccccggcggcgaagagcttgagcgcgagcggctgctgcgcggggcaaccccgtcggtggcgcgccttgtacaccgtcccgccgttgccgtggccgaggacggagatcctctcgaagtccgagaggcggacgtcagaggaggtggacggcgcgactgcgggctgctgctgctgctgcggcgccggcggcgggcggagggcgaagtgatcgagcgggagggtgaggtgcggcaggtggcgtcgctggcggacgagagccatcggttggagaggagaggagaggagaagagaagagaggagtcgaggagagatgggagctgacgaggagggggaggggagggggagcgggcgtatatatggagtggagaggagagagcagagagggggggagtgagatggaaggcgatgtgtgggtgcgagtggaggagagtgtagtgcgggtggaggcaccgccgggtgagtgattgtgtgtgattctcggtaggatctgagttctgttttttccgtttccgtttcgcttctcctgtcatgtcctgccgtgtgtaactgcttcatctgggcgcggaagagatggccagtgtagcgcccattccgtcgtggcgcctagcgggaaaactatctcttaaaaaccctaattgcgaaatttgtttcttcgcttgttgtctagtgtccgtgccatctcagatctcaaatcctcgatctatcgtcgagttcaatcccgaatccaaatccttcccaaatcaattcctccacaaaagtctaatttgcctcccccgggttcgatgggccgaatctctctcggcccatctcccc

SEQ ID NO: 10171 - DNA, 1222 bp, Oryza sativa
aaggcctcgatctgttttcagatgtcacaatagattatactgatgcaattttaggaaccacagtgaaggtgagctgttaaatgtggctccgttcatattatgcattacatagcaatgacatatatttatgtaatgctagcaggtagcagcagaactctggctccagctttacctagaaagagtgtttcttatttcaggttgaaacaatagagggattcaaggatctttatattcctcctggcactcagcctggggagcggctgaaatttgctcaactgggagctccagacattaagaatcctaccattagaggagatcataattttgtgataaatgtgaagatcccgaagagtatcaggtttgagttgcgagtattgttgtactttgtgatgggttaatgctagccgtagtattgctttgtagtttttatgcggtaaacatccttggttacagattatactgttacaaggcgcatcaaattatgttatattactcttagcttttggtgctttgccttatcaatgcttatattcatcagcaaccaagaacgaacattagtacaagaaattgcagcactgaaggaaactgggtgtatttctgttccaggtgaaggtacctattttcctttctgaggcattgttccattggtacatgactttcttatgtaatctttggctatttcagagactaaaaacagagaaaatttgggagagagaaactcccattcatccacagggaagagaagatccctctggcgatctatcaggaatttgttcaggtataccaccattcttttgtagcttctcttaccatgagcattaaatgcaactatacgcccatcatattgatatcatcaatataacttctttttgtggggctcattctataaaagttgggtgcgcctttattcatactgtgtaacagtttcatttctaccattctaggggcgacgatggggatacgagatttgcttcaatcagcgcacaatctgttactccattatggactccgcgacgaggatctcatccagctgttctgttgctagaaggattcctgatgatcacagtgctcttattcgtgataagcagaactcgtataatcaggtcgactccaaagcggtatgatcgtcctactgaagctaaagaagccgatggagagacttaaaatttattatggtgatgttatttggacgttattgcacacagattttttctcttctttt

SEQ ID NO: 10172 - DNA, 5749 bp, Oryza sativa
tcctcgccgacgccgacgccgacgccgacgaggtaagagttctcgcgatggacggtgttcgccgtcggagaagaaggagaaggcggcaaatgggaacacaaatgggagcctaatataggtaggaaagaaacacgcatcggtagaccaccgcgttcgcgggggcgcgaacggagagaggagaggagacggtggcgattggcatgtccacaaatcacgtacactgcccgatcgaactcatgggctcacggctagttcgcaagcaaacggcacggccgccgctggtcgccgtcgttccgcatccaccccgccggccgtcgtccgcgataaggatcggcggaagtgaaacaattaacgagacctatctccacgagtccacgtagagggcccaaccgagagcccagttaacgaggaaacgacatcttctcggagtgtctggctggccgggcccaaaaaaggccgtgactttcgtttgtggaacgttccacactactggacttttgggctgcacgaacgaccgagcgaacacgaccgttttgcgtcttggtggacaagaaagaaacgacccgagaccgagaggagaggcgagagagcgtggagtatttgacttggtttcttaaaggttaaagccgccgctggttttcgcgcgcccggccgcccacgttattgaggcgagacgagagcgcacactgcagaagcatgcggcatgcctgccttgcgcaggcacagctacccgctctcgcagctgcatccggcacacagattttcggctcgaatggatatccgccgtagtctccaagtcgatctgttgttccttcccccctgtacgtctcaccgtagagttggagtggcatcatggcatggctatcccgtctccatgcttcttggctcctcgcgagcgcgaaaggccgctccagcctgggaccgatccacctatataaatcggcctcgctctgctccagttcggactcagatcgcaaccaacagttgagttgaattgagctcgaattgtactcgattcaccacacagaggaatcaaatcgaagcagccatggctctcgtggagggaaacaacggcgtgtcggggggagcggtcagcttcagcgaggagcaggaggcgcttgtgctcaagtcgtgggccatcatgaagaaggattccgccaacattggactccgcttcttcttgaagtatgtactactacatgctactacttactagtgccattcttcgcagagtcagtttacggcaccaaccattggtttctgaggcattatacatttcggtgtgcgtgattggtgctactatatctctattccaggatcttcgaggtcgcgccgtcggcgagccagatgttctcgttcctgcgcaactccgacgtgccgctcgagaagaaccccaagctcaagacccacgccatgtccgtcttcgtcatggtaatactaccatcagtattgctgcagacaagagtaaatttgttgtagtagtaggcactgacagaatgtgtgcgtgtgtcgtgatcaatcgatgttgcagacatgtgaggccgccgcgcagctgcggaaagccgggaaggtcaccgtgagagacaccaccctgaagaggctcggcgccacgcacttcaagtacggcgtcggagacgcccactttgaggtagagtgatatccagttgttgctccattcgatcgacatggaactctatcgatcgtgttctgattgtggccttgtcgaacgttcgtaaacaggtgacgaggttcgcgctgcttgagacgatcaaggaggcggttccggtggacatgtggagccccgcgatgaagagcgcgtggagcgaagcctacaaccaactggtcgcggccatcaagcaggagatgaagcctgctgagtgatatatatactgctccacctccatgatcctcgctgatcaactttgttgcattgtgctcgttcaatattcctcgccccacaaaagggacttttgtcggtgtgtgtatgtccaaatgattaaatcaactgctgttttgttctatgtaagatacataactcataaataaagatggttttctacatgccgtttatgcgcttcgatctgcagcattcggaagtacaacttcggtagtttggtgtgccgttcgctggatgggttggacgttgagtggcacacccatcacgccatattcttaccttgggccttgcacccaaaagggaaagagtctaattcacctccctcatttcttgctcttggtcgaatcacatccctcaaccgtaatacggatataacccacccaccaacttcttgtaaaataaagggagcaaattgaatagatcctattcctatagatggccaaatgggccgtccggccagcatggcccaagcaagaccgggcttgggccgatgttagtcgggctgacccacgggctacaccaacggtccaggcacaacccaataagactagggccgtattcggccagccagaaggcacgacagcccatcatgcttctacatagaataaatctatttttactccctcatctctctgggctggtgtcttacatggatagaataagtcttattttgtatctgtcttcactttgggccatgtcttatatggataaattaattctattttggatccctcaattatttttttgaccgtgccgtgccgagccggcccaccgtgccaaggcatcggcccaggcacggctgtagcgcccgttccgtcgtggcgcctagcgggaaaactatatcttaaaaaccctatttgcgaaatccgtttctttgcttgttgtctagtgtccgtgccatctcagatcttaaatccctgatctatcgtcgagttcaatcccgaatccagatccttcccaaatcaaatccctccgcaaaagtctatttcgcctccctcgggtttgatgggccgaatccctctcggcccatctccccctccctccccggctctctctctctctctgtttctctctctccctctcccccgctctgcccgtgcgctgcacacgcgtgcgcgtgagccgcgccgagccgagcgccctccgccctcgctgccgcttcccgccgacgccgccgaaatcgccgcgccgcccgttgcttcccgcgcgcgcgcgcgccatggtggccgaccgcctggtcgctgccgccgtcagcatctgccgcgcctgcccacgcctgccgcccgtgacgtcgcaccgctccacaccgccccaccgtcattgccgtcgtcatcgcctcggccccgccactcccgcgctagcctccaagggacggaggcagagcctccctcctccctctgccgcgacgcccccgctccctccttcttttcccgaagaggcaaggggacaagcccccttttctctccctcttttcccctttttccctcccgccggcgtcatcctcctcccttctccctgtcgccgcttggccgcgaccgccgagcgctagccctctcctttgaccgccctaagtcggttcccaaaccaacattgccatcctataaacccgagctccccccctttttcctttcctctcccattcacctccgcgccattgccgcccctctgtttcgccgtcgccgttcgtcgttgcgcgtgtcggaggagccggcacgagcaaggacgcggaaggggacttcggccgcgccctctccttcctcctccccggcccgaggccggagagattactcccgcgccgtcggcctctcgtcacagcgcccctcctcacctcggtgatgcctccctccgttcttcctcttcgctccatctcctcccctagttttcggtggtagcacgagtagcctccccgtagctagccggcgccgccccgaccgttgccatcgctcgctgtgtgctcgccgccgtcgccgctcgagcttcgtagcacccgctcgtcgccagcctcgctcggcgtagctcgccaatccgacgctagcaacggattcccgtagccgcgtagatgctctcaccgccgggaatcggcccctcgtgacctcgtcgccgtttcccccttccctccccgctggttgccgccgccgcaatccgccgccgtcgagctccctccggcgaatccgagccgttggctcgtctcccctcgtcctgtgcaacatcccggtgtgctcgccttcgcctgtatcgccatgattcgctccgccgctcgccgccgtcgtccgcagtccgttccggccggcgtcgtcatctacctcccgccggcccgcgtggcagccacgtaggcaccacgtcggcgccacctcggccgcgaccgggtcaagtagaccccggtccgccgcttccctccgccccctcgcgcgcgcggtccaccgcgagccgtgaggctgcgcgtggcccgccgcaccgcgtcctccgcgaaccgcgcgcatgcgccgcgcctccctccccaaaccctagcacgccccgcgtgcacctcgctcacggtgagccaagtcgccgacaagtgggtcccacccgggcccacgtgggatggacccggcccaccggctctctctctcccctccccgcccacgcgcgcgccttgggctgcctcttgggccagccggcccattaagctcggccgagccgccccattctctcgggccgcgccctagccgcccgagggaagtctaatttccctccctccttcttttcttttcttttctttttcaaaaaggatttaaataaatccttttcctttagaccaaaaatccaataatcttagaaattcaatatcttcccaaccgtaagtccgtttgactccgttcaacttctaaaattcctcaaatctcgagatctatctaatggcacgcttagaggtcaataatagggctttattttcgccgtttgctgagttgtcccgtttcgcgtgtagtttcggagcccgaagacccgcagtgcgaggatttcgaggatcaagctcaagatctcgagcgaggcaagccacctttgaacatcttgagcctatatttgaacttaattatgttgcttgaaaaatattatgcattgataggatcgcacttaatctgcttgtcccgtctgcaaggcagattggcggacctacctaatttgttgcatttgacccccccattgtaattgttataccatgttcccttgcaccccctagttgcgcctcggtaatcgtgcactctgcacgggtaacaacggtcgccttcaaacttaaaatctgagaaacatcttgggtaaaacttgggttttacaaaagacttggaaaacccgacacctgggtcggtgcttgcgaactaaatgaatttccaaaatcgctgaccggggaacgtaccgggtgtacggtttcccgctcttgcacttaaggaccgtttccttggaatttcatccgaacataagacaagtacgaccacatgggtggaatgggacacccctggctgagtaactagcttatcgggggagccatgatgctaagagacatgtggattcgccggggtggtgtcggggaggacccctgggcttcctggcacagtatggtctgggacctaatctggtgttggtctgggacccctctcgttggcatatggtgaacctgtgtcggctttcgaaatgccttgtcatgaaagccttaaggtctctagtcgtggccattctgcacggactggatgatccgggttagtaatgtcgtgtgggtaaagtgtacccccctctgcagaggttattaaaactgtttgaacagccgtgcccacggtcatgggcggatgtgaggtgattcctagcgtagttttgtttgac

SEQ ID NO: 10173 - DNA, 10879 bp, Oryza sativa
caaggtcgtttgatgtactttattatccctgtacataaatctagaataacttatatttggaatccaagtattctatgttttgagtttggaaatagtgggcatattagctgtcctgataatcctgcaattctccaaaagttataactttgtcattttattggtactcacataggttccttggagaatctgttgaaatctgtggatgaagttgaggaagaacgaattaaacaggtatcattcttaatattatacattagatgagatatcccctcttcgcatttatcagcatgcacttatgcacagaaatgccaagatacagaaactgggttgcatgacgcttttgtttcactagaacagcgcaatacaatgaccccattaaatggcattgatattttaccctttagtataatatgattatcttcttgaatgttgattgcacatactctcttgtcaaatatatcattttttatcttatgacttctcaaatggttgagcaaatcatatttggtgtggtcctttacaggctttgatatctcaatctgaacaagcaatgctttgcaaaagcctggtaatcttttttttatgttgctcaaaagtcctttctattgtcttgatgaatcatgaaatgcaatcatcttccatattatattgtgagattctatctcaaccagactcttctcattgaatttacacttcttgtaggccacattacgttctgaccttccatcctatatggttccttttaagacatcggatcttgtgtttcagaagccaaaggtagcaattgtagcatcatatatttatgaaaacaactaaaccattactaaagtttgtccctctgattcctgcttacactgttattcttgcccgcaatgcttcttcaggatgatggagccaaattcataaaactcttgcgagctttggaagcatatgcagaaggctcgtcagcagacctaatcataagaagagccgcctatctttggaacaaacttaactcatgactatgctgatgtttccagcagtgacaacatacgaacttttcaagcacaaaagttccacctgagaagataggtgccttggtgctatgtttctgtcaaatttggtgcgagcggctcgctgtgctttctggcacaaaaggtggacggtgcatgtttagacaggctgtgcataccatgaaactgataattagttagttttgtagataaaagcacgtcatggctcatgcaatctacagaacatgatattttttacactctaatgaatggtggctgctggctggaaggtggaagaatggcatgtaggtacctgaaagcttaatcattcgattatgtgcaacttcgtagaaatattatctagtgacatgtcactattcatatgcacaatgataccaagttggtcacaaaagtatgtggagtacgtgtcttttcctcttagcaggtgacgggtacctagtacgtatactcccttcgtctcagaaaaaaaggcaaaccctgaattttcgtgtccaactttgactgtccgtctcatatgaaatttttttataattcgtattttcattgttgttagatgataaaacatgattaatattttatgcgtgacttgtctttttaatttttttcataattttttcaaataagacggacggtcaaacgttagacacggcaacccgggtttgtctttttttttggacggagggagtgtacctacgcagccatctacttgcggactaaagtcaccaggcaaagcaacactccaagccaaacaagccgacgcacggcggcgtcagctcgccgcgaaaccgcgcctgcggggatgtagcacgagctggtctgcggcacctgctgcccctgcgtcgtccccggcacgccggccgccgtcacacagtaccccgtcggcgtcatccctctgctcggctgcggcgtgttctgcaaaaaccaaaaaaagacatggagatcagatcagggacgtccattccattcgatccaaagactgcaggcagaatcggtaggcaacgagcatcgatgaaacctgcaccgtaactggagtaacggtggccggagccgccgtgccgggagcggcggcgagcccgatgtcgtagttcgccgtgaggtcagtccggtagaggccgaacgaccgctcggactccggcccacccttgaggtcctcgtcgtagagcgcgaagaggtacgtgtccaccgatttgcctggcgtccgcggcgtgccgacctgcgacttgaggtgcgcgacgaggttgccgttgtacgccctggcgttgtccaccgtggcgccgccctcgtcggcgtcgcccttgtacggccacccggtctcggcgatgacgatgtccacgccgctgtaccccttggcgtccagcgccgcgcggatggcgtccagctgcgcgtcgaacatgttggtgtaggtgagccctgacccggcgtcgacgcgccccgggttcggctggaacaggcagaacgccagcgtctccggccgcgtgtcggaggcgtaggcgaagtacgggtacgggttgatcatgaacggcgcgccgttctgcttcaggaagtccagcaccgggtccaggctcccggcgaggtcggcgtggaacgcgcccgacgacggcgggtccgacgacgagagcaccgccatggaatgcacggtcgagatctgctagtcaaccgcaaactcgttcaagaaaccaccgcgatgcgtacgtagagatgctgtgatgagatacgtgccttggtggttgagccggcggggagcgcggcgaggaggttctgcatggcggggaggagctgcggcgcgagggtgggatcgccggagttgagcagctcgttgccgacggagatggcggagacgggcaccgtggtcgggatgttcgcggcagcccaggccgacgctgccgccggggaggacgcgaggttggggacgtcgccgttcgggacgccgaggaggatggagatgttggagcccgcgagcgcggcgacgaggtccggctggggctcgtagaggcggaccttgccgatggacgtcgacttcagcaggttggccgtcgacgccggcggcgggaggttgtcggctatcgtcccatagttcactccgatgaacgactgcgacgctgcaaatatcaatcaaactcgcatgagaaatccaagtttacaaaatttcagcaaaattcatttcacatacaaattcacatggccaacgctgtcgcaaacttcgtacgcgcagcatctgctaataattacttaattgtcacgttaagcatatggcagtggtgagagcacacgcaaacgtactacctccagagcagtagttggatagcaacaggacgagctgcgttgtacagctttggcctctttggggcagccattatctgtcaaatgctgccgggcgtgaagcgtgatcattgttcctctttgtttggccaatggcgagagctgttgcctgttggtcaagttcgaattattctcccccaaaataaagcctccaactattctagcggccgttaggtgatggatcttgcgcccacgagtgttggctcctatgctttggatatttgatttggtatttgctagattccttgaccaacccttttggtgtactcaatgcgaatcgttggtaaaagtcacctcaccaggccaatgtaaattgagcatggttcatatgcagctagcgcagattacagttcatgccaagttgctctgttctttttttctttttcaaaaaaaaggaagagtcaacttcgggtctctgcaatgtttagctacaaagtcaacagccatagcacaacggcttcttaccatttctaccgtttgagaataaagcgttgaaaaagtctgattaatcctataaagtatggaacaaccgggtaaattatctcccaaaagtatgaaattggttcaaataacctgtagagtggttttggccaccgggaccacgacgaacacacagtgacatgaggatgtaattgattaaatgcatttttactcctaactatagcggcttaggaaagaagtaacgtgatcggagaaagttagtgattgaactattcggctgaaattggttaacgtgtctgtcatgcaaacaataccactcggtcgcatcaccgcctaaaagaacacttacaaaccatcctcacatgtttctttagaaaataaaaaaaacttccaaacaactttgatatgttgtttttttggaacacggtataaacgtaaatattcatacacatgcgtgcacttatctctataaacatatatatatatatatatatatatatatatatatacacacacacacacacacacatacacacacacctaatatcatatctctttaactagcttaaaagtacctcccagaaactatagaatactttatgtggaacgcttttcgtactttaggggcacaataaccgatttcatacgttatgtagactgataagtgctttaggtattaaataaagagttttctctaacaaacaatatatggtgttctgtataattaaccgtcgcttttgaatgcaatcccaaaataattcctctctttatctaggcgttgggaatatgatcaggagtcgtggcagagaaactccatttctctccccactttgcccctcgtgttggcgaaatctcaatttctcggagcaaaaaagtaagatctcatcaaatcctccccacctatttattagaaaaaaaaatgtgccatcaatcgccatcttctttgctcaccattccggaagctagaaaaggttcggtaactcggcacgaatgagtaacctgcatccgtaaaaacgacgcagaatttcgtcctaccacttcgctgaactgactaaagtattctagtgcagtacgctaattcgaggaacaaagaatcacaacgaaagtgaagccattgttccactattccaaaaccgaactaagctaaccagttaataagcatccagcgagcgaaacatgatctgaagatgattcggtgataccatttcatctatctatctaccaacaaaatgcaaaaacgaaatcaaaactttcaccgcgataagaaacaacaaggtagcatgtcaatgatgtacaagaagcaacgaatcactggcacaattcgcaggagacagcttgagtgagaaagaagcgctctagcgcggaaagaacttacttgccaagtggaagaggagcgcttgcagcagcccagaggtgacagcagcatccagccacctcctcgcccccatgccaccactgccagccaagctactagcaacaagaatcctactgcttgatgcaatctcgccgcagcttctcagatgttcgagtccaattatggctactacttgggatcagtgaaatggtcgaagactcaaaggagctcgagtggcaaactggcaatgggagaggcaaagaagaagacaaggaggaaagaggccaggaaggaggaggaggaggcgagtcgtcgatgcagtctttggcccccttgcttgctgcgtaaaataagaggagagaaagcggcggggcgcgaggtgacaccgtggggtcggcagcacaggacagggacgacgacgacgacaagggttgtgtgcgggagaagccgcggtcaccgtcgcctcgcctcctttctcgcggtgcctgcctctgaccgcacgtctacacgcgcggcgcggcccgccaatgcgttttttcccctctcctttggtgcgtcaactcgccgagaaatacagccccggcatataagaggaaaaagcgaaacggtagtatttacaaatgaaaaataatttgtaaataaacttttatatacgtgttcttaacgatctaaaagcaaaggctaaaaaataagcaacaataaaaaaaatcccaaaataaactctaaatttaaagttgaaaatttaaattttagctgataagcacaagcataaagataatggtgataagcaggtgagccgtaagacttgtttagaggagattctgatagctacaatttttttttaaatcatcgcataacataattttctctagaccgtctaaattttcacttagacttttagaatttatagttgtagaaaaaaataaaatagaagatagaagctagagaacccatttttttctcaccagttagtttaatcataagctttaagaataaaaccgcagtgtggatcggcacagcgaatagtggctttgatcagggaagggaacggaggcgatacatcgttctcggttctcgggtgtacttgcttctatctttttcgtgaacgcgtaaaaaatgtgcatgtcaatatatcgtcgcgaggatggcccgtgacgagtatgtggctgtgcggttgtgccgtgagcctgactcgcgagagcagatcagcgtcgtacctggaattttggtttcgggaggtgatgggattttgctgtctgtcaacaatctgtcatggacgttaagcaggattgcatgagcgagcgagtggcgaatatgggcgagtcgtgttgtggcgcggaaacagccacacgggtggttatcgtcgtaattaatgggtatactaatcaccggtgctcatctccaattattaagccgctggcgctcgctgagtgaggtaaagcgattccatatgccataatgccacccggatcgtgatggggatgatggcaaatatgggaagaaaacagcgtttcacctcttgttcatcattgccccggttaattgcagtagtatgcacaagaagctttgacctgtgctgctgacaacctcgtatgagtgcgaatgctctcctcctcgtcggtggttactggcccgttgctctatcacaagttcacaactcacaaattaaacacaccatcgtccacaaggcagagcaaggctaccaggccaccgtgtccacgcgcggctgggtcccctttgtcacggacgcccgcggtacccacggcccacggccacgggggatcggctgcctggccatggtggacttgggcgtcctcgaattcggctgagttaagtggcagtgtctgtgaagagcatctttttcatccttgaaaaagtaacatgaggtaccaatctaatctaaccattgatttagcagggatatgatcagtctaataaaaacagatgtcctctcttcgtcgtccctgcccatccgtcgccgccgtgcatccagcccgccgccgtccccctcgagctagccgccacgccgctgctctcccgacgtttttttctctcgtgaaacagaaaatgacataaattccctcccacccatagtaccacttcaatgagaaggtacggtaccatgaggtacggacgatttctgaccgttggatgatgccagatcaatgatcaagatttggtactccataacctcaataacagtaaaaaacctcttctgtgaaattttcggggacatgggcaattggccaaatggctggctggatgactgaagccggaccgagtaggtctctgtccgttctccgagcctgcgttgacgtgttgcgtggctgtagctgtagtttaggcgatctgtttgctcggattatcgagatggcaaaatgggaaccatggtcaggccagagtcggcgtgtctcgcggcagcatccgaaaatatagagcacttcaagcactactggagaaatgatctttaccaggtcgaggaaaaaccacaattgtcccggttcataaaaaacagggactaaaaataatttttagtccggtttataagttcaatgggaagatttgatctatcaaccgggactaaagatggcaaagatggtgttggacgacacgtggctgcgccatctttagtcccggttggtgttttgtcccagttattttaaccgggagtaaagatggacatctttagttccggattcgccgtcagtttccaaccgacgttaaagatgggttccagcagtgaagcgttaaagatgggttccagcagtgaaggcaaactaggcaaagtgtgtactatggagtgatcacacgcgcaaatagcaagtgtgtggatatgtgattcacgtttatacgtaagtaatttaagcattacgcgctgacatcccatgtgtaggtatgtatatatatactcagggtaggcgacttcagacagaaactgtcaggggcaatgtacaagttgtaaatagacacatgtggttcatgatggctgagggttttgtttcctaaataaaatagggagctgagaactgtttgtatcgggctaataagagcatctccaacagtctctacatctcactcttcaagttaaattttaataattctaataaaaaaacatgctccaacaacctctccaaccggatggctaagccatccgactgaccaaaacccttcctccactagccaaatttagccactctatttggctgaccaatggtgggccccacacatccagtcttctctatccccacacggcaaccaatgaggaggcacaagaggagcatgaggaggaggcatggggaggagctcgagcacggcagccgccggcccccgctcgtcgcgaccgccgacctccgcactcgccgtcgtcatcatgtcgcgcgtgcctatatctcgtcgtcgccgccttccacctctcgcgcacctggatctcgtcggcgccaccttccacctcgccgcgcctggatctcgtcgtcgttaccatacacctcgcgcgtgcccggatatctcgtcgtcatcgcctctcgcccgcccggatcctcgtcgttgttgcctcctgcctcatgcgggcggatccccgtcgccgtcgccccccgcctcacgtgcgctggcgtcctcgcttcagagagggccagtaaggagctcgaggatgggccgatggggttgccctagcgggaaaagaggaagcaaggaagaaaagaggaagaagggcggtggaggctgacatgtgggttccattgtcatagactcaggatgaaaagtacaaatggagagtctattggagcgaggaactagtttgacttgctaaatcagataaagagttggctatatgggtgtttggagagccggattttagtagtctgttggagatgctataaggtcgacaggtcgttcatcaagtcttgcacccaatgttcatgtgaattcagtcaaaaatgtgtactcacaagtcacaacgtgctatcggaaggcattagtgtatcctctgaaactgcgtagtacgtgctctcgtgcaagcaatcatgcatagcatagtgttttcaggtgtaggtgaagtaaaggagtaaaggactcattctcatgctaatacaaagatcgtcagacctctcgaaattagatcacatttatagaaaaaactacaacgacatctacaatctcaaattagtttcatcaaaattcaccataatataaagtatatcttgatggtatattttatttggtattatagatattaattatttttctattaacttgttcaaagttaaagaactttgactaaaaataaaatcaaaacaccttataatacgaaatcaaaggagtatttttcagctacttcaacgtacggattattaacatggatcatttgctccataactctaaagatatgtttccttagaaaccttcttctattgcattgtttagatcatttattttaacctatttttaggtcttttttctcaagacatttgatttcttcctataatcaaatacgcaaaatctatttcgagaggcatctcgatttatacttaacgagcgacgcggacaattgcgtgagaagtactagtagcgttacagacatgcatgcaagtagtttttgctattaggttgtccatattttttttcttatgaaattttctcttaaattacttattcgatctataatccgattacaccgttgtgttcataacaattaaatctttacaacaagatctcacatgattatattttgatgaaaaatcacaaattacttttatgatatgtctaaattacttttagatttcactaagttacttcttagacatacaaaagtaaattcagtaaagcctagaagtaatttacatatattatagaagtaacttagaacaaaacgaatgtaactttggcatgtcatttcaagtaaatccgttgtagagataaaaacatgactctatctagaaattaaattaatcagcacaaattatggaattaactaaaaacaataataaagaaacaataataaaagtaatcacctcagagcattatgaatgtataggaagtattttaatcaaatttaaaagtaacttatatatatgataattaaatatatgataatttgttcaatgaaaaaatgtattaattaaagttactttctttttgttataagttacttttataatatatgtaaattacttttaagctttactgaatttacttttgtatgtctaagaagtaacttagcgaaatctaaaagtaatttagacatatcataaaagtaatttgtgatttttcatcaaaatataatcatgtgagatcttgttgtaaagatttaattgttacgaacacaacggtgtaatcggatcgtagatcggatgagtagtttaagagaaaattgtatttgaaatataggtggatggtgtctcttatagatggagtggtagacaaaccagctaccactagctgtgtagtcacgtctaatcaaatagataatccgccaaaataatgtagtagtaatcaaatagaccaagatcgtatatctcctattcatggcccgagcttgtgagttgtgactacgggtatgttcactttgatatcattttcaaccatattttttttggcaaagttaccaaaaaaaatatctacgtttagtttgttaccaaatttggtcaatacataagaaatcctgccaaattttggtaatattgtcatcttaccaaaattttggcattgccagaactttgtaaggtttattttggctacaatctgaacgggctctaca

SEQ ID NO: 10174 - DNA, 7271 bp, Oryza sativa
  unsure (1)..(7271): unsure at all n locations
ctcgataatttgccaatccttattagagagcttcttgtggggcataggaattcctaggtatctaaatgggtaagtcccagatctacacccaaaaagcatgacatactcattctctgcaaattttgacttgccataacaaaacaattcacttttatgaaaattgatctttaaacctgcaagtttctcaaatgtactaagtacaagtttgagatttttcacttcatcaagatcatgttccataaagagaattgtgtcatcagcatattgcaaaattgagaggccgttgtcaactagatgaggtatgactccttgaaatctcccctgatccttagccctttgtattaagatagatagcatatctgccactaaattaaatagaattggtgataggggatctccttgtctcaagcctttttttgtttggaaaaagttcccaatgtgatcattgaccttaacagcaacacttcctcctctacaatttgttcaatccagttacaccatgtttgcgagaatcctttcatcctcaaggtttgttgtaaaaaaagtccagtctactttatcatatgctttctcaaagtccaattttagaatgactccactcctcttttttctatgcatctcatggattgtttcatgtaaaattactaccccttccattatatttctccctggaaggaaggccgtctgtgaaggtctaatgactttctgagctactagagctattcgattagtcattacctttgtaaagattttgaagctaacattcaacagacatataggtctgtattgctgaatttgtctagcttccttctgttttggtaacaaagtaatgataccaaaattcaagctgtggagcggcaattttccttcgtgaaattctataaaaatagccatgagatcttctttaattacctcccagaacacttgataaaactctgcagggaaaccatcaggtcccggggctttattgtgttccatttggataatagcttgttttacttcctcttcggtaaatattttagttagcatttcattctctaaatctgatacctgcgcaatgtcctctttctgtgattccaccatggaaaaattattttcctccggtggtccaaaaagattcttgtagtatttagtgatgtacttttttaaattttcatcacctttaattacaccctcctcttgttctaactgaaaaatttagtcttcctatgcttgccatttgcaatcatatgatagtattttgtattccggtccctttcaattaaatgttttgtttttgacctttggtaccatttaatttcctcctcccttaacagatgagctagtctatttttcaagtagttcttgagatctaactcatgcctaatcaatatctgcacctctgcttttttatctaactcatctgcctttgcacttaattcaaccttctcttttctatatgttccacttgtgctttttgcccaacctctcaagaactgtcttaatcaacggatcttattttgccatctttccatcatcgtagaacccttgttttcttttctccaaacttccgttactaactcatgaaagccttcccttaacaaccatccaagctcaaacctgaacaaaggttgtttggtagcacgagttttggctcccgtatcaagtagcaaaggtgtatgatctgaaaggtctctattcagagccctaactgtagctagcgggtacttttcttcccaatcggtactcaaaagcaccctatccaatttttcaaaagttggtacttgcaaagagttagcccaagtgaattttcgtcctgatagctctagctctctcaagtctaggctgtctataacagcattaaacaagaaaggccatttgtcattgtacctatcgttattcttctcactagggcttcttataatattgaaatccccccaatcaacatgggcaaagattctttactacaagagtttaccaattcaacaaggaaagcctccttatactcctcatgggcagccccatagactgctacaaggatccattggaagccatctaccttgtttcgcacgtgaaacttgacataaaaatctccttcgtctatgctagacaaattgaacacctccaagtttactcccaggaggatacctcccgatctccctctcggcctagtccaatgccataagaaatctcttcctccgcaaatatttttaaggcaagaattagagaagtcatccttgcctgtctccaaaagagctatgaagtctagcttctactaaactaaacatgacagcccattttagggttctcgttctcatcaacaccccacttcacggcttacctctttctctcagcaaacaaggaactaaataactaaaattccagaacatcgcccaaaacaacagctgcttggtgcaccgcccccaactccgctgcaaacttcctcgagttgccaaacaagccgcaccccgacaacgaacgcttctgcagatcaacggcttagccgtgcacagcctcgagtatatagcacgcgattggttccggcgtgcccacctcattgggatatgaggagtaggggtgggaggcgtggccgcgtggcgtgaggcctcgagggccttcctccaggtcaggctgagcggcggcgtcgcggccgatccgctccgagacgtggagccccgtggaggccacatcggggccaatcgcctcgtcctccgtccaagccatcgccggagcaatgcgccttttggggggaggaggcgcggcatggaaaaccctagagcgcggtgagggggggaagtatgaggaacggcgggatgggaggttcggttggggtttttcaggttttgctgcggcgcgcgctggggaaatttccctttgccggttaaattaccgctagcaccgcggtggaaaaatctccccgcatgaaaactaaaatacacatgactttgctagtttaactaaggatgagtaaaaaatttaaaagacatcatgttttcagatcaaatttatataaagtcaaacatttgatatttaaccatatattatgattttaaagttttataaaacctcactcttattcaatttaagcgtgaatttatttaaaaatatatacatatagaatatatggaatttttaattattaagttaaggttgatacttaattctttcttactattttaaaatattttttatgttatgctgaaatttatcatgatatcaatagagtagagattttatgaaacattgagacacatgtgtcagtgtcacatgtcataataccggtgtttttttttttgcaattttgaccattaaacatgatgttttccagaaattattcttaatttattgaagaagtccaatttacttttcaaactatttcattggatcacttaatcctccgtaaactattcttagcttagtttacccctaaactattaaaaattcgtaaactattcttagcttagtttacccctaaactattaaaaatggttcactctactcataatattttttttctcttttaagttgcattgtaagctgactttttttaaacctcacatggcaccatttttccaaaaaaaaaatcatgattgtttgcttgaagttttttattcatgtttaaatgtcttattgtttccaaactttgtacaattctataaatggtaaaaaaaatgttgagacgtaagttacagtgcctctatcatcctacccaatttccagtgcaaaatatgaataatatagagagagaaatgaaagagagatattgttagagagcaaagaaaaatagttcaagggtaaagtgagacaaaaaaaatagtttaagagttaactgctccaatgaaatagtccaagagagtaaaatatattttcccctggtttatttaacagtagggacggaatcttgtcccgacataaacaaggcgtcattccctggcgaagagtagttaaggcaactcttagtggagaagtaactcgagttggccggtgaccaggcaaggtgcttcattgcctcgtcatcctaatgaagtggtgctagatcattggtcttcatctttacgtcatttttgaaactcatgagcagttatacgctcgagtcaacttgcgtcatcatcggttggtcatcatcggcggcagaaggggcgcgatgctacttcttgtggcaagtttgagcatcctggtaggtgacatcgaagattggccagcgtcggagcgctacacctacttgatggttgggcattgccgatgcaaggtggcagctctgcttccgcttggagtctaggcgaggtcgaagctagatgtctttagcatccgctttgtaggtcatcttgatggcgacaatggaacttgcctttgttgtccatggtgttagcaggaggtcgctgtccatgcgaaccgcctgtctaacccctccccgaagtcgactgcctctacttccatcgttgtcctctagtggaatcaaaatgatcacggagccctcgatgaaatgtgccaacaaggtgttgatgaatttggtaccccacaggccacaggtatcgagcctagtatctacttggtacccacccgacaccgtactattttggatcaagagcatgtacaatagtaatcctctaatcagtgatatatcgtataatataaaagaaatgataagttatactaaccaaatgatgaatttacttttccaagtacatgttgtgttgagaaaaaaaaagcttgacgtggtaaattctttgactatctatatatgtttatggtgttatatttctcattaaaaacagttaatttatggtgttatattttgactaacatatgtccacgtttatatcaagaagttgttttttccttgggacggagggagtacgttgtaacttacaaatcctgcatggcactcctataaatttccaaacttacacgatacttctatagaactctctccgtactcgtaaagaaaatcgttttggacagcgacacaactttaacttcttatttctataaaaatatttattgaaaagtgatatatgtatacttttataaaagtatttttcaagacaaatctattcatataatttttacattttcaaactcaacaatgtgagagttattcatgatttatattcccaaggtttgacttaaacaatatcctaaacgacttcctttacgagtatggagggagtatacatgacatactaccttcatttttcattctcaaaaggatgacgtcctataatacgtgcaagaacattttctagaaaaaaagtattatttactccatgcttaaaaaatacattttctagagaaaacgttcttccaccatattatgtagaccacttacttggaactatgccaagtctatttttcaaaatatattgacgtaagtatattatacaagacaataatccactcaaaaatctgataaaccaaataggccccatgattgagataccacgctctaatatgccatctctctgagtaaaacaaaatggccaatttgttacggtaccatcgcaaaaatcaagttgttggaaaataccatcgtacgtgttgtttgacacgtggatctaggctccacacatcattttcacatatgaaattattttgtaactcatgtatctttgtaatggtattttcaaactatccaaaacaaaacaattaaagtagtgtctctagcgcgcgctctctctctctctctatataggatactcatatgggactccatggtgcccgggctccaaggtataaaacacacaaattctctcaaatttttaaaaattttcaaattgtgacctaggtatatgaatttgattcatacaaatacctaacaacaaaacaactcaaactcaactttatttcacaattcattattacatacctaacgaattatatgtttggatgttatatacctagaatcaaaatctaaaaaaaaagttcaaactcagttcaaacttgtttgaacttgttagtaaagaagttaatgttcatatctaaacatttaaaaaaatttcatactcattcaaattaggtatatacttaatttgaatcttgaagcccatactccatgtagcactagttaatttacccctatatatatatacacacacatatacatacacacacatttctacttatgtcgaccatcgagtgataataacgtcagtaatttagtttacttataaaaatactttagctcagtgaaactaccaaatatcagtatcaccacttaaaattactcagcatatatcacccttcatcgaaggaccctcgaacagtcagaactcaggacagtcactcacacagtcacactcctaacaacgaggactaccagcctatgacgaacaaactaggaacaaaaaggccggaagataacacgagcagccgggcagtggctccttttccgtggaaagagaaacctggacacgactacagggaccaccccgcctcatatgcacccagtccacgcaccacctttcccgtgtcctttctcacccctcccaccagcgcggtcctcctggaccgagctcacgcacccgtgcccctcctggctcaatccattagctgtagcacgacgctcagtccaccgcgccaaacctgcctagaccgagcctcctgcaccgcactctccgtccacggggcgcgtccccacccgccagcctcaccgcccctggacccgcacccacgggtaaacacgcgccgttaatggccgccgcaacggtaaacgttaccccgtgtgggaaggggaagagagcagccgcgcccggatccccacctcctcctccccctcctcctccagatcacaccaccgtcgtctccaacctcctatccattgagataggcttcgtcagggtgccccgcgagcgagcggaggtgggcttaggtctttagggtttggcggggcgctccccctcgtggtctctcgtcgtcgccttcgcctgttcggggggctagggntgcgtcgccggtggggggngggggtgcgggtgcggggggcgggcggtcgatgcggcgatcgcgggcgatcgggagggtgtagcggcggcaggggaggggggatctccttggcggtttgttcggagatggccgccgacgcgctctccatcatcccgggcgccgtgctgcgcaacctctccgacaagctctacgagaagcggaagaacgccgcgctcgaggtgagggatttcggctcgtcatagggggtctggttttggaacaatcgacgatggatttgagctggaattgtttttgttcgtggtgggctgtttgtgtatagattgaggggatcgtacagggctgcaggaatt

SEQ ID NO: 10175 - DNA, 5097 bp, Oryza sativa
atggtaccgacgagaccgtagtcgagttggttcaactagatctcccagcgacttggctcctgtaggctccgacttcgtagctgtgatggatgtattggcggtgagattcgatgccttatgtcctgcccagggggtcccttttataccgcgggtcagttgatctccaagtaggactcggagatatcggacccctcacgatatggtaacgacccagtctcgtccgagtaggactcctcccatatgtggattctgtttctatcacgtgatagatttccttaacgtgtacaggaactatccgtatacgcgcgggtataccatatcagtatacaacgtatatccaaggatagagggtataccttatccgtaacactgacataatgtactcacaatgtttcactatgtatagattcaatgttgcagtgaattgaaacattcttttgcaacaaaatcacccacatattatggaaaccctctattaaggaaattcgttttattttttttctaccaaaaatgtttcacctagtgtattcgtgatgtttcactatgtatggattaaatgttgcagtgaattgaaacattatttcgctatttgctgaaacattgtttttatataaggtgacacccgatcttaaacgattgaaacattttcgatctacttagtgaaaaaattccaatacacttggtacaacagcgtgcaacatttaaaaatagttcaataataagctaattttttttcatcagaatatatccatgtgtggtctaattttaacgatttaattgcaacaaatttaatggtacaatcgaatcatgatttggataaataatttaaaagaaaaaaaagtttaaagtggttttgcatgcatgcatgctgacgtcagctgacgtgggcgcctgatttttttacacccggatcaggcgcccgacacctagtcccttcctaatttgatatatattgtacatattactattttataaactttattcaatttaagaaatttgacttatgataaaaaccagaaatatcttattttattggaggagtactacatttgtcacgtgaaatcaaaggctctgattctttaattttatttttgttaagtagtcgtgaggcttcggtatattgggcttctgtatcttccagttgaattaattaatggttggttaattcagtactccacaaagacagcatatatagctatacgtatatagaccagctgttcttcagtcctcatctagaattttctgccatgcatatatatggaacttaatcatccgacgtgcgtgaagtcagtcatctatataataatctacagtagaaacgttgccgccgcgcgccgccgcttggcagccggcgagtacgtcaccaagtcatcatcaccaaccaccgaagcgtgacgccgcgcctgtccggcgtaagatacgtgcaggtacgccagtagtgactgatatggtttcaactttagtacaagcttagatcggtagtacgtccaggactgaacggtatctctcacctctcacccggatcggacttttcccggctgaccagtgaccagaaatgtcaactaaactaatcgcatgcagaaaaggagggttgaagtgagcagatttactacgatagcatggtaatttaattcgtactatcttctattttgtccatttcgaaacataacgtattgtatatgcaaaggcgttctaatttgaaaacattctcaccgcgtccccactaatgcaccctccatactatacatagtagctcagatgtgtgtttgaacagttcaattcaaactcatcacgcatctttgttaactggtgtcacgccccgaactagtaccgaccggaactagcccgtgacgctccaaattaacctgttgatcgataccagtcccaggaaacagtgctggtatcacagggagacagaatatcacagcaacaacggtctctttattatagagtacggatacagtcatgttgggctacggacagatcccgagctcacaactgcattacaaaagggaaacggaagcaggacttggaccaaacaacacaggcgcgacttgggaactaggccgaaaccctaaaactcatcgtagccggcttgctcctgaaagaactcctcatcagcaggatccgcttcatcttcttcagcaactgggggggatttatttatatagagcaagggtgagtacgggagtactcagcaagccaagggaaaatagatgtttaatgcaggcttcaaggaaaggctgttgtttttgcaattgattttagttgaacacttttctaaaaacaactaagtgagtgcttctcaaacgacacggctgagacggtgcgtctcgtccggtcggagtatgtgcaatgtatcagtctttaaaatttaaaacaaggttggcacccggccaacagcttttcaaacggacacccgggccaacaactttcaaacggccacccgggcctagctgatcccatcagccgcagatttttcaaacagcgaacccctttccataacagcaatttcacaagcagtagtcaaataaaactacgctaggaatcacctcacatccgcccatgaccgtgggcacgactgttcgaacagtttgttaacctctgcagagggggtacactttacccacacgacattactaacccggatcacccagcccgtggggatcagccacgtcgggagacctccaagctttcatgacaaggcatttcgaaagccgacacaggtttaccatatgccgacgagaggggtcccagaccaacaacaggttaggtcccagaccatactgtgccaggaagcccaggggtcctccccgacaccaccccggtgaatccacatgtctctcgacatcaaggctcccctgataagctagttactcagccaggggtgtcccattccacccatgtggtcgtacttgtcttatgtttggatgaaattccaaggaatcggtccttaagtgcgagagcgggaaaaaccatacacccggtacgttccccggtccgcggttttggaaattcatttagttcgcaagcgccgacccaggtgtcgggttttccaagtcttttgtaaaactccagttttacccaagttgttactcagattttaagtttgaaggcgaccgtcgatactcgcacagagtgcacgaatatcgaggcgcaactggatggttacaaggggacatggtatagcaattaacaatggaaggatcaaatgcaacaagttaggtaggtccgccaatctgccttgcagacgggacaacatattaagtgcgatcctattaatgcataatattttgcaagcaacataattaaatttcaagtataggctcaagatgttcaaaggtggcttgccttgctaaaggtctggagcttgatcctcgaaatcctcgcactgcgggtcttcgggctccggaactacacgcgaaacgggacaactcaacaaacggcgaaaatgaagccctaataatgacctcaaagcgtgccattagatagatctcgagatttgagaaattttggaagttgaacggagtcaaacggatttatggttgggaaggtattgaatttctaagattattggatttttggtctaaaggaaaaggatttaattaaatcctttttggaaaagaaaagaaaagagggagggaaaatagacttttctcgggcggctagggcgcggcccaagagaattggggcggtccggccgagctaaatgggccggccagcccaagacggtcgcgcgcgtgggagggaggagagagagccggtggaccgggctcaccgcgcgcggtcccgggtgggacccgcttgtcagcggctcggctcaccgtgcggagggagtacgcggcgcacgcgcgcgggcgggggagggacgcggtgcacgcgcatggtctgcggaggaacggatgcggcgggcccacgcgcagcctcacggctcgcggtggaacgcgcgcacgggaggggctgaccggggtcggcccgtcccaacctcggctgagctggcgccgacgtggcgcctacgtggctgccacgtgggctggcgagaggtagacgacgacgccggccggaacggacggcggacaacagcggcgagcggcggagcgaaccatggcgataccggcgaaaacgagcacaccgggtggttgcacgagacgaggggagacgagccaacggctcggattcgccggaggaagcttgacggcggcaaatcgcggcggcggcaaccggcggtgggaaaaggggaaaacggcgacgaggtcacgaggggccgattcccggcggtgagagcatctacgcggccacgggaatccgatggtagcgtcggattgggcggagctacgccgagcgaggctggcgacgagcgggtgctacgaagctcgagcggcgacggcggcgagcacacagcgagcgatggcaacggtcggggcggcgccggctagctacggggaggctactcgtgctaccaccgaaaactaaggggaggagatggagcgaagaggaagaacggagggaggcatcaccgaggtgaggaggggcgctgtgacgagaggccgacggcgcgggagtatctctccggcctcgggccggggaggaggaaggagagggcgcggccgaagtccccttccgcgtccttgctcgtgccggctcctccgacacgcgcaacgacgaacggcgacggcgaaacagaggggcggcaatggcgcggaggtgaatgggagaggaaaggaaaaagggggggagctcgggtttataggatggcaatgttggtttgggaaccgacttagggcggtcaaaggagagggctagcgctcggcggtcgcggccaaagcggcgacagggagaagggaggaggatgaccccggcgggagggaaaaaggggaaaagagggagagaaaagggggcttgtccccttgcctcttcgggaaaagaaggagggagcgggggcgtcgcggcagagggaggagggaggctctgcctccgtcccttggaggctagcgcgggagtggcggggccgaggcgatgacgacggcaatgacggtggggcggtttggagcggtgcgacgtcacgggcgacaggcgcgggctggcgcggcagagggt

SEQ ID NO: 10176 - DNA, 5203 bp, Oryza sativa
agctaagtgcctgagccgtgaggaggaggcggctgctggtgagacctccggcgagggccggggaagaggacccgctcggcgagaggaggatgcagccactggcgacgagccccaacacagtgagatcccgcgacgtcgacgcagcagtgcgtcatggctgagctggtggcaaggagacatcaatgaaaagaggaggggcggcggtggccgaagccaggagagggagggacggcggtggccggagctaggggagggaggggcagcggcggtggtagccgaagccgagaaagggagcggaggcagtggccggagctaggggagggaggtggtagtggtcgttggcgtcgggtaggtgtccggtttctgatacctagtagaaatcacctgatatttgataggtatcgcatgatacctcataagtatcatttgatacctcgcaagtatcacattctagtggtaagaatcgtatgatacctgacaggtatcatctaatacttcgcaagtatcacatgatacatgataggaatcgcatgataccttataagtatcacatgataccgagtaagtattaagacatgatatgtcagaggtatcaggatctaatacctaaccggtatcatcccgttccaacgggtttccgttgtatagcagtcggggaatgctacgtagtactactactccactatcttaccacaacaacttctggactctgaacagtttgcgcggccaaaaaaagaagttctaaacagttccggtgacacaaacatgttcacgtatttgaagcgtcgatgagagctcgccgattcatgtttgttagctcctttttaaaatctctttcttcctttttaaatttttttaactataattactattaagtatggtcaatattttaaatttcaaaaatagactttttttaaagttggtttcaaatggctaaaaagattcagatttgaaaataattttttgagagagtttatttttaaaattaaaaagattcagatttgaaaatatttttttgtgagagtttatttttttaattaaaaactaaaaagggtaaaacaaaataaaacttctcgtcaaggctcaagccccctgttccaacttccgccggaatcaaatccatccgaacgcgcgtccgcgacggcacatctcagggtccgccccaccggccgcaccagcaattctgcaaccgacccgaccgaatccatcctccccgccagccatggctcccctgccaccgccgcgtccgcctcaccggagccaccggcgagtccccgccgcctgctgcctcttcctactcctcctcgctctcgttctcctcccctccgccgccgccaagtcatcccgccgccccatcaccgtacgtctccctacctaatccctgcctttccttggcggcccctgtccgtctcaccgttcttgtgctgcgaatcccgtggtccaggacaacgagatccgggagaagaagagcgcctgctacaccgacgtcgagaagtacgtgcgccggaattacgcttccccccgtctgtgttcggtgggggtggttttgatggggaagtttctaattgtttctctctctctctctctctctctctcggtgggacagtggattgtggggatgggcgtgcaagtcctcggcgacggagaaggagaactgcgtgctgcggtgcctctcgccggagtgctacgatctcatatacggcggcgacccggtgagtggcggcgtgagagtgagatgtgatgtttcagaggagttttttttctaaaaaaaaaatcaggattcctttgaattttattttgggtgttttgtgttgtggcagcttgaggaaggggagctggactacatccgtggccacgagtacaagtactgcatgcacaagtaagaaacagagatatatttgcaatctgttgttaagtttaggtttttggatgttgaattgggtctaccctgagtccaacttccatgggtttgccgagttagcacatgtgggttactgtagcacttatagctaatcatggactaattagactcaaaagattcgtctcgctatttcccccctaactgtgcaactagtttttttaatctatatttaatgctccatgcatgtgtccaaagattcgatgtgatgtttttgggaaaaaaaatgggaactaaactaggcctgaatatgattgaacgaacacacccatctgctcaaccttgttacaacatgctttctgtgagctataggagaaggggtcaatagttactgaataactgaatatagcaatcacagcaacattctaacaatactacttctaacaaacaaaatgattatgtttgttctacccaagtgttccccgacatattcctcaacctccacaaactccaatagagcaaaggttatgttctccacccagttatcgcttggattatgcagtctagatattgagggccaaccaccaattttggcacatccaaatgttcgatagtctgactgatcatccaccattatattttcagtccattggaacttttttttttgttatcatatactgtcatttatcagttccaccttgttactgaagagggagaatttcactttagtttgcacgtgtaaaacgaatgatatgcttcagtcctcccatgattgattagcttgctaaacataaccaaaatagcctgactaggaagagcattttgttgttttccttttctgattcagatatttctacttgaaagatcataaaacattgaattatcagcaaatgtcctgagaaaataaatctgctactccagatattattgcagttaacgttccaagagtaattgactcaaatttagatactgctattgtgccacattttgatcactgtgaatctgcaatcctgttttatgaaatttacttacgactagctgaagtgttatcttcaggtaaataaaaatacagaatacttaactaaaggaaaatcaagctgttggtgttattacaagaataattctctaatatgaggatgttttgcaaaagacattgacattagatttcatgcatttctgttatgtatatacacgctccaattttgaattgcacttagaaaattatacatctaaattggaatttgtatcaccattgcatgattactgttagacctctacccatcaagttattctgctgtttttctccttaaccgtgatgtctttcgtacaacttgtccaggtcttcccttggtgaaagcttggatggtgtcaagggttccttcagctattcatgaagtgcaaggaagtaggaagagtgttctccgagccccatgaattataatacatctgaacctacggtgtgtctttctgttccactagtcaaacaagcatacatgtatgaattctgttagtcattgtctcgttgaatccaacatatatcttcgctattcaactggactaataataaggcgagcttaagcaatattttgagcataataaattcagatttttttcacatatgagacaaatcagtttgcaacaatgttgcaaggtcttctattgcatatactaaagttttgcactactcatatcagcacaactaaccatcgctgcaatattgatacaaaaatataatcagcaacttagctcaaattatgttgattttaatgtgctctcagattatgggctgtcaacttaatggcctgctcgccacaagaggtaaagttctaaaccgtaattatgtgtggcaaatataaggtctagactaggttccaaacatatccatttcaatcaagccttaggacatattagatatggtctcaaagactaaactactgcattatactgatcagttattatgattaacaatcaaccattactaaacaacaagaacgatgaacgaacaatactgctagacaaaacaggataattgtacaatgaaaagaataacggcagtacatcaaatgttgatcacatattaaccttatgaaagcatatactctaggtggatttgccatgggggcagtgggggctcgagcccccactaccggcgctgagactatgggggccccccttaatattttctgccatacatatatacatacatgggaagggggtatggagctttgtccagtttgtttagcctcccctggtatttcttcttggatccacgatatactcacaggattaaaatgaattataacctagtccttatgcttgcataagattaaaatgtgatcaacttttgatttacttttattgttccctgttttgtctagctattttagtttttgttacttggtactggcacacataatcatggattagggcttgcctcttgggggtgagaaggtcattaaattggcagcccatcatctgagagcatgttaaaatcgacataatttgagctaagttgttgattatgttttcacatatttattgctgcaacagttagttgcattgtgtatgatatgggtagtgcaaaactttagtttgtgcaatagaagtacttgtactatcattgtagcaaattgattcgacttatatgtgaataaatttgaatttactatgcttaaaatattgcttaatctcgtgtttctttcaacattataaacatccaacatgatgaagaaataaagtaaatcaataagcaaacaaggtaaacacgtgcgaactccatactggagtgatggccgagaggcacaaaaccatcagtccatcacccacccctgcaacgaggcacgggcattccgcacacaaccatgcccgcccatgcactggtcagcaatgttggaggggtggaagacgttggccagcgacgttggcctgcggtctgcggaggagcagctggggagttggggcttcgagaggatgggagttgaggagcagcttgcggacttggggctttgagaggatgggagttaaggagcagctggggagttgccacgagtgataaagctgacactgcgacctctcaagccgatttattttggattcaacaagcacatatacatagaacaccagatataaaggtgagttgaaaaaagtttgagttagggagtacagaaatgacatatacatatgaacacaagagataaaagtgagttgaaatattttgaaatagggagtacagaaattagactgggaaaatggaagcagggaaagttagagagggggattacatttgggaggaaggaggagaagcagggacaaagcaattctcgaggaagacgatgactggttcgt

SEQ ID NO: 10177 - DNA, 7341 bp, Oryza sativa
cgtcgccggggaggatggtgcgtggatccatcgttgccggggaggaaggcgcgtggatccgtcgtcaccggggaggattccacgtggatccatcgtcgctgccgccccccgtgccgttgccgtcctccccgcctcgcaccgtcgccgatctccccgcctcacgtcgtcgtcgtcacgacctcctccgcctcgcaccgtcgccggccggaagcagcagatccggtgccatcgttgccgccgggaggaaggcgcgtggatccgtcgtcaccggggaggacggcaaccggcggtctctctctctctcctgcatctctctctccggcgggcggcgagggtagaaggggaaaaacagggggagagagccatgtccacgggctcctccctaggcacaggggtcgcggccctctgctaggagacagctccagccgaaaaagtggacgccgtgagtagggatactccagggcacccattgctgatgctctaaagctcaactcccaaagaaaaacttgcttacaaatcatggcagtgacaccgtcggtactctgtccaagaccgttagaaaccgttaatgaaggatttattgtactactactccgtagtattctactactactgtatcgccagcgtttagatgaagattcaagtaatgtaggagtacactggaaagaatcgtactcgtgtagcttcatcggggaactggccgataaatgctcgcgaaggggataacatgccgtggtggaccggcgactagtggatatgcaagcaaattccgtgtttagttaaggtggtgtttggatacagtgacttaactttagtccctctatttagacactaatttagagtattaaatatagactacttataaaactaattacataaatgaaagctaattcacgtgacaaattttttaagcctaattaatccataattagagaatgtttactgtagcatcacataggctaatcatgtattaattaggctcaatagattcgtatcgcgaattagtccaagattatggataggttttattaatagtctacgtttaatatttataattaatttccaaacatccgatgtgatagggacttaaaagttttagtcccatctaaacagggtctaagtctcaacttctaacttttcatcacatctaaaatttttctacacacataaactcccaacttttttttccaaactatcaactttcctcaaacttttaacttttttttaggaactaaacacaatcttaagctggaattcactctgggtgaactgatgaatggacaggctcaggtactagtactggaggttaagaatatcgaattccgtggtgaaacaaagactttgctcatgattttcaaaaatcaaattatggactcctcctagtttcttttgtcctgatggtcccacatccagccttacttaacctttaaagacagaggcacctgctgccaagctgccttttgcacctgcaggagctttggatataaaaaaaaaggagcaaaaggagagaattctccaactaggctccagtaagtgccacctagtaatccatcattaaagcaatcaagcctcctcctctccctaatcccatttcacaccctcaataacaccacatccagctgcttaagctaacaaatcttccattataattcaagattcccatcacctgcccagtccatttctcctctactactagtaatactcttctctcttctcacagggagtgtgtgtgcctccatgacagtgctcgctctccctgagccgagagagtaaaggctctctccttcacacacctaccgcctactctcccactcttcttcccaccccactcgtgtgcgcgccactgccgccggcgatggcgccaatgccggcgccggccgtggctctggcggttctggtgctcctctccgccgttccggggtacttctccgacgacctcaacaccgacgcgcaggcgttgcaggcgctgcggtcggcggtggggaagtcggcgctgccgtcgtggaacagcagcacgccgacgtgcaattggcagggggtgacgtgcgagagcggccgcgtcaccgagctccgcctccccggcgccggcctcatgggcaccctcccgtcgaacgtgctcggcaacctctccgcgctccgcacgctctccctccgctacaacgcgctcacgggccccatccccgacgacctctcccgcctgcccgagctccgggccatctacttccagcacaacagcttctccggcgaggtcccggcgtcggtgttcaccctcaagaacctcgtgaggctggacctcgctgggaacaagttctccggcgagatctcgccggacttcaacaagctgaaccgcctcggcacgctgttcctcgacggcaacagcttcaccggcgagatccccaagctggacctgccgacattgagccagttcaacgtgtcgtacaacaagctcaacgggtccatccctaggtcgctccggaagatgcccaaggactcgttcttgggcactgggctgtgcggtggcccgctcggcctgtgccccggcgagaccgcgctcacgccggccggatctccggaggttcaacctgctggtggaggcgcggcagacgccggcggcgcaagcagcggcacgaagaagaagctctccggtggcgccatcgccggcattgccatcgggtgtgtgttcggcgtgctgctcttgctggccctgatcttcctcctctgccggaagaagtctagctcatccacgccagcgacagcggtggagaagggtcgtgacctccagatggctccgatggacatggaaccaaagggacagaacggctcagcagccggcaacggcgcccacgtcggagcagccgcggcagcgccagccgccgccacctccgccgccgtcgcggcggcggcagcagcagcgaagaccggcggcgcgacgggcgggtccaagaagctcatcttcttcggccccatggcggcggccccgccgttcgacctggaggacctgctccgcgcgtcggcggaggtgctgggcaagggcgcgttcgggacggcgtacaaggcggtgatggagagcggctccgccgtggccgtgaagcgcctcaaggacgtggaccttccggagccggagttccgggagcgcatcgccgccatcggcgccgtgcagcacgagcttgtcgtcccactccgcgcctactacttcagcaaggacgagaagctcctcgtctacgactacatgtccatgggcagcctctccgccctcctccacggtaaaaaaaattcccccatcctttttttacgcttctgtcggcgaaccgaatccacactatcaaaccatgcgtttttttgagcgatctcgccgttacaccctggcgatattcctccggtctccagtttccaccggtggccgcagtggcgcaccgcgagagtcgtcgcctcgttgggctctcgcgtaaggtgtcgcgtccctctcgtgtgtgcatctcgttttcgtggcgtctgtctcgtcggggtcgcggctcgcgactgtggctgctccgcctcggcaccaatcaatggtggtctcacctactccgatccagtagtgatcctccggtttttcttctcatggtgtggccgtgtgtcgccgagccaagctgagctggttcgacggggcgctgccaaaagccaagtgtacttcgtcctatgggtgagccgcgattagttagtttaccagcaaacaaacactgcttcagtgtttgccagaggggtgagcgtgagatctaatcttagtttaagcccacaacgtgacagccatgactggccccccggcacgtctcggcattcgaactcgcagttgaaacaggtatagcaacttgcggctgttcatttgaaatctctgaactggtgccagtaaagtaagcagagtgccagagtttagtgtaggagggagttgtggtagattggtggtaaatttgggggcaagtggcgcatgtgagccggtgccccgggttgcagtccgggtagggtggtttgatggaccatgtgacgtttggttggcgccactgttcctcgcgattccccttttgcgcgccaataatttagcctcctcctctcctctcctctcctctcctctatctcgcgtacagatttgaagaattattcattcccggacagcgtagacagatcatagatgtacacgcgcactgttgcacacacacttgagacgtgaagctgaagctaccgcgctgtggtcgcgtgcaccgtgcagtgaacattcttaattgtccgccgtcgtgaaaacggagtaaaattcatggggaattcgctgtggatgacgcggtttttttctggtgtatctcatgggggttgcagggaaccgtgcttccggcaggacgccgctggactgggagacgaggtcggcgatcgcgctggcggcggcgcgcggcgtggcgcacatccactcgacggggccgacggcgtcgcacggcaacatcaagtcgtccaacgtgctgctcaccaagaactacgaggcgcgggtgtcggaccacggcctccccacgctggtcggcccgtcattctcgccgacgagggtgtccggctaccgtgccccggaggtgaccgacattcgccgggtctcgcagaaggccgacgtgtacagcttcggcgtgctgctcctcgagctgctcaccggcaaggcgccgacgcacgccgtcgtcaacgaggagggactcgacctgccgcgctgggtgcagtccgtcgtccgggaggagtggaccgccgaggtgttcgaccaggagctcctcaggtaccagaacgtcgaggaggagatggtgcagctcctccagctcgccatcgactgctcggcgcagcaccccgacaggcggccgtccatgtccgaggtggccgcgaggatcgacgagatccgccgctccagcctcggcgaccgtccggccaccgacagcgccggcgagggcgaggagccttcactataaccgaccagccgacattgccgtctggatcaccgtacatcgatctcagcctcagcgaacggaaattaagttggagaattgcttagttctttgcatggatcttgctcccccaggctacttttggttcatcagcaacttgtgcatgtttttttcattactttttctttcttcttcctttcttttttttcccttcttttttttgggcctttctctcacgggctttgattctattctatagcacatgtcactgtactctttgattcttggaaaggaacacttgataatgcgttgtatctatgacgaataccatcaccagctgtatggtttgctatttaaaatacgaaatgatttcatttcagctgcaggtagctaggctttcgttgccatgctttgcttcccgtctcttcttatcctggttgttagggggaggtaatggttgttggggtggctgcttccgacagagtaattaaccatcttttggttggcgaaattgccatctgatagctctctgcttgcaaatggcgtttagctagcttgctggtttagtaggttggaaaaaagattgtgtgttctttatctaggagtgatgcccaagttaacacgacgacagaaagagacccatgctcatgcaatcctgtgtttgtacgcagtttacatgacagtgacaagttttttttgtttttaaattttgagcctccactcaacggtgcagcagccccgcagtgccaccagatgcaagattagtttagcttttgcaaatgcaaatgatactcaaaatgtagagccgaatgttagcactaatgtggcacaataaattagtacgtggggactgactgaacgaatacagcagtaggctgatctttcttcattgtttagttggtactgtgaataatggaccctagaagagttataccacacggtacctcatcatacccgttaaaaatggcaccgacgatacacttatacataagccctcgtctgaaatgaattgtatttttcggaggactttttgtgaaaattaaactaatttctgtaaaaattctgcgtttcaaaggagctatgagattacatggataggctgaatctgatcatattggagaaagaaagttagcatcagcgaatagagtaagtttatagtaatacgggaaaaaattcttatatcattaaatagcacaaactctcagtctaaatcatctgataaatgtggattttattcgttggtccatcttaccataggatgctgttgctgctacaatttgttgacagggaaattaatttattattgttaatgcccccatgataatatatagacctaacgcatgcgtcgttagcctgttacattccgagtttcaacgctgacaatttgtcaaattgataatgagcaccttcagaaaaagaaactgataatggacggctcagattgcctgtcttcgatttcctgtacccgtgaagcagtatattactccgtacacggattggccagctgatgaaactgggctagcgggctgtctaatgtcaaaccagctggcacactagttgctggcttcaattcgttcattgtagctgccaattaataacatctaatgaggaattaaagacgcatgtagtacgccattaaccaatagtccccagtggcccactacaagtacgaaccgaaccgtttgtaaatgtttcactcctcatctcagatcagcattggtaattttggtagttttgtactgcacctgtaacctgtaaaagtagtaactagccaagccaacctgagcagcatcagccagcaagaagtgaagaacatattggctgtacaatgtgtgctatactacactgttccatgaactgtcggccggcggccattgcagcatgcggcctggcttacagcctgaaagcgaccagctctgccttttggctctggagtctggacaccagcttgctgggtcatgcctcgtcggaatcatcagattctcctgctgctacagccggactgatactattaatttattcctaatcccggttggttgtcctcgtcgatgttctatttgtgtttaagtttagctttgtctgtcaatgataacaaggttcttttggaaagaggaaataaaaaaaaaagataaggactcttttggatggaggacttttatgggaattgaagtaattcatatgaaaatcctgtaacatacatgcattccaaatgagtctttgagtgtttatgtgtgtttcattacgatctgatttagaggaggaactttttccataataatgtgggagttgaactatttatgtgaaatttctacgacattctattgaattactaaagttggccttaggcctcagcatatgctgctgatcatttttgttaggacaacatccatcagagttg

SEQ ID NO: 10178 - DNA, 2768 bp, Oryza sativa
ttgctgccaaattttgataactatatatgccaaaattttggcaacttttgggcatcaaagtgaacaggccctaggatgtgtcgcattcagtccaagttcgctatattttgaaacgaagagtaccttggatcaatttggaaggaaatataagttttctaatgcttgcaatcgtagttaaggacaactacattgcaataataggctagtggcttgtctagattcattagcatccatatgaacatggacaatgctaaaaagtcttataatatgaaatattataaaacggaggtagtattaaattgctgatatgaacatgcaatgcaagcacaactagtcaagatcttggtacgcagttcatagcaaatctgcactgcacactgaaatgaagggtaaattttcttctatgccactggaaatttacccaaacccttatttgccagtcattctcccgatgctgcgtggacctagggcccgaatgagggcgatgatttgcgtgttaatctaaaatacaaataaattttatcatcaaaaggccataaataattgtttttgatcaaatgggaaacatctcaacaaattaacaccttcacagtcaaagatggaatagaatttacctaaatagtcaagacttcttttcctaaagaaatgtcgaaaaacaacaggaaaataacaagtatgaggtataattgagattatgtaaacgattgaaacaagaagcaaatcaaacaaaagaagcatcaacgtccacagggagcaagagggtgcaagaatgaatcaaagagagaggaaaaagaatttcaagctgcagtaaaaggtgagttatgtcaccctttgaactaactcctaaagaaacaagcagcagtaagtggcgatttaaatccctgaataaaaaatgagagaacatgaacatgaagttcaaaatgatgatataactgtagtcagtttgagcctttgaggagggatgtgctgtccttattgtattaagtcaaacaagaaactacttgtaatttatgtgacagtagatatagcagtgtccttatataacttcttcaaacaagcaatattcatggatgagttctgttgaaatttgtgttcaaaatcaattgttaagcacacatagaatgacttgcaaccctatataacatttgcccattcttgtcactagatgaacagtgcagcaattaagtgtgcatgcccccatgtgtgtccagctgtccactttcccaggaaatcacgaaatgtatacatggacaattaagaagcccacaagttcacattatcacatatgggcatcaattaagacactgaaatgataactaccttcttttgaaaaaggcaggatcaaataagcgacacagaggtgtgcgcacagtaacaccgttggattataggatagatgaatccgagccactagatcggtaggatgtaaatcaaccatacagctcaacaaatgcttttattacacatctaagagcaggtacaataaactagtttagccggcgataaaactgtcatatcagatttgtccatgagttgcacaagagagagaggacgagtgggcgactaaattgtcgctggctacacacacaacccaacgcaagtgcagcagcaccaggctagctttgattgggacaagcgattgtgggcccacgtgagctgactcgatgcaggatgaaacaacagcaacaagattaaaaaattggatggggaagctagctaaagagggctctttgtttaggctcaggcttattggtctagacttttaagtcagcttattggcttatatgatttataagccagtggatttaatgtcccaagtttagtggtggagtcatacatctatttcatataagccaaaaaaaacttctctaacctagcttttggcttaatagtgttagagtgacttatggcttcaaaaaagccaaatgaaaaagctgcttgtttgttttggcttggacttttcaacttataagttggcttataagcctaaacaaagagggcctaaacaaatagataatagtcgatgtgaacatgcttattgtatacattagctcttagcaatatctctaagaggctgatgtggtcatttttgcagcccttagcgggcggcactattgaccttgttctaatggttcaaaatcatccaatccaacacctagaggtggccaaacgggcggcccggcccggcacggcacgggcacgggtccggcacggcccgtttcggcacggcccgttaggcacggctcatgaaacgggccgtgccgtcccgacccacgtgccgagccgccggcccaagcacggcccgtggatggccgggccgtgcccgtgccggcacggcatgcgtgtggcccgccgtgtcagtacgggcccgtgaatgaaaaatgggccgtggacggggcacggttggcccaggaaccgaaatggcgcggaaggatgcgatgcggacttgcggaggtggctggcgggctgggccatcagctaggaggggtgctcaacggacttgcggaggcggctagcgggctgggccgtcagttgggagggatgagatacggacttgcggaaggatgagatgcggacttactacagtagccgtgccgtgccgtgccggcccgcgggctcggccggcggcccaagcacggcacggctactcgtgccgtgccggcacggcccgttactgtagcaggccgtgccgggccgtgccggctacaggttccgccgtgcctcaggccgcccgttttggcccggcccgtttggccacctctaccaac

SEQ ID NO: 10179 - DNA, 8421 bp, Oryza sativa
aaacgagatagaaattgtaatcgtttctaggcaaagagaggaacttaacaattatgtatacaaagttacatacctcccttcagtatcatatgcttcagagtcactcccatgcttacccttgtgaatgttctttatatggatggaaaacagaggagaaggcatccacccctgcatttgaaagaaagtaaacataagttcatctgtacatgttggcccctccataaaaaaacacatcaaatccaaagcctgaagtgaagatagatatgtcttcccacttacaaaagtcactacaattcaattttcactagcctagtgacacctcttcacatttacaaaagaaggtggtgtaacattcagaccaacatataaaattcagaacgccctaaaaaacattatacaatttctttacatcataatcgagaagattagtccagattttttttttgacgtaagattagtccagatatgatcacacagtttggcaatacagcaaaaggcacggcatatatgttggtaaaaagtattgaaaataaggagcacgtggagtacagagggcaaactttaccggttgagtaggatagctgaggacgaggttgatgagtatggcaccagcaatcgacacgggatacccgcaacctatcgctctcagccctgtgaaaaacaaaaaacaaaacataccatatactcaaagtctcatactacatctgcactgcacaagcaatcgttgatttggaagcataattctgacttaacacgcgaccctaaaatctcttaatctcttctgttgcgtcaagcttaattacaaccttagaaggcaaactgtttgcctgtccgaaacgggacacagatatagcagcagcagagagagatggactgatcgcgacgtggagagttcatccacagcaagacacacgggcggatcactcactcgctcgctcactcactcaccttggaaggtctcccaggggtagatgatgccgtcgccgttgcggtcgaagaacgcggcgtgctgctggagcacgctcatgccgcgggcgtcgcgcccacgggtcccctgcgggtggctcgggtccaccgccgcgagagccctcgcgagatctgcgcgcacgcgaacccagaaagaaaaaaaaacagcagcagttagctggctacggttacgacatcaggtttaggatcagttactggagcggtagtaatttttctgcactgtaacagatgatgcagtaccagtaaagcactagcggtgctactgctctcatgtatactttctgagaaatttcagaaattttacgttacttgacaaagtacattgagatatcaagattttataatacttaaaaattttagtacatcgaaatacgtagtatctagagaaattaaatggtaaaattacacattctttctgttggtacttaaaccatatgatctctcaagtctcaactgatgtacgtcgagctgccgtcacgcacaaccgcgtgctttgcagccaactccggcctctcactctcttatcaggttatcagtgttcagtgaccactgaccaaagacatcaaagacgatcgagaaagaaaaagaaagatagaaagaaagaacagtttttttttcgatccctgcatggtagaaatagaatcgcttacatggcttgggaagctgctcctgcaggttggggttgagcttccgctcccccgtaacagccgcgtgcggcgctaccgtctccaaggacgggtcagacgacggcggcgacgacgacgaagacgacgccatggttattcggggggcgagtttgtaggatctgcagatcgaaagaacgaacgaacagaagaaaaacgaaaacaaaacgctcttagttggggatcgaactagaactctcagggcaatgcgaacagaaggaatccaagactgctttgcaacacaaggcacaagcaaaaaagatgcaggattcgatggatggattacctttggcgcaaagagagatgggggcgccgggtggggaggcaagcaataagtagtagggtcgccattaggaggaacgcccccacaccgtatttaaaatgctcgcgaacggcagcatcaccaagctagccgaaatcctccgccttcgccttcgcatctggagttctggacagagtccgaaatataggttaacacgtggaaggcaacggattgctcgctgagtcatgctactcctagaaacggaacgaacaaaatcggcgcggctgtaaaactgtgtgctgcaagggtctgaaaagctactttcagtgctgcagttggtaggaacaacaacaacagagtactgcacgtatcttatgaccatggaaatgagtgggattaatgaccgtgattagagtgtgatccctgaagccagcgagagagtgctagctatctcctggtggttaggttttgagttttgacaatttgcaacatgccacgggccacacagcaacgtgacctcgcgtgacatcgtgatcggagagtgctagacgcgatcttctcttgtactaggactgcttattttttgcactactggcgtgtgcacgatggattgaatgctcacattgccctgctaacggatctggcgcgtgcgacgcatgaagagctggatttttcacaatttagtccttttaaaaaatcttatttcataaataaacccatgaaaaaacttatccgaaaaataatcctttttaagacgccagaatacgacggcgccagtcctcctgccaccgtggcggggcagcgctgaggtggggggagcgcgccaatgtggttggcgcccctccctccccccattttttcctctctctagtgtagaggagagatatgtacaacttattattattattattttcacacttagaagcacacaataaccaaccatacaaaaattaaactcaaatagatgaaatatgtgacttataaaattttctaaagctataccgaaaagaccccccctcccccgcgttctccctgcttttcgttgttttggtttttcctgtagtccccaaagaaagtagattaaatttcgaacactcttagacttttttacatttttcacatcctataaacaataaaaaaagttagggttcgtgtttctttttgttacattcgggtgtcatttcttgaaacagtcgtaactttctcatacggacttggaatcaggcaaataatatatccacggatatcttaaaaaaaaagttacatccgattctcccccgctttgctgggttcgaggaaattaaaacctccaaattccacttgcaagattatgttttcgaggcgagaagcttttcggtagagctttgaaaaattctataggtcacatacttcgtctatttgagtttattttttttatggttggttcttatgtgctcctaagtgtgaaaaaaatatataataaataaaaaaggggggcgccagctacattggcgcgctccccctgccacctcagcgccgccccgccacggtggtaggaggactgcgccagctactttgacgccccaaaatgaccattttcgggataagttttttcaagggtctatttgcgaaataagtttttcaaaaagttcaaattgtggaaaatccagcatgaagagggtgtttggttgcttaccaaagtttgcctcaatttaccacaagtatgataaggatgttttactgagtttagtgcagtgtttggttctaactacgagttagtcatatcaaactttccttgaacttgatcccacatttggatcatagacataataatatatggtaaaaaggttaaggtgtggcttcttgatcacagctttaacaacttaaccacaaatatttggctggcttaggtagtgttggacaaccaaccaaacagtccccaaatcctcccaagccggtgcgaatcagagaaacttctccccggctcccattactcgtttagcactcttcgcacacaatttcaaccgtaaatccagaatacgcgatccgaacaagcagagcgactgcctgtatttttacaagctttctcgagagggtgagtgtgcactgtgtctgcgtacatgtcaacgtctcttgcaggatactggcatgggagatagagcaagccagccgccagcatggcacgcgtcttgcgtcttgcgtcttggcgtgctttgcaatggtacacacgtgctggccagtggaaaggctaggcgcgcgtgacgctcgcacctgtaattcgatctaaacaaatcgaaaatattttaataccatcatatggattctgaagccaccgaaatgtggagattttgagatccacgtagtactccgcctcagctgatactccgtttctttcgcccgtttttccacgtaccactcgcacgcaccaacatcatggctctgttgaagagagtatccacgatatatggaagagcgggtgctctgaagtcggaaagctacgcggaatggcagatggtcagatacagataggcattgatcgcaatggccaggaagcaaacgacgacgcaaatcatgcagcgcgtcaagtgaagatccaatcgcccttggctgtttctgcccccgcatgcagcgatgcaaacggagtgtgccatgctgcagtacacgggattacaggaaacattttttttgctcctttggttcagaaaaaaagggaagaataagaacatttaccccaactgtccagtggtgcccacgggtggctggtagcgatgggtcgcagcccggccggccttaccgaaaaggagaaaagaccgtacgacaatgggctttgtggtccagctcgttgggctcggcacggatggcccatcgttgcttggagcaagtgccagtaagcctctaagcaaaggttcaagtttgccggcctatttttaaaattggtttttgacaccttactaaaattttgataagttttctcaaagggtcaaattattaaaattaaggaacaaaccgaacattctattgttattgacaccttactaaaatttggtatttccataaacgttctctcatactagcattactaaattttgataaggctacaaactaaacgcttctaacgctatcaacatttggtactataaaaatgcgccaacttttgacaataccaaattttggtaaggttaattttgacatcaaattaaacaattgctctgagttaaaaacttctaaatgtaattatggtgtatttgtatctattatattattaaaacagctttgaaaggaggcaccacgttcgatgtgggggctagaaattcccacattaatcagagaaaaagaaaaaaagaaaagaagagtccaagtagaaatacaatctaaaaatagctgaaattcagaattaaaaataagcaatattgaaggaagtttccatataagaacccaatacgagattaattaatattcgaaataaaaataaaataaaatccaaaattagaaaaaaaaagagagtccaagtagaaatacaatttaaaaatagctgaaattcggaattaaaaataaggaatattgaaaaaagttttcatataagaacccgatacgagattaattaaaattcggaataaaaataaaataatatccaaaattagataaagtaaaagagatttcaagtaggaatacaattttgaaacaactgaaattgaaaataaaaaataaaaatattaaaagaacacaattcgatattaattaattttttttaaaaaaatctgaaattagaaaaaagaaaaataaggttccaattaggaatacaatttataaataactaaaatttgtgataaaaataaagactattgatagaaaagaccatctaaaacacatgacgagataaattaagtaacaggcatataaaggagtagtggtggtggttgatacgacataaaaaaaattgttaatgaaacaccaaatagaatcctaatgacgattaaaaggaggggcgatagggaggccgtaaagcaaacgatcaaggcgattgccgggacttctagaaagtaaaaaaaataaaccccattgataatcatattcgatttttaaaatctcaatgacaataaaaaggagaagcagcgagcggggtgtataggagtatagttgcagagctgccgatggttgacgggacttctagaaaataaaaaatgaattccaacgatagttatgttcgatttttagaatcccaatgacaataaagagtaggcggcggacgggccgtagaggagcatagtagcatcgtttgacaagacttctaaaaattataaaaaaacgaaacccaacaagacaataaactctaaaaactacaaggttcaatttttgaaggttcggaacttctaaaaagtaaaaaaaaacaatgatagtcatattcgattttaaaatctcaatgacaataaagaagggaggcagcgggcgagccatagagaagtacaatggcaaagtcaatgacggtttagcgggacttctagaaagtaaaaatgaacccaaacgataattatgttcgatttctaaaatctcaatgacaataaagagaagagacagtaaacgggtcatagaggagtataatggcaacgtttgacgggacatctagaaattataaaaacgaaactcaacgtgaaaataaactctaaaacctataagatccaatgtttaaaggttctaaggagaatgaatagaaatagtggtagatcgagcaagcaaataaagaaggagatgacataaggggtagtatctggtgtgacttttaaaaaactatataattagaaacatggggatgataaggtttggtctttcaaactcttaagacaatgagatagctatttaataatttttttagtaaaatcataaaaaatatataattttgtttgggtgctagccgcacaattgcgcgggccacccagctagtttgaactacacgtaacactataaccggtatgtaaaattgtatatataagaaaatgaaatgaggtgatagctcgcgcacatgtgtattgcaagttgaagatttgattcttcctgcgcacgctgctatttctttccacttacggtgccgccacccggcctcctcactatcctctttccctcgctttacccccgttaccaatactggcccaccgtcccatggcttcgctgtcgcctctcgtccacccttgttcgccacccatgtaacgctccgctttttgtgaggcgttaaaaactaattcggcaaaaatcctatatgcgaaaattccattctctgtgtgagagtctaagtcgtgccgtggatcttaattcaaatccgtccttgatccctctcgtcgccgtcaaaaaaatcgcctcctcagaattcctcttccaaatttaagttcccaaaatcaaactcaaacatccaatctattcccctgaaccctcgccaaaaactttaccgattccaagaaaatattgaaccctcaccttgaatccctccctatccattgatcgatctatccacttatctaacctatctatccatctatccctctacctatcgatctacgtatccaactgtctatttatctattgatctatctaactacctttgaatccttgccaaatatttgccccgactccaaaaataaccaaatccccatttgaaattcaaaccccaagctccaaaccctccaaatcagttctctcggtaaaagtctattttgcctccctcttggtcaactgggccgtttttctctttccggtccatctctccctctcggtccgtctctctctcgcacgtgtgtcgcgcgtgttcaggagcaggagagagcgtcgccgtctccttcctctctcgctcgattctctctctctctctctctctctctctctctctctctctctccccggggccgctttgccgccgccgccgttcgaaatccggccgcgccctcgcgttcgcacgcgcgcgctcgcgcgtggccgaccgcccggtcgccgccgcgtcaaccctggccgcctgcgccgcgcagccgcccatgccgccctgccgctcgccccacctccgtgcgctcgcgtccaagacgcggaggcagcgcctctctctccctcacgcgcgttttcctcctccctctgctcgctcaaatcgggaaggaaccgcgctcccttttccccctcctttttccactttgcccgacaccgcccgtgaccgccagctcctctccttgaccgcctaggtcggtttcctccccaaaccgacatcaccaccgcctataaaacccaactcgagcccctccctttcctcctcgtttccttgcccaacctccaccgcgccattgccgccggaccatctctgccgctcgccgacctcgcctccctccgccgtcgcacgtgctggtgaagctggtgtgtgcgacgacacgtgacgcgggactacgggcaccctctccttccccttccccggcccgagtccggagagctcgccccgcgccgtcggtcgcccatcacagggcccgtctcgactcggtagtg

SEQ ID NO: 10180 - DNA, 37032 bp, Oryza sativa
aaaagtcaacggcgtcatctattaaaaaacggagggagtattttttttcaatatttactgggttgtcccacttgagaacagatagcacctggacctgggaagagatcggtggcacctgctgggtcagatttgctggctttcggcatgtgccataaaccgtatttcaagctacacacttgaaacactagtgcagcaatatgatattttaataagtagcttaacctcattgatggggtcgagttaaaacaatggtggattcgtcctctttttcttcttcttcaggttagctgtcctggaacagttgttcgtatttgtactttgatctgaaccctctttcttgggatttgctttttgtaatctaaagcttgctgattcatcataaagaatgcagcaccattttcacatgtatccctaaacaattgtagaagtataaagtaatagcatgcaaactgctgacgaagttcacaaactgcgtagtgtggacttacgtccaacaaaaaatgtacacatccgtccaaaaacatcaccatccagctacctactgtaccatccgatttggttcgatgcagccagtacatatccatgtacgaattgcacaactcagctgcaaggatcgaatttttgagtgctttcgtttcgtcgtcagatgagcacactatctaacaaagtgtcactgtcgtcgaacctactgaatcttcagacaggtcttgctgaggtctgctcgaagagttgtttgaactattcttttataagatcgcatatttctgggagaaagagttgtttgaactcttcttcagatcgcatatttctggtcgagagagaaaaaaaagataccagaagataacaacagatctcccgagatcaatgccgtgatgtcaacatggaaccagactacacctgaaaaggcactgaaaaagaaattgaaacgcgtgtgcagagccaaacgtgcaaatatttgctgggtgctcagtactcgcctcaactacaccttatctcccgaatgcaacaaggagcacgtggacgccttattcggaacagcaatgcccataggttcagacttcagactgtttcagtagttcacacggccggttggcctgtatataaatcacgagaggatcgatcggaagtcaagaggagataggagacagcgaaagcaaattcaacgggcaagaagtacgtgtatttgccttcgagttcttcaggattcagagtttcagacgacaccaaggcccaagctaacattaggcgatggacgagcaaaaccagtggctcacggagccggcaagtacatccagtccttccatgtaagctctgaaatcttcgagcaaagcgtatgacgaaatgattattgcattgttaatgtcaggagcctgaagagttaacctacatgtatcatcaagaagagcacgccaggatgcaagagcaattcgctgggacgccgctcgtcgagcaaccagttcgatttgatcagttctacccagcatccatggcgccaaaccagttccatccgtctcactgctccagcttcccggccttcggtggctcgtcggcattgccaagcttggcgttcggagcggtggcgacgaccaagaaggagcaggtgcagcagccgtcgccttcgtcctcgaacgtcctctccttcgccggtcaggttcagggtagtaccaccacgctcgacttctccggaaggggatggcagcaagacgacggcgtcggcgtgttccagcagccgccggagaggaggagcaggccgcccgcgaacgcgcaggagcacgtcatcgcggagcggaagcggcgggagaagctgcagcagcagttcgtggcgttggccaccattgtccccggcctcaagaaggtgtgtgtacatgtgccccgatcatggcgtgcattgattccttggcaaatgcggcattaacacggttgtccatttctctctcagacagacaagatctccctcctggggagcaccatcgactacgtgaagcagctggaggagaaggtgaaggccctggaggaaggctcgcggagaacggccgagcccaccaccgccttcgagagcaagtgccgcatcaccgtcgacgacgacgatggcggcagcgcctcctccggtaccgacgatgggtccagctccagctccagcccgaccgtggaggcgagcatccatggcaacaccgtcctcctgaaaatctgctgcaaggagaggagagggttgctggtgatgatcctctccgagctcgagaagcagggactgtccatcataaacaccagcgtcgtgccgttcacggattcctgcctcaacatcaccatcactgcaaaggcaaggctagctttacctgtctactactcctagatcatttgggtttcgcatctgtgtaaatgtggctgtaaaattgtaattagatggttgttgttatagctggttttgacaggtttcagttttgtgcagatcgaagagggtttttcgacagcggttgagcttgtaaagaacctgaccgtggctgtcagaggtttcaaatgaaggcagaaaaaaaaaaggaaactggtgtacagaggacaagtgactagtataagtattatgcagtggcggatccaggaaaaaattatagcggggctaaaccaaaatgatcaagagcaactaagagagatttagggttggttttaggacttttttagcctttttagccttttaagcattttaacaacctcaaacaaagtctatattagcccctcatatatgaatatatagattataattttagggggtattatgggggctctaatggtatattagggggtaggggggtctaaagaccctccgcccccacgctgtctccgcccctggtattatgtacgtaaaaaatgtacaattggcattatatgaagagaccaaagatgtattgattcattcgaagaagtacgtagcgtataaattgttcggatctcatgttagatgattagtgcgtggctgaccgctccataaactctgctgagtgggagttggaggagttctctagcattaggctgcgttcgtttgttcgggttaggaacccatctcctccgcacagaaaacggagtgttccattagcacgtaattaattaagtattaactttctttcaaagttggatcaatatgattttttaaacaactttcggatagaaacttttttaaaaaacgcaccgtttagtagtttgaaaagcgtgtatgcgaaatacaagggagaggggttgtgaacacagaccaaagaacacagccttaggagctttagggacagtggaaagcaatgaaggtaggaggggcataaataacgccagagaaagagaaaatggtagaatgggaggaaccataaggggggaatgagactcccctataactttataactttatgcagtttacagttgcgatactgacatgtgggccatacattggtaaggtccacatgtcagtgccataactgtaaactacacaaagtcaggggatccgtttccacacgggggagataggctagctttaagggaaaagaaaaatagagtcggaggggtggaggtcttgggctagctagcgggcctcgccgatgcaaggcagagggtcgcagagtgcctctgactgcatgtggctagcggcaaatcaagaaagtgaagaaggtggtggagaagataaaagaggaaattagggagcttcgtgtatcgctatatttgatctaatggtaaagaattcgtaagattagaggcctgcctggaaacattgaaaaaaattataagtgtaaaaactttacacttgtattttcaagtgccccaagaaaataatccttgtgatctttccagctgtattgtaaatacacctcgatttttttttcttgtttgggtaaacgctacccctgaaaactcagcactgtcatgaactgatgaattgaacaacatgctgcatctgggcatgttggtatacacaccattatccatgttagagtactatattgcagaacacattcatatcaaagtaatatattgcaaactacatgcatgtcaaaataataacgtggaatactagcagttttcctttcggtatatatgacaagaattgagcaccaaattctaaactcctgccgaatacataggagaagaaagaaacacaacggtttaactattataaggatgacaagttctcttgtagtttgtgtcacttggccatttgttcaataattgttctagcaagactattttcatgttatgaactattataaggatgacaagttctcttgtagtttgtgttgcttggccatttgttcaaccagtacaacatgctttcctcattacaaaatggccatgtgttgcagatgtgaaatcttcatatattcattgtgtaggatcgtaaagggcatttcccaccccaaaaactagacattgaggtgaggggctccccacttatatcttaggtcatttgcccttttacaaccaaaagctagccattgaggtgaggggctcccccacttatatcttaggtcctttgccctttcacaaccaatatcggactattcaacagtctcccccttcacacattggtgtccctcagcccttcaccgccccttcaccgtatacgggccccacacccacggtccatcaggtatacggactccgcaggcacccacggtccatcaggccttcacacactgtgtccatcgggccagagatgttaacctagccaggctctgatactaattgtaggatcgtaaagagcatttcccaccccaaaagctagccattgaggtgaggggctccccccacttatatcttaggtcctttgcccttccacaaccaatgtgagactattcaacacattgcagcgcacccacgaactgttaacctgcaaattttagtgttaaaagtgaatgaaagtcgggcaaaaaaatatgaactgcaaaggaagcagaaagcagaaagttacaatcatccagtcaggctacaagcgattagcattttaatttttcaacaactcatgaaggaccaagatccaattagcaatatttgatatgtactataaataaatatctcatattaaggagcctaaatttgagcattagctcagttttagcataggcaatgttagcatcacagggttgtcatcacatgccgcctatctctacgactcatggagtcctagcctctagcctaacaccgtgtctatgctatttattactacctttatcttgctatgaactaaaactaaggtactctatctaagcagagcgatgcacacacaacaatgagaatatatcttacttaaataaaaaaataacaactaaaggagatcatgaatacacttataaaagaagcattcgtcgaggtacaagatcggagagagtgacaacatctccggaactcccctcactcaattcctactctactagagcaatgcctaagtatctacatatgtgaaagcaacaagctctctccaacaaggatgagccacgtcacctgaataacaatagccctaggatgatagtgggaagaaaagtggaccgttagatcatcgggataatacaccaatcagctatcaggatagttccagatgaaaggtcatataacagtgttagtcaaagtagcttagtcaaacaaatatttaaaaaaaccatccggaagatagcagaaaaaggcagggataaaaaaccatcgagattctctcatataaaaatgagaagaagactacccaaattaaatctacttatagtttatcattaaattattatatgatttatatattgcacaactttttcactgaagaaaactctctggtttacacaactcttacatctgatcggagggcaacaaaaacctaactaccaactaaggtacaataaccttctaaagtcttaaacttaacacattataacagaaaaaggcaaggataaaaaaccatcgagattctctcatataaaaatgagaagaagactatccaaattaaatctacttatagtttatcattaaattattatatgatttatatattgcacaactttttcactgaagaaaactctctggtttacataactcttacatctgatcggagggcaacaaaaacctaactaccaactaaggtacaataaccttctaaatttttaaacttaacacattataatgcgtcaaaccttttataatttgaaaataaaaggatggtttgaatataatatgttcattattcctctgcaactcaaatcaatattttgaatggtgccactttctatcactaatacttttggttagtatgaatcatgaataccatgcatatgttcttctactaaggtaagtgccacgtttacatgccaaatttctttatggacaaattatagatcttttatagtaattgtattataaatttgtacaaggagtagtaaaagtataacagctaaaatatagaacacattatgtaaaactttaggaccatcaatatgtgttgttagacttcttaaagcatttaatcaccagcataattttgaaataaatcataaagcatttaatctactgaacataaatcttatgttcaatctattctataactaggtggtgtttttggaatatatgaagcacaggttctacctcctagcaacaactatcaaactattatacctcttgtcaggtgatatattattaataaactatttactttcattcttttatttcataatgttcagcacttatactttacgaatttatggaagacaaattccatctcattgcccacaattatcaaactattatacttctatccaactaacataatatggaaatgaaataaaatatttgactgctatccttctaaatcatacactttagtatggacattatgtctatatttttataaattacacctatcattgcacgactactcaacctttctatatatgtactattcatatatttaaattatcatcagatatttctttcagctttaccattttaataatcaatctatttacatgtatacaggtgcaacaatatgctccagtaacaagttcttcatatgaacgaagaaatattaccaatcaacttatgatagactttagcaagctatatataccttaatattttgttatgaacactactgttagtacatgtcttccaaattatattatacatggttgtccaactacaaatgcataatgatgggacatcaagtttatatatattcacaatctgcagttcatacaatgatttcaggcttataattacttcaggcacatatttgttttgatggtctgctggtgctgggtgtgtgtattaattattattacctgatgcgtgtatattgctgacctacaggattaaaatttgcgtggactacaaaggcagttcatcttaaccgcttatctctatagtgtatcatgctcacttgcagaggtgcttccatgaggagcataatacttcaacatattaatgatttcaggctttgacaattgctcttcctgttgctacacacttcaacagtgttttaatatggtcaatggtcatggctatgctactgttcggagtcacctatgtgattctaaggtttcataaagtttcataaattatttgtgattcaaggcaacaaagtatcattgtcattaacagaaactcaacttatcgtttcatcttgcagaacatcgtcatcttacaagggctataagcatcaggaatcttctaaacatgattggtttgggcaaatgaaaaatacaaaattggactcagaggtattgcctccaaatagttgttactacttggactcagaggtattgcctccaaatagttgttactacttttaactagctatacaagaccaagttttgatgtcttctaagctttcctgtatatatgttactgttgtgcttgttagggaatcttggaaaactaaactctatagttatgcctaggggaaaacagcgtgggggcggggcctctttagacccctacccctaatataccattatagcccccataatacacctaaaattctaatccatatgtttatagatgaggggctaatatagactttgtttgaggttgttagaaggcctaaaaggctaaggcccaaaaaaatcctaatccaaccctaaatgtctcttagttactcttggtaattttggtttaacccccgctaatcctaacccaaccttaaatgtctcttaattactcttgttaattttggtttaaaccccgctataatttttatgctggctccgccactggttatgcccaaatgcttgtagtgcctaatcagcttagatggccctatacttgatcttgaacatctacactttttcagacaaccaattttactatttgttttgctttttaatagttgacatagttagccggtaagcaatccatccatgatcccagagtgctttatcttttcccatgctgtcattctcgatttattctactgccagctgccatttgacatgttattgctttatcttttcccatgctgtcatcctcaatttattctactgccaactgcccttcgacatgttattggtggtgcacttgctatagcattacattggtgatgaagtgatgaaccagggggttaaaatccaagttgtgatgtggcgatgaatcaacgatgagaattggacaagaacccaagcagacaagtaagatatgaaagtgatgcaagtaattatgatagcaatcatgtccgatcaggcttctcaatataatccttttaggaaagggatgagattggcagcattttttttactcttttgattgagattttgctaccacaaacaacaattcctaatattgaattgtgccaccacatgcattggatggttctaaaggaatatttggccatgtttttttaggaaaagagaaatattgttctaaatggattatattgtattaactccatctaagaatataagagattttgcccatgtcatttgaataaccatgggataatagatctggcattaaggaatttatccttaaatttatctccatgatattctcatgaacttctgcatcttgcctcacaaaatgaggttgtaatagacatctctcaattgttttttaatctttatggcgtgttgaaataaatgaattggaaaccatggaagtgaaaatgaaactcaatttatgtttctgtttaatttcacgtggctctcgagaatatattttgacacaattgagaaattttgcattgaaagaatgtaaattgtgaaaacgtgcattgcacgtgcacgattactagttatataaatatgaatgggcagtaacaaggtcatttcaatgcctactcttactaacaggttatgcaagcactcagagtcatgcgaagcgcgactaggtggctagtataagtgagttgtactctacttgttggtgcaaaatggaagagaggagtggacgagctatttatagcgttagatgacttgagagagtggatgttcttaagggaatattctcctccaactcctttcaagcctccatatgtcctccaaccatcattagatgttggtttcttgccttgggaactgtgccaccgtcgtcgccacatggaagctgggcgcgaggggagccacccctggttcggccaaaccttggccaagctatctcgcaccaccttcacatgggtcactgcccggtgggccctcatgacggtacacagtggttggcctcaaatatgttgattttactctggtttgtgcccccccccaaaaaaaaaaaatccattaactcgtatctgattgtctggaggtgtattttgtcgcatgttgggtgtgttttctcaataattcacctgcatacgaatattcaccaagacttgtagaaatggttagtaataaccacaacctctaagtttggtaggtattccatttttattttctttcatttgcttttatgcatgaagtgacggtcaaatttggtatttaaggaccgtcaacaaggcgctcctcagctatgttatttgttgttgccatgtctttgcccttgaggttgacatggttggatgtactagaggtaaagcctatccttcaacatattgacatgttacactaagttaatatatgtcataaaataagtattttaagatcaaaatatcaaatagagaaaaaggtatgtcctaccttcatacaattgatccaagcactcaaacaatgggaaacttttgttctcatgcctcttcaacttctgatcttcctatatatttatagaagggtcaagattactgatgcacaagattaaattctgaattcaaaataagtacaatctagcctcgatgatcgcttcccatttttcaaatgtggttttaatcatcgacacattttggtcccaagaaaagccaccacgactttgaatggatttaattgctttgaagtctttcttcggttgggtttatttgtcctgtatttgagcctctcggtaaatttagcttcttggaataacttgttgaaatccatcactattttattcaagccctctatacaccaactattttgccctcgataatgagagacgttgtactccataagtagatccaccaatgcattctcatatttcaatgttcaccttgctctttgagccatctgatctataacagatcacaagaaatgttgaacgaagatattgttcatgatataataacatattcaaataatctagaacatcaacacattcaaaataattcaaaacatcaagatatattcaaataatgtggaacatatccaaacatgtttgctttattacaaataataaaaagttcaacatgaaaagaaaatcacactacgcttgagatgttcaagtgttatgagaattcaagaagctcttctttgcaccctacgctctctcattcttcggtggtcagcccacatattctttgcaatcttgtcccttagcttatttcccaagtgtctttgactattcattggtgctacatcatctccatataagtccactcatgtactggaacaagtttcttctgaactaaccacttatcatcacctttttggctcctgattatgttatggaggactattgcaactgcaaggattatcacttgggttgcgattggataaaatgttgcaacttctaggattggaaatcacatcttcaggattccaataacacgctctatgtggttgcgtaacttgaggccggagttgaaggctgagtggattgagctcgatatttacccccaaaaaatgtgacatctctagcccacattaccttttcgtcggaatgggccgaaaacgcctggaaatataataggttacggcccatccaagcagcgttttgagtttatccttggaaaaaaattatgggcctgtaacttataccggttttgggccaaatacaggccttccaagcaggcccttggagtaagacatttttttaggactagtaatgcacgtgcaaggcacgtttttacaatgtatattttaaaaagtaaaagtatggggaaaaacagtgccatattcatacacttaactccagaaacatgacacactgaattcagatacattccatgtagttcataaaaaaaagatacattccatgttcaaccttaaatggtaataggagtatattccatgttcagacactaaacccacacaaatcttacatcgactggtgaatttctaaacttccagtacttgagctataagaaattcataacattaattagctcacagcaaattaaaacattgaacaatatttagatgtttgtcgaagttcagattcttaattcagatactcctacatcataaggacaagtcgaaaactaatatgccaaatgctcagaaaataatataagaaatgttcaaacactaacctggcaaatgttcgacatctatagtgcacacgtttgaggtatatataaagaatttgtcatcagcacgacagaaaattagaactttttttttggaggacacaacatgagatgtgattgacaattttttgctcccaggaaatttgtactgaaattgttaaaaataaaagtgttccacatttctaaaggctgtcaggaattattaactcagtacataaccaatagttcacagggaaactatgcatgtttatgttgaatagaaacaatacattacactacacaggatgccatataatgcgaggccaatttcagaatgttgtcaaccaagttcttgagcaatgcaagcccaagttcagaccatgtaaaactaaattcaaattcatatataaagttgtatggcacacaaagaccataaagcctcctgattttggttggagcaacaacaaacatggttgggtagagttcagcgagcagacaaaatgaacttgttacagtaatcgcttcagtaaaatgttcaggttggggttatagcacattttgtgcttcaaaataaaatatattttttatctttaacaaaagttcatctgtttggagaatatatttgtccttggatctacccaaaacaaaatttgaagcattaggacaaaatcaccaaaacttgtcaaatcaccagcagctgctagctaggagcatataagccttggtaatgaaaaagtaaacactcaaattcctagcccagaaaaaggaagaagttattcctattcagaatcagagttgttccatgcctttacccttgcatacactaagctgagtttctctaataagtttatagtacacaaaaatatatgcatgtacccttatctgaccagtgaccaataagtagtaaccatagtaaaaatagtaaaaacttaaagcaaagaaataattctgcatatattaatattacctttttgttgtgcctatggagtatattaattcatatatatcaaccaaaggccaatcaatgaaaaataaaataacaaaatccccttgaccttcctcatagagcatcttaaagccaaaagccatctgacaagggcctataaaaatgccttccatcctgttcacctatcttcagcatatctgtataagcttgtatcatggccgttttatagtatgcctagctaaagaaatcaaatggtggattgcagtatcacattaaatcagaaattaagatttgctttttattaggctaagaaaaataaaatataaacatttcatgttcccaggaataatcaatgaaaccaacttttcaacttcaaccgcatccttgagtagcaaaaatgttgtatcctccatttttgtgcaaattagctttctttgccagaggtaaaaaagaatggtttgttataacaaggaaaattgaaccaaatgggagaaagaattaaaaccggcaaatacccattatactgatcagctgcacactggctcttgcctagcacccgtccggccagccaccgcctgatgcatcaccgtctaaccagtcatgcattgatctaaattagacaacagaaaaaaggaaggtaacacacatgaactgctatatcacagagtactcaggttagataatcactttgtgaatgactgaacatatatataatttattcatggatgaaggctcacaataatctgtgctcaagaactaaagtactaaacaaatgaatctatgaattctcaaaagtgagtcgatccccttaatctgatcgaacttgaacaattctcaaacctgtacaataaaatttctgtataaaataatctggaagagattcagcatggcaactacaagtctacaatgttagtctgtatggagcaacaccaatcaccttgataggatatagcctgcaatgatgcacatatggatcgataagaaccgaatcacaccattaagaggagagatttaatatatgtgcatacccttcagctgaataagaaaatccacacagaagactaatggggattcagaagagtcaatttgagtgtctcactcgatctcaggagcagaagaaattttgacttacagctagaagtacctgcggtctactatgcccctcgtgtcagcggcaagaccggaggtgcgaccgaaggctggaccagcggagagcaatggagcagcggcgctggcggaaggctggaccaccggtcagcgacggggctgtggcaccaacgaaaccctagaccagcgggcccgattgcggtggcgacgacggagccgccccggaggcagcgacacctacggagccctcggccgctggtgcgctgattgcaacggcgtggggctacctggcttataaaggagggaacgcgaacctcggcgctagtccggcggtgcagtggtgcgtcctcgctgttccgttgcgaggatgagggaggtccggcattgcgatggtgcatcgtcgctggcctggcggtgcgggacgcgtcggccctggcccggcggtccgtcgtcgctgggccgtcgcgaggagaggatgagggaggatgcgcgcggggagcgaggcacggagagagtaggcagagtcatcgcggtggggattttcacggcggagtcagcgcgtgggggcaaaatcgccggtgggttttgcgtggaggagatagagctacggtgtacagcggacggatgagattagatgagacgtggatgaacggtaaagattgattcggatgatttcacctgtaggattgcaaggagacaactcctgctttttatattagtatagaaatatggtatgcatgggtgattacctgcagatgaagatcctttaccataaatacaaagtattgtgtgtatggtaaaatgattttttaagtgcaaaatgagtcttatgctttagtgttttgcatcaaaattatatttgaacggccgagattacccacaatgccacacccgctatatctatttggatctcgtttccactcaagtacaagaacaagcggttgacatgttgaactccacaaatgaattttgtggtccattgatgtggaagagcacgtattgatgtgtccccgttggcaagtgcatatatggtagaactctgaaattgatcaaaagatatagtagttctaaaaatatagcaacctaatataatatagaagaaatatgagtaccatgagccgtcatgtactaaattttatattttaggatgaaaggggttataattcataatagtactgtaggagcacagacgttgttgaccgatgttcagcaagttacctacctctccaccgaattagccaactctgtcttctaccaaattatttgatgcttatatcagtggtatatttatgtcccagttacaactcctttaactcctacccataggtttggatgagggcagttcatagttcatacatgtcttgcaatatgggcctcatctggtcaaacagtagatgggcctcatacgtgtcttgcaatatgggcctcatctaggatggacgcgctgcacaaggaaacaaacacggccctccgacaggtgagcgtccggcactccggcccacgagaagtgctgaaatgatcgcgctacgcttccttgatacgcgcggtccgtgcgcgtgcggtgttgcggtttggcagaaaatattttgtgccacgaacggaggagcctatccctgcagaccaatgcgcaggtaaaaacgttcgatgggcgagcccgagtttgtcgatcaatgaaaaaagcacgataggtttgacccaaattaataacgccataggtgtaaaattaaattaatgatatggtttgaccttcggtttcgatttgcatgtagatttcttctctggattagcaactgggttttagcacaatcgattgacctgtcgatgatcccccgggtaatcaggggtcctggggctttgggcctgtgtgtgtccgtgctcctgctccaagcgtactacgtccaaaacctaagcactcccggaagacaaggaggaagtaactcgagatgtcccgagcttatatatcgtagctagctagtggtgtttgacgaaccgtccatcgatcgtggctgcgtctgtatttgtaaactgcagggtacgcgtcatatactcttacctagctagttactccagttattagtcccaccaactagaccaagttcggcagttcgctcgtttataattgttgagctggtactattaggcgcggagagaacaaaataattgcaatgtcgtttatcttaagtttacaatatatgtactcttatactggttaatggaacgttggctatacttaactagtactcctccattagaggacaaatggccatgctggtcaccattttagtagttgtacgtgctgtggtaggtactccaggttatttagcagctacggctaccagagtagagatcgaccaggcgctgctacagtaacgacaaaattaagcacgaaataaggaaaaagataagctactttactaggaacaacgaagatctctagactgcacgaggcgcctcaccttcactagtgtagtcactactatactctgatcgcaagacctgccctctgttaatgcgcgcattgctttgtgctcaacgacgcacctcgcctcaagctaagttagcactccatcaaatcacgcaacgaggttacgattttcacggatactgtgcaggagcggaacgctggaacgagacgaacgggaagtgcaagaaaaataattcagaaaaaacgcaacagtgcagttctatagtactactactactactactactgctgctgctgctgctgctgctgctgctgcagaagtagacttgtagtgggctgccactttaagttttgtagagcccaacccatccccacatcgccgcaccacgcttcctcctcggcggccgcgccgaatgagcggtcggtcgcggcactgatcggcgacaaatatttcgcaccgttttggggggccgaatcatgggcaccgcatcatgatccaccatgaatagaatcgcctcgtctcccggctgcccgctgttccagcttgctcgcttccacagcccccccacacacaccgacctgccaatttacgcatcatggatgtcccgcttcgatcgagcgagcgagcgaaggtggcgaccacgacgctgccagtacagtgcgaatatacgcgagtgcgcggttcacagggtcaggagttcactgtgtgccgcgcgggtgcgacacagcgacatcgtgatcccagaatccggggtttgctcgatcgtgggtccgattgctcgtgaggctggcccggctgtttgtttgttgttgcgcgcacggtcgtaaccccatgcttgcgcagcacttcacgtccggttttttcttcttttttttttgccgtcgcgtgggttaaattaaacaaagacgttgcttagctttggctgggatgagaaccgcagccggagcgtgaggagaaagttttctccaacttttctctctctctcttttttttttttacagcacggacgatctgcgtgccgtgctggattgctggtagcgcggtataggacaagacagaaaaaaacgcctacggtaccgtgcttctcctacccaagcccaccggcaaaaaatccggttcaccagtgccgtgcactagtttaccatgtttgatgtactgtagctgaccggtggaacccacttccagaacaggcgctactagtgttttgctccgcgttcttccatgatacggaaagctgcgtagtttatcctttgcatctactgtactgcagatattgcacggttttcctgaaatcgcagaatcacagtagtgcagtacgcgggccctatatgtcagtgttaaaaacggttttaggaagggttgatatgattatcagtccagctcttaattgcagacattgctaaactctacattcagcgtactacttccccttccctcgatggaaaaatctctccatatacacttgttatccttttggctggttagttggtgtggatcagccgccgtagatttccccaaaagacattgttaagctaggcatttaaaattgatgcactcctctttaagcatgtgtgaggccaggcactcgtgaattttatacgtacatagcgacacatgtgcatgttcgtagtcgtagtagctatcttttctattgccatacgatcgcaccgattggaactatctgatgagggcatatgtaacggtaaaagctacactatcatataagcgacactagatttttctcaatttattgccgagaggttagtcgcttccactttagctcacctcattttttttttctgaaccacatttttccgtgttattggcgcgcgctctctctctcttcatcgtaaaaaactacttgtagtcaatgcctacaaggtttccttcaatcacccgaatggatttctctcagtattcttagtcgattcctaatacttaagtatagctacgagctaaataatcatcggtgcataaccttaattttaaaggtgtacccatatgatggtagctttaaacctaaaagtaaccattgatgatggattctatgtccgtttgccatagaggctagagaagagggagagagagcaaaatcaatgttagcacaagcattgacctatgccaccatgtaaggttccacgttagaaagttgttgtgagcctatgacaagcattttttctttggccatggagtcgatataagaagtagagacatgcatttatttatttgttttttcttgaaaaatcaaggctttgatattctctagctccatggctccattaaagagccaccgctcatcatataataatctagcatcgggttgtctaaaaagtctaaaacttaagctttttggaatataaagagtgaatagcagttttaattttggaccaccatttgtctcaacttttcactttggaccaggtaatttatttttgtcctaatatagaccatcccatatatattttttagcacatcaatgaccccaagcacattaatttcatacttccagtgcgccagtaaactccattactcatgcgcaagccatatctttactggaggagtggtttgacaaggctagataatagagttggcgtggtccaaaggaaaaaaaaatgtaacattaactaatccaagtgaaaacaacagttaaagatatggtctaaagtgaattttagctatataggtcgcccaaactgtaattctcaaaaattagaataaaatcccacaagatttattttacaaataaaagtcgtacattaatcagaatagattggataaattggggtgtagtgggtttggataaagtgtaaactttgataacatatgaagttgaggttaaattatctggtataaatccagtgctgtaatgtactagggggggggggggctcacttctccccttcctcctccccttcttttcctactacagtataccaaaaaaaatttaaaaaaaacaaaaagttagaaaatttatctataaaaaatttgaattcaaatttaaatttgaatcgggtatgtaaacttttgacttataaactttgtgtctataaactttagatgtatagaaatactatatatagaaaatatttgaattcaaattcaattttgaatcggatataattcaaatttgaatcgggtatataaactttagatgtatagaaatactatatatgaaaaatatttgaattcaaattcaaatttgaatcggatataattcaaattcaaatttgaatcggatatataaactttaggtgtatagaaatactatatataaaaaaacaattgaatttaaattcaaatttgaatcggatatataaacttttggtctgaggtgtataaactttagttgtataaatgtaataaaataggaaaataacgcggtgtcaaaaaaagtaaggtagagggagggggaggcctacccgatcgctctgggctagcatttccggtactacagtgcatttctcgtttccctgtacagctcattcttccattcagtaaggtggtgacaggcaatactgggccacaatcatcctcgggccttcactaaatcctcctacatgtacacaaatatgagtttgtttttgtacatccctgtaccaccaatgattcggtgaacccgtgccccatgcgttgtttctgtaccacgcgagaaaccgatgttggctcagctactcacctctctctttctcacttttgatgaaagtgtgaaacacacacaaagagatgatgaactgacggagaatgaaaatgaacacttgtatttcacgctgcaaaccagcgcgcacaacataaacacttgggggctgttcactttgatgaaaaaaaaaccttattaaattttggtattattaaaattttggtatagttgccaaaattttcgcaacttaccaaaattttggtatgatttcttatatagttgtcaaattttggcaacaaactaaatatagcaactttttgataattttatcaaaatttggtaagattgaaaataacatcacagtgaacaggctcttgtatttcacttttggcaccacaccacatacaccaccactccgtcctgttcggctgcacgacccggccaagacggtctgcaaccatgtcttcaccctcatgcgaggcaaatattactgcatgaagagctccactaactgacgcgcatacaggcaagattttctccaattaatcctgcttgactgctcttatctgatgaccacgcacaacacctgctagttgatccactcttcacgccatgcatccgtgcttcacttggccacagtgtcaagccaacgtgcacctacgggctgccggcatgcactctaatcaaactaacttatgcacacacgtacactacggaataactcacacagtaaacaacaagattaagtctaacaaccgaaacagaaagaacacgcccatatatcccacgccgcccaccgaaactcggacacccactccgccaccgccaccgcctcatccatggcactggctggctccatggccgccgccgccgccacctccacccttctcctcctcctcctcctcctcctcctcgccaccgccacccatggcgccgcggccgacacagtctcgtcccccgcctcccctgaagcggccgcactcctcaacctctccgccgcgctcggtgatccctcgggctacctctccacgcactggacgcacgacaccgcgttctgctcgtggccgcgcctctcctgcgacgccgacggctcccgcgtcctctcgctcgacctctccggcctcaacctctccggcccgatccccgccgcggcgctctcctccctctcgcacctccagtcactcaacctctccaacaacatcctcaactccaccttcccggagggcctcatcgccagcctcaagaaccttcgcgttctcgatttctacaacaacaacctcaccggcgctctcccggccgcgctccccaacctcaccaaccttgttcacctccacctcggcggcaatttcttcttcggcagcatccccaggtcgtacgggcagtggagccggatcaagtacctggctctctccggcaatgagctcaccggggagataccgccggagctcggcaacctgacgacgctcagggaactgtacctcggctacttcaacagcttcaccggcgggataccgccggagctcgggaggctgaaggagctcgtgcggctcgacatggcgaactgcgggatctccggtgtggtcccgccggaggtggcgaacctgacgtcgctcgacactctgtttcttcagatcaacgctctctccgggcggctgccgccggagattggcgcaatgggggcgctgaaatcgctcgacctgtcgaacaacctgttcgtcggggagatccccgcgagcttcgcgtcgctcaagaacctgacgctgctgaacctcttccggaatcgcctcgccggcgagattcccgagtttgtcggcgacctgccgaacctcgaggtgctgcagctgtgggagaacaacttcaccggtggagtgccggctcagctcggcgtggcagccaccaggctgaggatcgtcgatgtgagcacgaacaggctaaccggcgttctaccaacagagctctgcgccggcaagcggctggagacgttcattgcgctggggaactcactgttcggcagcattcccgacgggctcgccgggtgcccgtcgttgacgaggcttcgtcttggagagaattatctgaacgggacgataccggcgaagatgtttacattgcagaacctgacgcagatcgagctgcacgataatttgctctccggcgagctccggctggacgccggcgtggtgtcaccatcaataggagagctgagcttgtataacaatcggttgtccggtccggtgccggtggggatcggtggtctcgtcgggctgcagaagttgctggtcgccgggaaccggttgtccggcgaactccctcgtgagattgggaagctgcaacagctttcaaaggcggacttatctgggaacctgatctccggggagatacctccggcgatcgccggatgccggctgctcaccttcctcgacctctctggcaacaggctctccggcagaatcccgccggcgctcgccgggctacgaatcctcaactatctcaatctgtcccacaacgcgctcgacggggagattccacctgctatcgccggaatgcagagcctaacagccgtcgacttctccgacaacaatctctccggcgaggtcccggcgaccggccagttcgcctacttcaacgccacgtcgttcgccggtaacccaggcctctgcggcgccttcctctccccgtgccgctcccacggcgtcgccacgacgtcgaccttcggctccctctcgtcggcgtcgaagctgctcctcgtgctcggcctcctcgcgctgtccatcgtgttcgccggcgcggcggtgctgaaggcgcggtcgctgaagcggtccgccgaggcgcgcgcgtggcggctcacggcgttccagcgcctcgacttcgccgtggacgacgtgctggactgcctcaaggaggagaacgtgatcggcaagggcgggtcagggatcgtgtacaagggcgcgatgcccggcggcgcggtggtggccgtgaagcggctcccggccatggggcgctccggcgcggcgcacgacgactacggcttctcggcggagatacagacgctggggcgcatccggcaccgacacatcgtgcgcctgctcgggttcgccgccaaccgggagacgaacctgctggtgtacgagtacatgccgaacggcagcctcggcgaggtgctccacggcaagaagggcggccacctgcagtgggcgacgcggtacaagatcgccgtggaggccgccaagggcctctgctacctgcaccacgactgctcgccgccgatcctgcaccgcgacgtcaagtccaacaacatcctcctcgacgccgagttcgaggcgcacgtcgccgacttcggcctcgccaagttcctccgcggcaatgccggtggctccgagtgcatgtccgcgatcgccggctcctacggctacattgctcccggtatgtatgagtgtaccccctctgccccctacaaattttcagctcattctgttgactgtacccggttgctactagtactactatccaccatcatttccagtgttgaaaaaatcatgcatcacaaagtgcagaaaaggcccaaaattgctagtactagtcctgtcctgctcatggcaaatgttacaatggggccttcatatttttcaaactcactatcacattgaaatttggaagaaaatggttggttttggtatgctctgatttgttttttactgtgcccccacactatcgagttgtacatatgctggatgttgtgcctctcgtcactttgtcgttttaatgaatcatcattgggaattgatggcctgcgatcttatgtggtctgagctgtgtgtttgccctgtgcatccgcagagtacgcctacacgctcaaggtggacgagaagagcgacgtgtacagcttcggggtagtgctactggagctcatcgctgggcggaagccggtgggagagttcggcgacggcgtggacatcgtgcactgggtgcggatggtgaccgggtcgagcaaggagggcgtcacgaagatcgccgacccacggctctcgacggtgcccctccacgagctgacgcacgtcttctacgtcgccatgctgtgcgtcgccgagcagagcgtcgagcggccgacgatgcgggaggtcgtgcagatcttgaccgacctgcccggtacggcggcggcgacggccatggacgcgccgtcgcacgggtcggggaaagagcaagaccggagcgcggagatgcagcagcaggacgggtcacgcgagtccccgccacagcaggatctccttagcatctagaagcgtgcgtgcatgtccccgttgtaccggtactccgtagcatcatcccctgtacgtcttggcgtactcctggactgtgctggtgtcctggactgtgctggtgtccgggtccgagtccaagtagaggcaaatctccaatatttgcggtagtattgttagctagattaagattatattgttacataatggtggttgataaaatctactactagtagtatgtaatctgtctcctctcgtgtacaaagcaactactcctactccagtccagtatatgcctctccaaccaattggattgagatcgtatcgatctcgcaacaaaaaaaacacggacacacatggcctattggccagtgcgtcatactgtcatccctggccgctactggaagcactggtcaatactactagtacacccgtatggtgctgtccctacccctgctaaaaaatgtcgcaatacagatcacccgtggagacgtacgtacctttggtcgctgctgtatccccagcgtgctgtgccgatgggcgacatgcacacgcaggcactcccagctcgtcgtcgtggttcgggttgggaaggggataggacacgcacggttttgctcctgccgcgcggtgctcaggcgttcctggctccagcagcaagcagcaagcgcggggcgcgcggagacgtagtacgggcagagcggcgactggggagtgcgtgcacgtgagtggtcaattccatcgcggtagtacactgatgcactgccatgctcctctcgcctgaagatggcaggcggggcagcgagccggccaggacaatgcatgcacggcgccattgcccaccaccttgctgtcatcacccaagcaaagctttttgtgacagtgtaagtggttcgtttgattttggagccctgccatgccttcggcactgtgccgcgcatcataggatatgctgcagattgctgcggcctaatgatactgttggagctagcgttcacgcagggatgaatgagaatcgatcgagagctcccatgctcattttagtaccttctgataaaaaaagcgtgcgtggtggaagtgggactgatcagagtgcggtttggcgtgggcgatggacttggcttcgctggctgtgactactgactcaacacgtagtcgggagctttcgctgcatgcagagattggcgaggctgctgtgatggccgtgaccgcgaggcgcgagagtgcgcgctgccgctgttgctatcctgcggggattggggagagatgtccgtgctgtgtgagggtgtatggtcagatcatttgtcaattgtcacaggtcacaccacggttgtaatcggcgaagccactaggagaatcttctcgatcattttgtcgtggaaatctgagcatctatcggctcatcccttttgatccactgttcattatcttttctcgactatgatgtacatccctcgtttttcaatatagagtactctctctgcctcattataagtttatttttgctagtactatttattctaaagaaaattcatatttaaaataattattgtataggagtttataaagtagaaaataattactccctccgccctaaaatatagttatctttttggagttcaaattttatcccataatacttgccacttgttagtattatctgtcacatcagttatctccaattcaaattttcacccattctgtccccaccaaatctcttgtttctattcaaataagaggtaatatattctttacttttcaaatcttaatttgtgctaaacgacctagaaagacaagtattatgagacggaggaagtacattgagagtagataaattagggaataattatattgagatttatgggttctagtccttttattttttgttggtacgggtgggatgggtgaaaaatgaatttatcttgggacgaaggagtatctgtaagattttcttttcaaatatagttatctctaacatttaaattatacttctaagtttactatgttcatctgaaaaaattatcccaaaatatatcgattcctaccttcatatttactctcggtccacgaatcaagatgttttatcccttaataaataaatagttcttactcgattataactaaccaccaataccattttttattaataacgggtactatatatttttctcaccactaaatcttaatttgactcgggatgtttcatcgggatactttacacgaaaagatacgacaatcctctcgctagaaaaagactgcgtaatctgatttaaagacaaactttttcacctatgtctcatatttaacatcattgagttctatttagaaaatagaatataattgtataaatataaaaactatctaagaggagagggtatcaaattttaagttatagatatccacatgtcacaatcttcatgccaacttgaaatgcatcccggtggaactcacggctagccgttgtatattccatcgagattagttgtgtacactagactaaggacatgtcatttaattattattattattattattattattattattattattattattattattattattattattattattattattattattattattacattttgcaaatcatgccatatatacttatcctaccagttcatggcatactctcgtgtcatgccacactttgcttagagaggagtatttttacccggcatctacatccaatcgaatatatgcagttttacataattttaaatgattgttcatttaaaatttctataggattgttcattctaaaggaatttagaatgataggatatgattaatcatatccttatttgtttcaaaaaccttcgtagaaataattttataagattaaaattcttacgtttttcttacaaatcagattgacctaggagtaagtgtttgcaaaccaaggatgtacgtatatactagcaaagtggcaaaattatcaaagcttatgcaacgcaaaggtctactcgtacccgtggacgtatgcccagcccggagagtccatgcatgtaagacgatgtgatatgggatcaacatgcatgtatgcaatgagtcgtcggctcgccaagttaattatcatcacatggggagaaggggcaaacatgcacgtacgggtaaagggtgaaaaggaccgtgatggcgatgagattcttgtagtcctgacgcggaagagaagcggcaaggaaaagatgaatggatcgatggaccggaccggacgggggcttgtgcctgtggcgctagctagccgcatcgcgtggctttgccatctgtgtgtgttctcccctcgtgtagtcgagtcgtttcgctgtctgccagccctagctagctaggcagcgcgtacgacgacgccgtgaccgtgaataggcgtgaagcaccgcagcacagcacctgaggcgaacggtacagctagctagcgttggagtaagagtatcctaaattcgtccgtgtctaggactttggcgtgttagacgtacgggtcaaatacaaatatagtgataagatatatatcttagggatataattctagagataaatattctagagataaatctactcttacttgtattatgcttcaagtctctatcctttatatactcctatatatacccatgagaggtcgacgtaatagattagaaaataatataaaataacaattagatttttctacatggcgtacgtttacgcatgcatagtactctatctgtcaaaaaaaaatcaacttctggagttagaattttgttccaaaaaaatcaacttcttctatcctactgactttcagcacattaaacgagaaattttataccttaaataccctctacctatctatcaccaatactactactttctttaataatgaggaacactttttttaataatgaggaacactttcctttatactctctacctatctatcaccaatactactacttttttttaataatgagaaatactttttttaataatgaggaacactttgggtatttttactcctcgctaattttacattgggatgctaggattcgtctttttttagaacggagagggagtatattctaaccgaaactcctaatgggctatcgatcgcccctagtcacccccctcctccacgtggttttcttttctggcaccgcattactttcctattttagtaaatttatgcacctaaagtttatacacctcaagtttatacatctaaagtttagagacccaaagtttataaatcaaaagtttatatgtccgattcaaatttaaatttgaattcaaatattttttatatatagtatttctatacatctaaagtttatacacctaaagtttatagacccaaagtttatatacccgattcaaatttgaatttgaattatatcggattcaaatttgaatttgaattcaaatatttttatatatagtatttctatacatctaaagtttatacacctaaagtttatagacccaaagtttataagtcaaaagtttacatacccgattcaaatttgaatttgaattcaaatatttttatatatagtatttctatacatctaaagtttatacacctaaagtttataagtcaaaagtttacatacccgattcaattttgaatttgaattcaaatattagtttataaacccaaagtttataactcaaaagtttacatacccgattcaattttgaatttgaattcaaatattagtttatagacccaaagtttataagtcaagagtttacatacccatttcaaatttgaatttgaattcaaatattttttttatatatagtatttctatacataaatttttcaactttgcttttttattttttaaaaatttatggtgtagtaggaagagatgaaggagaggaggaaggaagagagtagcgtatagggggatggggggtgatcgcccggagcagtcacccgcccattagccacaccctattctaacaccatatgcgtacgtttacaagatgatgtataattacttcatcttgaggaagtatcaaagttgtggtggagtggattatttcacttaaaagggttaaaattctgatatccacgtgcccataatgttaaaaaattgaagtttagtacacgataagaatttactcgtggtggtctcttgatcatgtattaagtattaaggtggtattttcatgaacgtgtatatatgtataggtctttaattaatgtaacaaaaacgaactacacgaatattcttcttatgtttttgtatataggatttaagggccctgattcaaatgattgaagcttttcaaatcctatgaaattcctatggaatggcacattgcatgtggattttaaaggaaatttagcaagaggtctaacttcttgaaaaatttcctttgagtctacctctttcatccgattcctgcgtttttcatgcgctccaatcaaatgaccatttctatgtttttcctgtgttttgcaatcctctgttttacacttcaattcctgtcagaatccttttgttttactattcctccgttttttctaacctgcgattcaaaggggtcctaaatggttctatgaagtgggtccccatgttcgaaaagttaccgattctttgggaaagctggcgagaccaagccgttacggccccatggggccgttcctggcgaatgttaagctccctggctaaatttaacacgtcccatcccatcaccacacattgcatgaggctgttttcttgagagctcacctgaacagtcgaatctactgtatgcagcttttgtaacacctttctcctcacgaccgactccgtgctattgggtgttggccaccacggatccatcggcgatcgagtctccattcgtacgccagaccgagcccatgatctacacgtactactattactaccaccagaccctgtgtagtttccgcacaaaaaaaatttacaccttatcacacctttctcctcacgatagactctgtgctgttgggtgttgccaccacggatccatcggcgatcgagtctccgttcgtacgccagaccgagcccatgatctacacgtactactattactaccaccaggccctgtgtacttcccgtgcaaaaattttacatcttgtcacatcgaacgtttagacacttacatgaaatattaaatataggctaaaaaaataactaattacagagattacaactaatttgcgagatgaatcttttaagcctaattgcttcatgatttaataatgtagtgctacagtaaacatttgctaatgatggattaattaggcttaataaattcatctcgtagtttacggacggattttgtaattgttttttttgttagtgtccgaacatcctatacgatatcctatataatatctgatgtgacacgttaaaactttgagcattgctccagtccagcatattgtacctcgaggtaccagtaccttcaggtaccaatttaaatccaaccgttcattcacggagggtaagattgaaaatctcacacgctaaacagctcatgatcgtgatgctccttctctctgactgagtgactgtgtcaacgaagactccaagagcaactgagcaagtccaaaccaagagcaaggacgtggtgggagcgcgacaaggggtggtcggcgccggtggtgccgggggcgtcggcggcggggtgttggacggcagcgtgttgggcgccggcggtgtctgcacggcggcgaggtaacgaggagcaggaggggtggtcggcaccggtggtgttggacggcggcgcctgcgtcgaaggctgctacgcggcggcgaaggcgacgaggacctgcgtcgcttgccgatgtgcttgaatccagcagcgagattaggggaagggccgcggtagacgtatgtcaccggcgagcttgggggaagtggtgcacggaggctcgtcggccccctccacctccactccggctagcctgtccatccctggtgagagccatcgatcgatgcaggcatgcagcatcttttggagagagaaaagacaggaggaagatgaagaagatacacgcgaaattacttaactacccttgcttctttagtactccatccattccaaaatataaggcataaccaccctaacccaaagaccaagaaataattattattattatcttgtagtttggatcatcctaataaatacaatgcatgcatccaatagaattagaaagcatgagagtgaaggatctaaaaaagtaatattttattggagaagtggtcatagttaattctctacatgtatgcatgccttataatatggaacatctaaaaaaagtggttgtgacttatattatggaatggagggagtacctttctatgctctataaaatcacgtggacagtactactaggtacaactctttctcacccgttagatcaaacgaaatcgatggttcaaattacatgtacgggcaggtaccaagtacctgctggaccgtaaaaattctctaaaactttagtgtcttaacaccccatgtatcggtggccggggcccgggagccccagagcgcgcgaccaatgatgcgcacgagtacacaacagcgaaagcgaagcatgcatgccacgcgcgcgccggcgagcacccaccaccgcagtgatccctcgtcgaattcactctgatccagccgctgccgcacccgccgacccgcgggcgctgctgcctgcacaccagcacgtaaaagcgcgcacggctcgatcgtcgcgatggcctttccctccagtctcgtgcgtgcgtctggccgaaagaggagagatatatcgaccacggcagcgacgcacgcagcgtgctgcttgcatcggcgcacgatgcaccgtctcgtggttgccgctcagcgggagccacactcggatgcgtgtattacgtatgtgtcgctgtgcgcgtctcgtgtgttgctgtgcggtccgcggtggcgtggaccacacgctccacgcgcgcgcaggccatgggcgctagtataccatctttctgttctgttccgctcttccaggtggctagtggcaaagcctgtttgtcttggacccattttcgaaacgctccagatcatcagtgtgagtttgtgaccgtgacgtcccagagtggccacgtcaatatatagtactccctccggcccattttaaacaccactacgagttttcatatctaactttaattgttcgtcttatttaaaacttttctattaatatttctattgtattatatgataataaaacatgaatagtacttgatgtttttttttaaaaataagacaaacgattaaaattggacattgaaactcatatgcgcttaaaatgagacggaggccgcacacaaaaatcttgttggaagtccatatgcatgtacgtaatattcacgaggatttgaaccctagtgggttgagtctaggagtgggtattcggtctgaccaaaaatttcggtttcggtcttcgatcttttggtcatttcactctttggaaagtgaagaccgaatttcaaggcaaaatgtcagaaccgacaaattcggtctctgtcttttcggtctcggtctcggtcctaaccgaaattcaacaatattttcatatatgcaaacaaataatgaaaaatttcaacacaaaaatcacaaaaaatttcgtaagcacgtattagtaaagactcttattaggttgcatgcctaaaagaagtagggatgtgaaaaatagagtttaatcctattgaacttagtgggttttaggttgcatttagatatttttgctaattcggtctattcggttaaccgaggagactaaccgaattgagagaacaaatttcggtttttcactgcctaggatcgaattgatgaccgaatttttggtctcggtctttttctacctacccctaattgagtcatgcacccacgagtccatgacttcatcaccacaccgctggtgcttcctaatagtactactattagtatatctctcctccatgtgtctgccttctttgtgaccccatcgatcgatcgatcgatagctttagagtgtgtttaagaaggaggggattgaggagattggaaagatacgtaaaatgaggtgatccattagcacatgattaattgagtattaattattttaaactttaaaaatggattaatatgattatttaaagcaactttcctatagaaatattttgcaaaaaacacaccgtttagtagttcgggaagcgtgcgcgcgaaaaacaaaactatttttctctctttctcatgcgctcgaacgcagcctaatagttgtgcttcagaaaagtttgtttgaaaaaactagcactactgctactttagcaggactgtgcgtttattggtacggggtgactggatgattgccgatttgccttaaacttcctagtttcctacttctgttgtcgatgagcgattaaccttggccactgaggcactgtaaattgccctagctagatcaggctttcggtttcaaccaataagtttgtcactgcatgcgttcttggcgactcattggtccgttgctaccttttgtcatttcgatagcctttttcatgtcaccgaagagtcaaaggcagtgatcaaacgctgatgatctgatccacatccaagtaaatactacaggtagtagaactcttgcagtagatcagccaaacctacaggtaattttcactgattagtgattacaactctacgcactgatctagctcgactttagttggcaactgtttcctcaagcttctgtacaattaatgaaactaaaatgtgatcctatagcacgatatgactaaacaaagtcaaacgacaaaacggtatgggctggtttggtttgtgctttgtggcctaaatttagccttaattaccaatattggtaattttaatagtgtttagtatcattttgtttgatgctaaattttgacatgcttagaaaaatataccatttcaatagcaaacttaagctattttggctttaatccaaacacaatattgccttgtcaaaattagtgatgctaaaacttgccaaaattcagacattgtttgttattttttataagactctttttgtctgttgggctttctttcaaagccgggtcaatataattaatctgtttcaaaaaacaaaaacttgccaaaattttacattgataaaaattggtagatcaattttggccataaaccaaaccttccctgtatacgctcaaggaatattgctcgatcttcgcgtagtaaacacatcattcgttcctaccaagagtgttcggttaaccgccctatcatcctcttctcattgtcactcgacacaaggcgcacatatacgcacactcgcacatgcaacgcatgaatgttactagcttagtacctttcaacctgtacgcctgcagtaacaataatcttagccaaaaactaaatcccaaaacgagataagagcctggtcatggccacaccgacgacgtccatcccctgaaacggccaactgatagcgtccaaattaagcacacacatgtaaggattactgcactggctagacatgccacaccaccagagacagagacgcaaggatggcgactgtaccagcagcagcagctagctagctagctgcaggcctgagcttagcattcatggcatgaacaataaaatggaacaagtgaggcacacggactgtgcacagcgtgcaaggcaaatgtacttaacagagatggacaccggcccgggtcacagtgtaactgcccagatttcttcttggtgatgtacgagagatgtgtttgttgtgctgcatgactgcatctctccctgtgcatggctaatgggtgccattttccatgtgcatatgcctcaataatgaatgcaggtgcaattccatggggtccatgagatggtactatatatccgatgttatgtttaatttctctctcccggtcttcctcttttccctgtttacctgcaacacctttccctttcctgcgatttgtttacttgcaattagttgggcaatttgtttattttattactcctacctgtgcacttgcttgtgtaccaggcaaggagtggcctggctggctagccgggtcacttttttaggtgctgatgtgaaattggctggtgtcttggcatgaaggagacaaggacatcagacattccatgacttcataccttcccaaacttccaaacaaataccccaatcagtgtccgtctgtgttctaagcaggcaggcacctttttttgctggtcatgtggcttatctgtttgattagtataaacaaatgcagtcttgatcgagtactggggagtagctttctcacgaactttggctggaggatgaaccgtgggtcctcatgttagtggggctcatctgtcattggaatgtaatggcaatgggctctctcatctctcttcacattagcccagaaaccttagctagaagctcgtgcatcagtggctgcagctccaggtttatgataagtttccagagagaatatacttcaaatcacactgtccgaagtctgataattcacacaacattttgaaaggaaaagttaacggagtctgggggaatagaactagctactgtgtactgctttacatgccctgtttatctcttctcctactgctactctgtattcggtcgatcgatccattcatcatactgttaccttcagaaaaaaatgaaaagtgagtagtcgttgtactgctactgttttgagattccgaatcaaataattccaaaatggacagcataagtccattgagtcctcgatctcacagcagcttaaagaattatagcagtgtactatattggctctactatttttatatgttctccgagggacctgttttgcgcgtctgtgcagtcatatgaatgcattcgaatgccacattttctgccatcaagcaaagctgtaaggcccaacccggccaattatttcacgtccacggtacacacatcgcaatctttcttcttggaagatatctgcaagaaaacttttagtctgaatcaatcaatcagtagccattcttacccagccaaaggccatggcttcagctcaatgctgtccctctgaagcttgcataaagaaaaattacagtaaacaagaggacatcgcttgcaagattagtactaaaaacgaatcaaacgggccccgtatcaaactgaatcgcctctcatggaatacagttccgttgcgtggatgcacgaaagtaagaacaaattaatggcttgctcattccgtcatgtagtacgattgtacgaacgtacaaaccggcagctaattgacaagggaaaaacatcacctacattatatacacatacataatcacgcggggacagctgtcgctaacatgaacagctggtgaacagacatagcatgatgttcaggaaagagtggttcttcagtcttcaccgatgtgtaaagaactatagctagagactaaagacaaagagagacatacatacctatacatatatactctcttcttgtccattgcaatgctagacacacgtacggacacaacatagtttacgtcgaaatcatccatctcggagacgaagctccgggcatttctgcttggtccaagaggtgatcatcgacagtgctctcgttcatccattggctgcttcctgacttgtgatcaggacccgtccaagacgatgcagcagatgcaatgatccaggcaacggtgaaatgccaatgccatgagcgttgccgcaggctatcttgcaatacacactcgatgcccctgtcgtcgcttgcacacatacgcaacaaggtactataatttgaggtttgacaagcagctttcagctccatttccctggagaaacaggaaaaattggtagcaatgtcagctcatgcatgatggtggaatataaatccagcaactttgaattcaacatg

SEQ ID NO: 10181 - DNA, 14431 bp, Oryza sativa
gggacgcgagacggccaggcgcgacgggcggtggcgcgtggtgaaggtggcgacagagagagggggaaagaggaggggttgggttagaggaccacgtcgaacacctggcggccgatgaatagtgtcttttcctatttaatccccattttagcctatttcttgtaaatttgattctataaatcctggattttgtataaatgaagtttactcaatatttgtgtcattctaaccaatggatttactctagattaatattactcgtattttatttatataatttatttgaatttttaattagggttaattcttattccgtcgtatttagatttaattaatacaaatatgactgcgatgatattttattcatttctatccccacctcaacctttattttaaattatatttcagttatttattttgctcatttaattttaggttttattactaattaattattctttattcgcgatcaacaaactccgaaatcaaaatccaatggaataggcgaataaaattggcatgatgcaatttatttaaaaagtttttgaaggcccatatttttagagtttagatttttgtcggtcaaattttcagggtgttacacaatagcaaactattagccagctataaatatattttaatgagataaaagatgagagagaagagcagcaggctatagatctgtagccagctgcagcacggactccaagacgcaatgtgtgtatgacaggtgggaccatatattaatcttatagcaagcaactattgtataaattagctattagatcggctatattggagctagcagtgggctatactattaaacttgctctaaacgtcccaaacacctgcggttcctaccaacgccacagcgttggtcacaccgtagaaaggcgtagaataaaacctgcgctctgtgactatggggctatgattggtcaaggtttactcgtggcttggggatcaaatgaggtgacgccgatgtgtggcatgtgatgggacttggctggcgcaaagtgcccggacagggcatgatggaagaatcatgtgaacttccggcacttgacaggctcaagcagtcaggccaacaggtacttgcctgtttagttgcccagagatgatcaatttgatacactaagtacatcactgtagaagaaaacaaatggagtagggtattttactagttctagtagtactaggatatgtatagtgctagtacggtgtgatgtgttcgtatacttcttccgtcctaaaatataaatatgattagtatagtgtcaagtcaaatatttgtaactttagctattaatagcaaaaagataaaaaagatcaaccatgtaaaattgatgttactatatttatcattaaacaaacacaatatacaactctttttatttgaaacatctcacttttatagatatcgttagtcaaagtagcatcttaaagatcatgtcgaagttaaaaaatacttatattttgggacggtgggagtagctttgaggtaaacaaagcagggtgaattattatcttaaaaaaattgaaatagaatgacaagaagaagaatattaaatcgtaccataattgttatgcacaattagctctaatgatctattttggacttgggtcaatggtcaatactgtatcatgtttgattgttaatcactatcctccatctaattttaatagtcatatttcatcttgacacacagaccaatgataattaattctacttatcatccatttaaacatgctattagtcattcatcgtaaataagcgattcattaatatttacatttctcaatgcccatgtagccaatcatgtatggaagaatggtgagtcacgcattaaatttgagaaaatcattaagaggataggttgttggattgaaatatgcctatcaaaaataaacttttcagatttagaaatatgactatcaaaagtagatggagggagtatattttaagaataaaaacaatcacaaaaatgctacgccagtataccaaacaaaatgttcatcctaatataagcaacagaccaatgggtcggtggccaaagagatcgttctcggttttgggaccaacaacaacgataaacaaccatagtaaaatcagagttttgcacacagcaaatgggtaactgccaacgcaaaagcaatccaccaaactgaacttatttagaaaaccggaccgctcgaactgcctgccccactgttgggtggagtacaactatagtcacatcatccagcaaaatctgcccaagaaaattcgctggatcatccatccattctcggctcgtgatgagcgagtacctgaaattgccttgcgcaagctcttttgacatcattatgctttcatgatttcatctacgtgcacagaaccaatcgaccaatctagtaatactagtacttgtattactccttttctccggtgatcttgcacctaacctttgatgttttaaaatggcacacataataggagagcacctactctcttttttttttcttttctgttcattcaaaatgttttggttccaagtcaattaaaacttgatcattgttaggagacctctttgtttaacaaaaactacaccattagtgaataacagggttccagaaatcaaatggtaataagatcctattgcttctctgaaaatgatagtccttccattcagtaatataagacgttgattattcaattttcattcatgtttaaaaatacattcgtatgactataattttataaccataagcgaaatagtataagaaaaatatactattaaagcttttttacagttaaaacacgttctatcttaaggatgatttattttttataagagcccctttgaatcgtagtaatgaaaaaacagaggaataggaaaaacatgggattctgacaggaatacagttgtaaaacagagaattgcaaaacacaggaaaaacacaggaatgaccgtttgattggaccacagaaaaaatgtaggaatcagatgagagagatagactcagaggaaatgttccaagatgttagacctcttgctaacttttctccaaactgtgcataggattacccattccatagcaattttaaatgattggataggattcaatcctttgtttcaaagtccttcataggatttttttcaataggattgaaatcctccaaaattcttacatttttcctacaaatcaaaggagccctgagatactggaagatcgtaagatacttcgggctcgggctctgcattgagaatacacactagacactacaaacctagtagaaatgatgatacacaagttccttggtcatacctgttgggtatagattactgtgttaaccgagacgcctatgagatactcctatcttaacttacttgcacgcttaatttactgcaacttttctccagccgagcagcaactcaaacgtacacgcgctgtgcactgggtgatcactgatcagggaccaccttaacaaagcatgtgtcattgcatgacacagacgaaaccatggccgcactatcagcaggtcagcacactgtgccaggtttatctgcagtataaaaatacgaggagaagatctggatcctgccatgaaaactgcagtaacctccaaaagatgggagaaaagagcggcactactggtgttggtgtgcgttcaaggtgcttgctagggaatcttggagctcaatttttcttctccatttttttcttcttctttcgtgcgtcccgagaaaggattggtttggttcttctttcgatggttagcaagcggttaattaactaaatccacctgatggcgaatctttttgggcatgggcatggcagagcagcgcttaatcaagttggggctttttaatgaactccaaattttattcaagtgcacagcacgtactccacttgttctacaagtagcagcatgcagctgctgccttctgctgtagatgcctgtccatttgcgagaggtgttgtgttatttgcgtcttgtttgacatcgatgttgtgtacttctgtgccatttgttggttattagttatgcaggggcctcataaaagcatgacaggcatccgttgttgtgtatgcagacgcaagcagttgcatgacaacaacttgatgctacgccttataatttgcaggaaagcgatttagttagcatcattaagccaaatggccagcttgaagctgtagcgtgctttgtggtctgctcccccaagttggatccatttgctcggtcttctggttgctgtagatgtttactctttcatgtctaatccaatccccaaggtacctatctgtatgtgacataaaaagcccttggaccttgcaacttgagacgtgcctccaagaaaaatgctggctctctacaggatacaggcctatttctactggctttgaacatgatagtagctttttctgttctgttccaattttgacatgagcttgacctcctacatgtagaactcctcgaattccttgatttggaagtgatcaagcgaacacgtacaggtgcacacgactggaccaaagcgacgaataattgagcagcgagtagagtaaggacaaggaccagtagtcaccaagcatgccgtccaactctgaccaaccaacatgaaaatctcgtcagcttctcgcacgctttccgtcacttcctgccttcgccctggaacccccaagtgccagctcgctcgcctcagtgagagaaagccaaatctcacttgggaaatttaggcagcgttcgttctgggagattagagatagattgcacatcgttttccgcatgcacgcttcccaaactattaaacgatgtgttttttgcaaaaattttctataggaaagttgcttaaaaaaatcatattagtctatttttaaaatttgaaataattaatactcaattaatcatgcactaatagctcacatcgttttgcgtatcttaccaatcttctctatcttccctttctcaaacacagccttagagagcttacatagttacagttatgagaaacacctgattaatataccttttaataatttaaaaaactactccctccgttttaggttacaagatgttttagctttggtcaaaatcaaacagttttaagtttgaccaagtttatagaagaaagtagtaacattttaacctaagacaaattattatgaaaatatatttaattattgatttgatgaaactaatttagtattataaatattactatatttgtttataaacttaatccgacttgaaatagtttaactttgaccaaagtcaagacgtcttataacctaaaatggagggagggagtagggtttttttagaggactgctacaaaacggaatcccgttgtaacgggatagacatattaactattctcttgcacgagtatcacaggtatcaggtcctaggtatcacagataccgggtaacagatatcacaggtatcgggtaccatgcagctggtaacacaataggtatcaggtattagatactgtcttatagaaagatatcccgttcccgttccaacgggatactgttgtctaggttttctggtttttttaatagctcgtagtttatattcttcaattatataactatacctttttaaatcttagactaaaagcgaaactattaagaaagtttgtaattataggagaaactgtagcgataagaggcccaggcttaacacccaccagaccaccaccaccacggaggcgtacgtcggcgtcctccgcgatggcgacgccacatttgcggcgcgggggaaagtccaagtgcaccgcgctttcggtcggcttgtgtgccgtgcgctgtgcctgcacccagccagccagccggccagcctacgacgcgggccgactcatccatcatcgacggctacctcgatacctcctcctcctcctccccgtgaagacattctccacggtcgcgccgtcgctttcgtcccttttcgcgcctccacgactccacccctgcctcgcatccattccaaatccaaccgcgtcgctcgcccgcccgcccgcctgggagccacctcggcttccttcgtagttatccgcacgcggggaatggaaagggaggccaggccaagccaccccacgacgtggcgaggcctgggtgatcgctggttggatggcagctttctccatccacatcagaggataaaaagggagagaagggttcagtttgagttgtatttggctgctcagaactgtacacacagataacatgggcatctacttctatgctgaattgcaactttgcaagactaaacaggttgtacagatgctgatgggctacatgattcatcagatcaaaaaagaaagagagagaaaggaatagatggaaaaatggctggcagataattgcaagatgaatagttggtactgcatggcctagctggaagaagggcgaccatcctatgtttgtatccttgaaattttgcgtccttgccattatcgacggagcagcggtatccatatgctttcaacattgctcagcaaggttttcttggcccacagcgctccttcccaacaaatgccgtaggaaatcagtatgcagggcatgaccagcctttgtcacagaaggaaagcttaaaattagatgtcacaaactgggttacagatatttagggatagaataaaaggtgtagaagtagaaattagcacagaagtttgcaatttgttctatacaagagaattttctttctgcagaaaggcaatatgataaggaatatcctatggcttcagataaaccttttagtgtaaggaccacatgctatagacagtacttgaaagcaagaggttgtgatgcatcagcaaaaacaaaaatgtgtatgtagtttaaacctttaaggtcacaatcagaataatgagtatttttgcaacttattatgaaacgttcacttgaacagcataacacaataataatactttttggttggtaattgatgttccctttaggaccaatggtaacttttactaagcttagaccaggttttaccaatggtcagaagtcagcatccacagtttcattgtcatgaacttcagaactcagaagctatatagctaccgttaaaatggaatgaaattaagtaattaacagaatggtctaatccagccaaagctaaaaatataggtcaatgcgattggtaaaaagaaagggtgctgcacaaacctaaaagacaacaagtacatggaattgtagaagtcaactatgagcataaccacacgtacaatttatgaaatttgacttctttcaaaaaaaaatatgcacatatgaaatttcacgaaacaaactaatctcaactctcaaccatagtagcacacccttcagttatctccaagatttagtacaagttcaagaattatttggcaaaagataaacaatcaagacaagcagttctacataactcaccactggttaatcaaatccaagcgtggaactggatgaccagtggtgaacttaaataattcaaatgatggaagacaactccagaaaaaaaaaatgatgttcaaggtgtcaacacacactagttttcagggcagggaagaaatatatagctcatagcaagtgtgactggtcccagcatcccatatttacgtaaggatcttgtatcctgtgtatttgggcatgatttcattttacgaatggttaaacatagattctcacaggcctcacaccatactagacagaaatgcccttcctagtttccatgtaaaatcagagtggcaccacctatcagacgatgctactcaggtgggaagcattagcctgagaagctagcacagaatttctgactgaaacatatacacgtgaaatcatgtcgcttaggttctcataaacagcatggcatcccagtacattaccgtaatttcctctatctttccactcattagataggcacatagattagtattcacatgtagaactggttttatacttgtagactactgggttgagattacattcactcacagctttgtcccatatgtgaacatggatattctatatgtgataactccagcatacttgctgacaattttactggaaaaatctgacatgccatctcaaagctgctatactatattaccactgacatggcatgtgctacgaacagcatcagaagataacaatgctgtagtaaattaaatttcaagaacataccttgtaggcaactacatgagcaagtggaaaaccctggttaccattctgtgcaagaagcgagaaatcaccgataagatctaaaatcttgtggcggcaaggttcatcctcaaaccgcagtggtggattaagccaaccaccagaaatactgccaatagccaatgagtatacaattatataattgaattagaacaacgtaatctgcagtttaagctgtgcaacaatttcaacgcctagccacatgagcccaacatcatcaacaggcatatctttgtaaaaatagttgcactgccactaattgaactgtacacagtatactaactttggatggtgatcatagaacacgaataaagttcactgctaagctattgtgcatagtattaagttcttttcagaaaacctgaaatatgtattcatgctaacctagacaatacaaacattaaatagaaagcactaagcaggttgacctattttttaaaataactagcaattataagatcatttgacttgttactcattcagacattgcgccagacaatatttaagaaacaacccgatatatttaagaaataaagcaacaagtggaagtccaaatttctaaatccatacaggttgggatgatgccatgatctgattattgcccaatatcaaaatccatcatgcaataagtcaacaggtatgtgcttctcagaactacgtcaaggaaaaaaaatcaccaacccacgacaaagaacacaaaattccaggatatcattcctcacctgcaaaccgtagcattttctagcgatcctcctctgatgagcccagcagaacgcaatttttcaacctataaattccataaatgcagcaaaatacaaaaatgatcttccggtcaaaattaaaaaaaaatggaagagaggataaaacaataatgtggacagcacaactagcagaaaatgtaagtacttcaaatacttaggccttacccgtgcaagattcgagaaattgctgactactccaagatatgaaaacagatgtgattgaaagatggatgatctaatgcaacatgagatcgtgacaaagtagatgaacgcgaaagcatatatggaaagttacattgccatgattcttgtaagagacaccataagttgcatgaacaaaacatagaaggcaacatccatattgtataacatcaactactgtaaaatacctcttcaaatatacagaaagttcttgctggggctatcttgcttgagtagacattagcatctaggactgttgcgaagcgctgacacccaattcctggcacctgcaacaggatgcatgctctgctcaagttctaaacatatattttgagatattttagcattgacatccaagttaaatattccaaatattataataaagacactcccttctgatagagtgattttttggacattcaacgacatggttttgaaaacacaactttgactattaatttctattacgacgtagttaagatggtaaacatataataatatgatactacctttattgacaatctgtgcattttttacctccaatatattctcataagatattgatagctgatagatagtgtttataagttactgttactcactctgttcacaaatataagcatttctaggttgtttagcagagattaaggttgaggagaaaatatttttggtgccgctcatcgaatgagggatgattgggggtgagaggattgttgagggtaagatggggataaatttgaatgaggtgattgatgggataagtagttcggtaggacttcttatatatctagaaaaatttcaaatgcttatatttgtggacaaaggcagtaggtagcatacactgtattgtcacctgagggaatagataatatgtggtttattcatgtgattcttgaaccttagaaacaaaaatcttgaggtccaaaataagggaaactttgggtaagctgacctttatttcagtgcatattaacaaaacacccattatttaaacccaattacataccaatcacatgtattgcagcataatgaagacataatcaacattacaaaaggtaagactaacttaattatcagtaatcctataagaaagttagaagaagaaatagaagcaaataagggtttaaaagaactgcataaaataaatgaatgtgcttagaagttagcatttcctgatcataaaaggaagagataaaacatacttttggaaaatcaatcccataggttatacggattcttgaggaagggagtgcagctatgaaacaatcagacttctgcaagtaaacaggctcatggatttccggagccagtttctccagtttctggccactggaatccttggccgcacattgacctgcacctcttatagccatcacccactcttgcgctgatccatcaagcaacggaatctgtcatcgctgaacagttcacataaatcgggaaggcatcatgtgcaaacatttttctcgtggcagtgcagtcgcacatcaacatctatcaagctcctcgagataccaaaagggcgccgcacctcgtcgccgccgctgacctcgacgcggcagttgtcgacgccgagcgcctccatcgcggagagcaggtgctcgaccgtgcgcacccgcgcgccgccccgccgcagcgcggtgcatagcggcgagtgcgcctcggcattcgccacctccgccgccaccctcgtctcctccccctcaacgacgaagtacctcccctcgccggctcgcgcggggagcagcgtggcggtggttttcgcccccgagtgaagccccacgcccgacctgctcaccgcagcggcgagcgtctgctgcggcaaccctgtctggtagagaaagggggattagtcagtatcggagattcagagaagtgttttgcaaaccatcttactcactggtttccaggagaaggccgcgcgggagacggagttcagggctcgggcggcggagccgcacatgacggcggcggcggcggcggcggcgaagggattcaacttctcactttctcaggtgtggggcgatctctgcggagacgggcgagcccccgatgagtatgacggtgggactaggccggcatttttctcggatccatatgtcagtactccgtcccattcggaaaaaaccggagcggggaccgacccggtgagctcgttggttcaccggtcagaccgccggttccccggttcatggctaattattttttaagtcataattgactttcatatgcttgtggcgctgcattcattgaactttcccaccaaaccaactgtgccagagatatttgttggtttgaatgaaatacctattctatttagcagtttaaagtcaattatgaagtaaaaaataattagccatgaaccggtatttaagtcatgtctagcacggttttcggtccaaccgctccggttttaagccggttcaacagaaaaccttctggttcgatgttttttaccggttcaatgtaaaatttaaaattttccatgcagctagcacggttttcggtccaaccgctccggttttaagccggttcaacagaaaacctgctggttcgacggttttgtaccggttcaaatatattgactgtcttttctgtaaaccgaaccgtgacatgcactggttccggttttccggttgaaccgttgggccggtctggtttttttactatgattccaagtgcagccatgattttccgtgcacaattttaaccgtccgtcttatttaatttttttttaaaaaaaataaaaacataagtcacatataaagtactattcatgttttatcatcttataataactagcaaaaatgcccgtgcgttgcaacgggtaaaaaaaataatccaatgacaatagacatttttcaagcgtacccatatcaatgataatgtttctatggatcgttgtagctaacacaattagaaaattagagcatctttatgtaatgacccaaactcgatgatggcaatctttttaccaatgcttgctttaactaaaataattggattattcatataacaatatacatataataaaaaaatattctttcaatattattcttgcaaccaataataggttaatcaaatcctacactcaggatcaagtctacacaaaatagtcaccgtgcactcttctctaaataacaattaaaaatatgtttatttttaatactattttcatataatatgttattaaaaaaagtctgataatgataattgcatacaaaaagtgcagggattagatgaggaaacaaatgatgtgtaggagatggaaaaatatcgatggatcttatccgacccaagcgtccatcaattttatctcgctttgagtcggacggtttctcggagcggttctttttataaacggcggtttttttctcgcattgagttggatggtttcctctattttttttcgaaatgatggtttttttctcgcattaagtcagacggttttctcgaaccttattttgaaacatcggttttttttcgcgtgttgagtccgtttgtttttttggatctgttattttataaacagtgtttcatcggttagttttttcagagcggcttttttttataaacagttttttttttcttgtgtggttttttgaaaccattttttttagaaatggtgtatttctttctgatagtttttaatagcattttttttgtttttttcagacgaaggaaaccgtatttttcccgcgcatttttttggaaattatttttttcttgcgcatttttttcctttttaacggatgatggaaacttctctttctaaaaagttagattagattgatagattagattagagttaaagagatatatacggataacaaggggcgactttaagtttggtcgggtcgttttttcctccttttctttttacggagtttgagttagatgttttttttcttttttttattacggacgagaaaacctctttttcacgagtcggacttttttttctctacaggagtcggtcctttttttttccttttttttacgacagaaggttttttagagatagatatttatttttaattaggtatttattcacgcgtgtttcccttcggatagaaactttttttttcgcactattctttccttttgtaggaagatggaaactcttttgtcgctcggaattttttttatttggaatcggacagaaactatttctgtgggtaatttttttataattaaaaacggaaatttctttaccggttttttttggatcggacaaactggtttttttcgcccggttttttttcacccggtttttttaccggtttttttggatcggacaaactggtttttttcgcccggttttttttcacccggtttttttgacggacgatggaagcacctcttattttttaagtagtagtagatagtagataaaactactaattataaaaaaatttcaaataagacggacgatcaaagctgggcaagaaaacttatggttacacttataaatgtgattggattaatcaatgtacgagaaccactgacttgttatttcttggctgtttccggcctataaaaaattctccactccactataaaaaggaaaaacttggatcacaggtatattaacagccctatggtttcgcttatactttatggttttttaatcatgatttattttacagcatttacttttttgtcgttaaaaactcgtatataaaagttttaactatcaattattttctacttgctaataaaaggtacggatgaggtgtactccctaggtcctaaaataaccacctaaaaaaactgttgtaccagccccacgttaaagcataccaaagtgcagaactggacaggttttagcacgacagagtagcaagcaaagattcaggtgctccacctgatcacatgtaagctatgataagctgttccccaacttgatcagcccaaaaaactcagcatgttacaaatgtctggagctacagaaacaatattctgaaaaaaaatagagacaatccattatatgccactgagtttgtcatagctctacgatttgccactgactttgtcacgttctataatataccatcgacttttacttaacttctatgatttaccatcgccgtccagttagtctccgttactactgtacaattttgtccaaatgaccaaaatacccctgggataaaacttccaaaatgtggacaaaaattctgaaataccatattataaacataagattgtaaacattcaaaatttgtccaaaaacttaaagtctgacatttcagaatttttatccaaaatttgaaagtttt

SEQ ID NO: 10182 - DNA, 9208 bp, Oryza sativa
ctgcatttggcagttggcgcgtcttggtttgtactatgaggttttagcatatggttcgtgatcatatacttgatacaaaatcaccatggccagtaatttttttttgccgtgtagtagagactacatagccacttaatactagttaatactgttatttgtcgtgactagcattatgtggatgttaatgcatcaacctacctgaatgtcctcgcaaaaaggtaaaagagaaccactactacctgaatgtaactgccatggccccatgcatcagcctctcaatttttctgattaaaagccggtaaatactcatatatgggctgtgtttagttcagtataaagtttgtattttagttaaaattgaagatgatgtgactgaaaaattatgtgtgtatgacaggttgatgtgatgaaaaaggactgaactttgaatataaacacagccatggagttggcatagagtaacttaaccgatagctagccgcaaggttattcttttctgttcctgagtcggccaggggaggagactgacaaaccagtggatcatggaccccgggcaatgtatgccgtgaccattcaggtttcatttctgacaattaaaacttctgaattacactgtttcgatgaactcaaatatagttatatttaaggcccgttcatcctatgaaaatggtggatgaaattttgaattaaagtggcacgcttttcaaactgctaatcggtgcgttttgtgcgaaaactttccatatgaaagttgttctaaaatattagattaatccattttcaagtttgaaataattaatcacatgccattatcacctcgttttgcgtgaaacacttaatgctcatcttcagaagattcaaacaccaccatgttaagtgttattttcattctaaaataaacaaacctactaccacagaatataacacagcctaatactacgatctagacagaaatatattatagtactagtatgtatcacatcctgtattattttagtctattttgatatggatcgagtatgtcgataatataatatatttttaaataatttaacttattgaaaaaaaaggctgtaaaagtttataaaaaatagtatttgatgacaagggtacggatgaaggatatgaatatgacgagtattgcttgcttaaaattccttgctgtaaaggtttcgttgctactgtccagaacaactgctgaaaattaaagactgcacatcatcgccctattaccctcctaggctcctacaggcgcctaccgggcaaaggaaaccaaaaactgtttcttaaggaataagacaggcaaaatatattaaacctattggagaacgactaatcgactatatgagtttgactgtttgatatttgacgtggggagcactacgaatttcggataacgttttttattttttgctgataattaaccatctgccaaattaggacaggatgatgcgattcattagcaaaatttattgctgcagtcccaccctagaacattttgcagatgttgcttgcctctattttttttttctcatcttcttctcagcctttggtcctgtttagatcccctgataaaattgtacaccctatcacatcgaatgtttgacacatgcacgaagtattaaatatagacgaaagaaataactaattacacatattgcgtgtaaattgcgagacgaatcttttaagcctaattgcgtcatgatttgacaatatagtgctacagtaaacatttgctaatgatggattaattatgcttaacttaataaattcgtcttgcggtttacatgcggattctataatttgtttgttattagactacgtttaatacttcaaacgtgtgtccgtatatcgaatatgacacgccaaaactttacacctctagatctaaacacagacttagctgaatattgtactgtacatttgcttccccctctatatatatttataaaaggtaaaaatagcaagcataaagtggtaccttcaaaaagaaaaagaaaaacgcttgccaaattgttcagtgtatagtacttctagttcggatgtctgttcagaagtcactttatacaaatactgaaatacgtgagctgtcaatcaatgctttgattactgatattgcacagcacggaacttatggcgaaataagagcttgagaacagtttcatcggtggagtagtaagttactgtagtaactaattcgtgaccagtggtaaaagaaaaacaataatccataacctggactgtttttctcattctttcctgaacagaacacaacagtggaactctgcattacattcataaaatggtaatgaaaattgcaacattttcttttgcgggatgaaacttccccgttctaaactataacaattcaagtaccctatttctaagagaagaggtacctgctgaaaatcgcttcaataaatctgcttaaaaaatctattagatatttaggttcgtagtactccctctctaaatatgaatatgggaaatgctagaatgacttacattttaaaacggagggagtactaaattgtgtctaattaatattatattttgagatgaagggtataacttttttttgcggggatggatgttgcaggtaaagatattgttttccaatgtttcttaaaggacactatgcttcatccaaaaaaggacactgtgcttaaacaaaaacatttcaatgtacaagttcggtggagacagccacaaggccacaagacaggcgtggcgctcagcattgaagaagttcatgcaccaacgttctaaaattttatatgatcagacttctactacatgattgcctagattttaaattcggtccctaattccaatttgagctaaattaagtcacgggcatatgcatgggcacacacctccatcttttattgttcttttccacacttgctttccaagccaagccaattccgttcggttcatctctttggcctcgtcgctttccaaggcagccatgcttaacctaactaagaacctccagaacgttgctgatgagaaaaaaaaaacattattactccaccgcgctcacgccaaagagatgatccaagctttgatcattcactgtagcctgcaggtcactatctgaatctctgaatttcgtaagatccactatagttaattcggtagttgaacttcggtcgaagtgggattaagcgcttcttaattattttgggccccaaagtttctctcagactctgacggctgaaaagattattacactgtcgatcgagaattcgagattgtagcgaattgacaacctgatgaagggatcgatcgatagtgaggtgtgcaatggacacaggaatggcgggccgtcggtttgttgagatggcctctctcccgtcggatactgtcggtagtagctttttgccgtgttctccgtcgccgtaagatggtgtcgtccatgtgaatgaacactgaagaatgaagatctgaagtgaccgtgtagcggttagcagtctgcagcaaacaaactgatcgtgatcggaaactgagggaggtgatgcataaatcaattcaaaatgtaaccgcgtgattttagatctcaggttggaatctgtaaatagatggatgaacagagtatctgtagtctgtacacgtataaatggcttcaggcatggaggagaggagcgatggccgatgggactcacgccgcgcggcacacggattgtggcgatgggctgagcaaagagtcacggggccccgcttcccaggtgggtcccgctctttggccgggtgggccacccacccaacgaccgtttcacgcatggcgcaccaaaacaaaaaccacacgcgtcccgtcgaacggcatacggggaggagaaaatacacgccgcggcctcgtcgtgtggacgccgaccaccggaggcgcccgtgcgtgggtcgggaccacggtacaccgagtccagcaacgttagcgaggcgcaaaaacaaagggctcccatataacgcaagctgcaagcacgcagccacgctcccattccgcctctcctccacctcgccaccaccaccctccactccctcgtcgtgacaggccggacccaccgccgacgatggacgccaccggaccaccgccgccgccgaccgcagtaggctccgacgtcgacggcggcaccggctccggcggcgcgaggacgacgaccttcttcggactgtccacgtccgccttggtggcggcgggggcggcagcgctggtcctcgtcgtcgtcctcgtggcggccggcaccgccaggctctgcgcgcggcggcggcggggcgcgaagcacctgtcgatgtcgcgcgtcgagcacgcgccctcctccggctcgctccgccaggcgtcgtcgtcgtccgctcccaaggagaaggaccacgcggaggccggggcgggcaccggcaccggcacgagctcctccgacgtggccagctcgtcggccgcggccagctacctggagtcgccggtgaggcggaagccggagaggatcagctgcgccgcggcgatggacatgggctgggggcggtggtacgacctggaggagctggaggcggcgaccggcggcttcagcgaggagaacgtggtcggcgagggaggctacggcacagtctaccgcggcgtgctcgccggcggcgaggtggtcgctgtcaagaacttgctcgatcacaagtgagtactcacagtttttgtttttttttgttcgtccttgttactgttcaccttttgtactgtagttggcacggtcaaaacgggcattataatttccagtcattccagataaaaagatggcaactgtaaaagaaaatcaacctaagcagtagcagtaatttttttttttgcacccttgttaccttattttattagagattttttcactagtttaaatatatgaatgcgtacaagtttgttgtattcggcatcatatttggattttggtctagtttggtgtacgtgatgcttttcttgattaattgcatttgttgttaatttgtcacaataagtggggtggtggttgtagttgtgttgttgatatggctttaagtatgccagttattatggtcatatcattgggaagatatgcatacatgtcgacttattagcttaaacgcaaaatctgtcctagagttaatagcaatgcatcattgtcatgtgtactattaatttctctatgggagggttttcatgaagtttgtaaagcctgcttccgaattttagcagccaatggaacgcatccatgacatatgtagtttgtcaaaatgcaacagaattttacggacctattcccctgaaagaattatttattgattactattcagcaaatgtcctagttcaaatactctggaaaaacctggggaaatttcaaggctcaaactaccggatggacggtgcttgagtggatgattgttttctagtaaaaagtgtaatcgcgcaacttatgaaagcagctgatggactgattagcaacctaacgttgttcggtggcaaattgtcaactaatagatctagtgcggttttattcctgggaagtatgaaacaactaactgatgcagaatttattttatttttatttcaaaagtacacccagtaaatattgtagagaaactcttttttgtctttgccaaaaacaaagggtaggtctttgcgagctttctttcttttttttagggggggtggggtggggggggggaatacgcaaggagcatttcttttgtattaagtgaaataaatagttatttacatgaaagaaaagagcagcaggggaccgaaacaggaacaaaaattcatagtaatatctctcacactaaattctcgcgaccaagcatccttctgaatagcagggctagacttactgggtttgtttgacgccagagcgctgcttcttccaccattcctctcgcaatgtcgatccaagccctttgttgctgattgaaaacccgattgttgcattctttccatattatccctttcttttttttctttctttctttcttttttttttgccaggcctttgaaagctttcttaaataagtgtggttcataatcttcagttgtcattttgactggccagacaaaagtcattagagaacctattttttcttgcagaaatatatagtaagcaatgcagaggttcttgcaccctgaacttgcattatatataagtatgactatggtagtaccgatgtcctaggtttctgcgaattattgatgaatttcttacattgtactaaatcaagaagctcatgtgaaccagtcaattctgttcagattaatgtccatagagaaatactgctacttttaagtcaatgttgcaaagaatagttattttttcttttcttcctttctagttctctgcttcatttttttccgattcatgtgcctgtgatatcagttggtggctctttttgtgcttttgtgtgatggatagtatatatccatctacttagttggtagagctcgttggcagtcatatgcaccgatctatcctttctttcaagaaaagataaagcaagagaaagccaaagcgatgagccgatgaccatgcttttccttttctgatcctagacataggcaagaaaatttatagggttattagctttgacgcagttttagtttagctttcaagtaaatcaagtgcacgcacgaggattggctcagggacagcaacagtatgtttgttttttctctgccaacgccaaatgtgaaatggatcagtgagatttctatgcaaatggtttataatgagcagcaagagaagttgatgaattataggtttattatatcacgtacggataatcatgtctgaagaaattagggatgcctgctgatctggaattaaactgtcctttttcaggggtcaagcagagaaggaattcaaggtggaggtagaggcgatcggcaaggtgaggcacaagcatctggttggtctcgttggttactgcgcggaagggcccaaacggtaagtgatgccaccagctctgaatcctcgatgagttctgagcattaataattcagcagaagtgaaaacgggggacaatgcagcgatgcaaataatcaatgccatcatcactccgtgctcacaggatgctcgtgtacgagttcgtcgagaacggcaacctggagcagtggctgcacggcgacgttggcccggtcagcccgctgacatgggacattcggatgaagatcgccgtcggaacggccaaagggtgatgaccggtgtcgatttgccctgaatttccatctctcgctcttccgtatcggcaggtgactgatctgacattgtggatgctgatattgtccattgcagaatagcgtacctgcacgaaggcctggagcccaaagttgtgcaccgagacatcaagtcgagcaacatcctcctggacaagaagtggaaccccaaggtatccgacttcgggatggccaaggtgctcggctccggatccagctacgtgaccacccgtgtcatgggcacgttcgggtatgtacacgcacacgtcgtgacacacgctcactgtctcaccgccgctccgttgttgatctgcaattttttgtatacttcgctagctatgtcgcgcctgagtacgcttcgacgggcatgctgaacgagagcagcgacatctacagcttcggcgtgctgctgatggagctcatctccgggaagagacccgtggactacagcaagtctgtcggcgaggtgatcgatctatgtcacagcagatgggggtgcgtcagtcaatctggcatttgtaggtggctgacatatattgtgttggagcgcgccgtgcaggtgaacttggtggagtggttcaaggggatggtggggagcaggcgggtggagcagctggtcgacccgcggatcgaggatccgccgggggcgagggcgctgaacagggtgctgctggtgtgcctccgttgcatcgactccgacgcgcacaagcggcccaagatggggcagatcgtgcacatgctcgaaggcgacgagttccccttccgcacggtaagtgtgtccacgtgtgagtgacggggctcctctaacatacgtaaaagagacgtgtctatgggttcatggggtgaacccacctgttaacgacttatgagtatgtttggatagcttttagctgcggtggcttctcgcagaatcaaaagttttctcagacagtccagcttttgatccagattatgagaagctgtagttatagaatacagaaaatgaactagaagccagaagctgagaaacccagcttttccagattcttagaaactggctttcaaccagctgcttcttaaaattttaagatcgctaagcaggccctacatctctctaactttatgttcgaagagctgcttcagatgcgctaatggcgcaagtcatatactccacttgattgcgagctaaaggcagctgcatcttgcaggagcaccggacgccgagggcgacgcaccggacgtcgccaaacaacacgcggccgttgctcatgtcggagaaggtcggagccgatgatttggacaggtcgatgtggcgatgatgatgatgagcagctgacatttttctccctcgacacacacggtgtacattttttggttcgtttaacgcgcccggccgggatccagcgtttgataatgttgttgcttttgggggggggggggggggggtttaaattgtgtttggcgtaatgtataagtgacacgatgttttaaaaaggcaatgtcgtccctgaccaaacgttgatacgctccctacgcgactgatggcttcgtgttgatctggccggggacggttgagtggttttcgtcgtggcatgtggcggtgctctgctacgcatttacagtgcaagtgctttactccattgtctcaaaaaaaaattacctcctaaactatcgcggcgaccgaattacccccataaacctaaaaaccagacattgcttactcagaactttcaataccggacgaattaccccctcgacctaatctaggagcagttttatcctacgtggcgtatgcgtggtaatccggtcaatattttatttattaaaaaaatatgagacccacctgtcattctcctcttcccctcttcctttatctcttcacacacacacacactctctctcatggggcggcacgtaggggcaggagctggtcggcggcgcggggacgggcggtgcggcaggcgcaggcagtcggcacagacagggcgctcatggcggcacgcgcggtggcgg

SEQ ID NO: 10183 - DNA, 8950 bp, Oryza sativa
cgtgccgcaccgtgagagagagagagagagagtgtgtgtgtgtgtgtgaagagataaaggaagaggggaaaataagtatgacaggtgggtcctatattttttttaataaataaaatgctgactggattgccacgtgtacgccacataggacaaaaccactttggattaggttgaagggggtaattcgtccggtattgaaagttcagtgtgagcaatgcctggtttttgggtttatggggtaattcggtcgatcgcgatagttcagggggtaattcatattttttctactttttcttaaatctaaacataggctatcaaattaaaaaatacaaaaaaaagtcaaatcagtgttagaaactgaattgggccgcagatggcatgggatggccacatgtcaagtgaagcccatgcaagcacactgaacaacaaatacaaactcttaatttcccataaaaacaaacctaagacaagttaagacacatcataatagttcatccgttttttaatatatgacgccgttgattttttacatatgtttgaccaattcgtcttattcaaaaacttatgtaattatcattattttattgtgattaaattttttgtcaaatgttctctaagtatgacttactctttttatatttgtacaaaagaatccaaataagatgaatgtttaaacgtttgtcaaaaatataacggggtcatatattaaaaaataaagatgaatgtttaaacatttgtcaaaaaaaagaacggggtcatatactaaaaaacgaatgtagtactatgaatttgtactgttcggattttttataatccggattttagtttagaatatatcgcatctcatcctaagtttgttttttaaggacggagggagttgcgcttggtagggcatcgaaaaaatagaacgccagaatgactacgacgataactttgaggccggttcagctcctcgtcgatcttcttccctacatctcatcttccctacttgttctacaaactcgccgtatcttctagccttgtatcctaaactattttcctcttcaggtacaccaaatatatgtgattttcattgttattagaattagagaaaaagttgctaacaagtacatgcatggtcctaaatgtttaaagcgaggtcacatttaggtccagaatattgtaaatacaatatttagatactttttaatgtattatagtaggtccagtgcacgtctgattgtgttcgacagccgacgtggctatccaccatgcctacacatatgtagttagccccctctatggcgggggggggggggggtgagggggggtaatgcgcgactagtcgcacggctcccccggcgcgcgactactctgtacgtatgttaacaatcaaatttggtaatatctgcatcggaaagaagattggattgaagcggaatcaaacatgagaattatcgcggaaacagagtaagaatcggctgaggtttggatcggctaagtccgagtcagactgggttaagtgatacaaccgattccgacaatacaacttgtatccgatatcgggtttgagttgacgtacttcaagatgattgccatacatggatagagtcctgggaaggcgattaattgtatctattaattaagatattttatgtaaattccttagagataaatatgggtaaaagtctgccgcaaagacttatggtatcttagagtttgttagagataatagtcgtgtccggtatgggcatatcttgtaattctcgggtataaatagaccccgagccctatgtaattttaaacacacgttcaatacaatttcggcgcatcgccaccctttcgctttaattttattttgacaagttcttgctttcgtgttgagctgcatcggtttcgatcttcgacaagaggtaaaacttgttatgacggcttacgttctcgagattcgtcgagttatcatatatcttacataatctttgacaatatcgttatctaacctactatcgactaacatctgttagtagaaggcagccgattaggttaaattttgacgttgatttagattatataagatatctaccactctatgaaactcccagcggcttgattgtctagatattgttcttcttttcgtacttaatgctgcatcagttgagtttgatctattaagtcgtgcttagaatcggagtttcagccgatcttatctgatttaactatatttgctctatatgtttcattgacacgttaaatctgccctttatgtcaaaatattattgcatctaattatattaagcttctgtttagtatattctgcctgttttaacatcttaacatagagtcgtataggagtattagccattatatgctagatctatctgatcggctatgctatgaacatatataatcctgttattaatgtatatttcgatctaagtgatttatacggtctcggcatggcgaccgaatctatcccaatcacttgatttaagtatgtatcgatataaaaattatatattgttaatatctacagccgatcgaatagatttagttctttattacctatttgcaaccgccgatcgatttacatatgacatcggctcagagataaatgatacgtcatcggcacttagccgatcggctatcatttataggtttaaactgcggtttctttatatttatttcttgttgattgcaggatcaaatcaactggcacgctagcatacccgaagacgagttttggacctacactggaattaagcagatctcccaggcctcgtgtttttcgtcatcaacgtactagtactagtctattacaagtagtactactacactaatgttataataatactaatattattactatatatatatatatatatatatatatatatatatatatatatatatatatatatatatatatatatatatatatatatatatattatatttatatatttttgatgtataaaaaatatacacatacaaagtttatatacgtgtcgtatataaagtttgtatacacgtatacaaagtttgcatgcgcgtacacaaagtttgcatacacgtacacaaagtttgtatgaatgtatacaaacttttttataggtatacgtaaatgctaaaaaaccgaaaagaaaaaaacggaaagaaaaccgcaaaaaactgaaaagaaaaaaaaagcaaaaacagaaaaaaaaaccaacagaaaaaactgtaggccccacctctacgcatgcgctgtcgtgtggccccctccgcgcgcgccacgtgcctcgccgcgcggggaggcacgtggcgcggctgaaataaggtcagtgtcctacaaccaaaaaaattaccataattttcgtgtgtagtcaaacaaagtcaacttttttatgatatccttcaataaatatcatatttcttcgagtgtcatgtagtaaatagtttagaaaacaagatacgtatacttatcctgcactcattttcgacctaaaattgcagccattggttcaacacacacacacgagtgcttttggctaaaatttcataaaagtattaattttaagaaataacattaacagttgtcctctggccctgcatttcatcaatattaactctaataaaacacataaatatcaatcttcatcctaaaacaaatgaatgaatacttagggtttgttggcacacttttcaaacatcagtgtgtttcgtgcaaaaaagttataatattagagttactttaaaaaatgaaacagaatctttttaaaataattaatacttaattaattatgctaatcacttttgtttgcatgcagctaagggcagtcccaatctctacctaggattgtatctatgacatttactatattgctatatagaacttttagtttatgtggtactatattaattaagagagagtgaagagaggaagaaattgggtcccatgcaagacacagcttcaacacaagaacctacgcactagatgctatcaagttttgagagaagtgtctttataatagatgaagaataaatatgattggtagagaagagagatgatgtatttattaatggccaaatttaaaaaaccatggattgtagagacattatatacacagtttataaatactatggattgggactaccctaatcagttgtttccgacctctatttccaacctctatatggtagaacgggccctaacctcgattgttcttgtttccaatctctctaaaacgggccctaacctcgatttaaaacaggcccttaatcaacctaggcatgcagtcgaactcatattcgtaatttattactagcattttcgatcgaataactcatactagtaagtactccatttgtcttggcccacctacatttgcatttaagcttgcggcccaaataacatgagtattacgtttaagggtatgttcacttttgatgtcattttcaatcttaccaaattttaataaaattatcaaaaaaaaaatatttatatttaatttaatgccaaattttagtaactatataacaaatcctaccaaaattttaaaattttagcatgttacaaaaattttaaaattttagcattaccaaattttggcaagatttttgtttcatcaaatgaacaggaccttatattgagaacagaactgcacgggcatgatcactttgatgtaattttcaaccttactaaattttgataaatttactataaaaaaagtggctacatttagtttgctgccaaattttggtaactatataaaaaatcccaaaaatttgactaagttcccaaaattttggcattggttggtaaggttttttttaaaacttactatatatataaaatagctacatttagtttgctgccaaattttgataactatataagaaatcccaaaaatttaacaagttccaaaaaaaattttggcattggttggtaagtttttttttagcataaagtaaacaagccctgcaacttaccaactgttaaaaattaaatcaatacaagtacctattaacgagtatatcaatacaagtacctattaacgagtataatcttcacctaatgtagaccatttaaaataataaggaaaacagacttgccaagcacaaatgatatttggatttgggcctctaaccgcacaaatcccagtacaattggatttgggcctctaacctttaacaggaccttggtggaattgaaccaccttccatccgtaaccggagagcgtaagcccaacaatcaacggaggatctcccgaactgagaaaagatccacattaccgccaattaagcgaactgagattttcgtatgtaacgtccataactattttgtctaatggtccgatgttgtattacaagttggattttttttccctcaaagtaacaaattttataaaccatttcaaataatatatatattagttaaccaaatatgataagatttaagagtattttgaattgaaccgtttacctcagtttgtgcgtgcacttctttaaacagaaccaaaacatcctaaacacactacacaactctgaaaaaacaaaacaatactcgagtgatttttaccaaaacaatagagcccttcaaaatttgacttggtgttttctgccctacaaaagacttcatcagcttacttttagctcattattaactacataataaactcaaatcaaacataaccttgtgaaaaacgtcagctaatatagtagtgtaactcatcgtgtaaaataaaaacgagtgtcttatccttttggtataacatgtagccgccatgctgtttacacgacccaaattacagccatttacctccggattgacctcaagaaaacaaaccttccgcagcagagacggaactgttatccagaacctccatggtgctcaactctcaccgaagaaatttataatgatacatctggcaattagtccaaacaaggttggcaccccagacttcaaagctgcaacagcttaatccagcataccggaaagtcggtccaacaataaccatgaaaattgatgagcaccaacaattaccaacattagacaagtcattcctgaagcaccatgtaatgagcacaggtgatcacagcaaaacatcatcatcttgcttcagatgtcaagcttcagatgtcaagatcccagacggccacctcaaccaagtttgattcgcaagaatactcctttcttcgggtgacttcaggttgaacttgtcttcaggtcaccttaaaacgacgagagaatgctacaatttctacatagtacaaactatgatgaatagacaaatgctaaataactttttgcttcaagaacataaattctcgtacttcaacgtacagaaactaacataatgctaaggaggacaacatatgatcatattctacagcttgcaaaagaggttacattgctgactatccaagaaaagaaattctcacagtgcaaatatataaaacattactagccttctcgtacatgcataaatacagaaagggcaaagtgaaagagctgagcggttaaatcatacacaattagttgatattaaggcgcaggagcgctgtaaattctgggcaagaacaagagcttatttcacttaaattggacaagagttctccaatcgtatgctggaaacatcataatagtatttgaccaacataacatacttccaaactgatagttgacagttcggagtatagctgagcacataatctcggaagcaaatattaccactacaccgacttatggatatatttaagtatacaaagcaagtactagatattcgttagaacaattgcgtagtattccagctgctcttaaaccaattaccaagcgtaactttaatcaacttgagtcaatatgtgagatgcacttctagggatgataatactgctgtttatcagggatattaattggcaatgataataataattaagtaattcaagcaatttaaagtaaatccaggaatattatgtgactagggatattttaaggcagtgataattatgaaacgctgaatgatatggaaatttgattacgactaatattgcacatgtagattatcttttgtaccttggttgttgcgctgtagctccacgtttagattcacgcgcgatcgttgaacgatgtagtcgcagtgggatctgaggacaaccaggggacaacgggacacaagattggggggagaacccggggctaaacaaaataacccccgtgcgaactccccccaggacacaaaaagatcatctttattacggtggcctgccatgcgagcgcacccaacatggcaaaggccaatcttgcgatgtcacatctctcgtttttttttcgtctctttttcttttgaccctcagacacaagcacctcgcttgttacatgttctcttaccttgccgccttcatctcagcacacggctccctcgaacaacatctcttagatctaataattatcgaaagttcatcgaataattatcaatacaaagagacatcatcgcgcgaggccccgatggagaggatccaggcgacgaccagcctcctccctcgccccgccgcttcatccacgccagctcgtacggagcatgccccaaccggacctctaagaggtcagatctacacgcgacaacacaaagaaatccacagatcagcacgcggttgcgacatattcaggaaacaagccatgcaagtaaatcgaaacgaaacatctaagcgacacggatgctgaactcaccggctccagatctgactcgccgaacgcgaggacgagcagcagcagcagcttccgccgatagatccatggccgccgaaggatgagcaagtccatccaagatctgaaacctgcgcaacagaaaaaacaaacgcgtgttgtccatataaagggagggaaaacctcaccgttccggcatcggaggcgacggattcgacccggaatcaaacggaagtcctaccatggaagggattcggggtggcgaaattctagttctgggaggaggagatggggaaagcggctagggttgcttggctacggtgggtggtggagaggcgaaacagaggaagcaaggtatttatggtctggtcagacgcagcggacggtccggatgaggcggttgtgctcggacggccaggatgcgaggcacgtggcgcggcgccattggctgagacagctggatcgcacaaggacaccgcaacttgcggggtatttgacgtcactgcgtgcgtcatctgcttaaccggatcgtttgcgggagcgaacacgaggatgcggtttgtggccgacggtattggggatcctgattggctgcgacgcgtattctagatctgagctatttaggccatgtagcccaattttaggccttttagcccaaatgataatcacgaggtgttctataggccttttagcccaattttcactacagttggtcattgtatttgttggtggaataagtttatgttttctccctcctgtctagccattggtcgaatcgcatccctcactagcaaaacggggtataatgcctcccatttccgaaaaccgatacaaatcaactccttaagtggttttgtaaacgtttttgtcctatatgcgcttaggtggcattgtagatagaaaaaaataatggcagtgggtcccatatgttagtgaagcattcatcctcctccctctttttccacatcccaagccagcaattctggcgagctcacaccaccatgatcatgccgcagccaccacgaatcaagcatcaccctcgccgccacccaatttcttcagcgccaccattgctaatggcggcttgtagcgcccgttccgtcgtggtgcctagcgggaaaactatctcttaaaaactctatttgcgaaatatgtttctttgcttgctgtctagtgtccgtgccatctcagatctcaaatccccgatctatcgccgagttcaatcccgaatcccaatccttcccaaatcaatccctccgcaaaagtctatttggcctccctcgggttcga

SEQ ID NO: 10184 - DNA, 5414 bp, Oryza sativa
gcggtcgatgcggcgatcgcgggcgatcgggagggtgtagcggcggcagggaaggggggatctccttggcggtttgttcggagatggccgccgacgcgctctccatcatcccgggcgccgtgctgcgcaacctctccgacaagctctacgagaagcggaagaacgccgcgctcgaggtgagggatttcggctcgtcatagggggtctggttttggaacaatcgacgatggatttgagctggaattgtttttgttcgtggtgggctgtttgtgtatagattgaggggatcgtgaagcagctggcgacgtcgggagaacatgacaagatatcagcagtgatcgctctgctcaccaacgatttcaccatgtcgccccaagcgaaccatcggaaggtttgcttacatcgccgtcatcttcatattccctgctattggggatcagatttgttgaagttctgtggcgcttttttgttagcagggcggattgattggtcttgcagcagtcacggttggactcaccagtgaggctgctcaacatttggaggtctgttagctctttactggtcttatatccccgttgatttctctaatttaatcaaattgctattctgtgtatgctgaactcagtgcttgggatttagtattaaattttaagcagtgtttggttgtactgctaactggacaaaaaatagctgtagttttctttcctgatggtaaaacctaccagttttcaacacaccatataatcttgtccatggattaatctaagtctaaattgtttacttttgtatgttatagtatttacttgagacatctatcctgttaagttagggctatgatggactgcgtttcaggtcttcattaatggtgtgttctatcaagtgtcattttggttgcattaaacttttttgctctattcttccagcaaattgtgcctcctgtgcttacctccttcctggaccaagacagtagagttcgctactatgcgtgtgaagcactatacaacatagcaaaggtaaacattttgtcaagtaatggtacatgaattatgcgtttgctttgctgcattaatcttttctttattgtaggtggtaagaggggatttcatcatctacttcaacaaaatttttgatgcattatgcaagctttctgcagactctgatgctaacgtgcagagtgctgctcatcttcttgacaggcttgtcaaggtacgatcgtttgggcaactgatacatcctgtacgtattgcatccttgattagccctgataaacattgtttgtaatttataaaccaggatatagtaactgagagtgaccagttcaggtatgctacatatgtgatgtcctttttcaatctcaatatcatgcacaacttaatctagtatcgatttctgatagttcctgtatcttaattttgctatttagcatagaagaatttataccactcttgagggagcgcatgaatgtgttgaatccttatgtgagacaatttttggtggggtggataacagtgttagacagtgtgcctgatattgacatgcttggtttccttcctgattttcttgatggtaatgcctctcttacttttcaagtatattacttattacgttgacagttcagcaaccttttatttgtcacccctgcaggtttatttaatatgctgagtgattccagccatgagattaggcagcaagcagatgcagcactttctgagtttctgcaggaaattaaaaattcaccagtaagtccatcctcattgaaattgcttgtctatctgtatcagtcactgaacagtgagatgcaatgcaacatatgtatcttgcccgatgaatatccctttaataactttgtcttcatttataccacaaaattacatttttcattttttgggtatgcttccaatgctgatttgcaaccttaaatgaaaagaatgtagattatggtcgtatggctgaaatacttgttcggagagctggttcttctgatgaattcactcggttgacgtctatcacatgggtatttcttttgtcttctatgttttcttttgttaattttgatatcgaaatctaaaatatttagtctactttgatacacctgagtaatattttgtcacattctgcagattaacgagtttgtcaagcttggtggggaacaacttgttccttactatgcagatattttgggagccatcttgccctgtatttctgatcaagaggagaagatcagagtggtaattccctctcttctttggacacagacaattcttgaagatgtagcctgcttgtctgtcggaagtcatttctttaatctttatttactttttgttggctaggttgcgcgtgaaactaatgaggaactttgtgctataaaagctgatccaactgaaggatttgatattggagccattctctcaattgcaaagaggttctctactaaaccacttgcataggaaatttggtttcatgccgatgtatctatattcatggatcaagagttaaaaatatgtgcagtcacttgtaacatggcatttgtgaaataacaccgagcctttttcaatttcaatttcagggaattgaatagtgaacacgaggctacccggattgagtcattgcattggttttccactctcttagttcgatatcgtgctgaggtgctcaactatgatgctttttggggctacacaacatatattttaacaagctgtacctgcataatttgttcacatttaattttttatggactgtgggaggtttttcttcagacccttaggatttagctcaatttaaactctctcctgaaagtcccaaaggaatccccctctaacatggacatgtggtacacacagttcaaattcattattggatggtttatgttaatatttttttcttgtgtaacagttcttggcatacttgaatgacatcttcgatccactcctaaatgcactctctgatccttcagatgcggtgagctctcttacaaagcctttgaaactgcaccttttcattacaactttctgtgagcagctgattaattgctttatttgttatacaaatgatctgtgaccaagtcttgaaataaaatcaatgaaggtttaacttagtgagaacagtgtgtgctaatttattttttgacttggtgcaaatttagtgcatcgtgggcctattctttcttccatggataatataccaaggggttacttcatcccttcaaatgtttttttataagtaaccctcatggccctatatcagccatctgagtgtttggctttccaaaacatatacaattacacagacatgattgcgcttgcagtatagaaaccataatgggatgcttttcagtgttggcgttggcaatgattgaatccattttcgcttgctgttggcaaggatagatttgctgttgtttcccttccaaaaagaaaaacacctgctgttcttgccattggatttgtaatatcctttgttcataaatcttaataaagtctacttctccattgtcacctgggcttgacacaattatatgatagctataaataaccttcacatccccccaaccaccactgccaccaaaaaggaaaaatcatgctaaccctttgcatcatagttcaataaatgactgatgggctgatggctttatagggttattgaccattaatattttgctaattcaataaatttgttgtaccgtatcagagagcttggctattgtcatcacattttttcatgtgcaggttgttctattagtgttggaagttcatgcgcgcatagctgaagagtctcatcactttcatcatcttgtatcctacttaatccacacttttcacaacaatcatgttctactggagaagtatgcacatttccccactcaaaagttgattacatagtatatgtttctttgttattagtcctacttttagggttacacagttcactattacataaattgcttaccaaacaatggtttatgacatacttatacagacgtggcgcattgatagttcgtcgactttgtattcttttgggtgctgaaaaagtttatcgagagttctctactattcttgagaccgaaggtgaccttgaatttgcatccaccatggttcaggtatcccccactgttgcaacactatactactgcctaatttaactgtagacattccgtaactgttaaatttcttgtaggccttgaatttaattttgctcacatcaaccgaacttgctgagctgcgttctcttcttaagaaaacattggttgattcttgtggcaaggacttatttcaatctttatacgcttcttggtgtcactctccgatggctacaataagcttgtgtctacttgcgcaggtaatgaccaacttctaacttttgcagtttgtgtttcttacttgggcactgatctttggatgttcttttccaacatgtgtaggcatacaatcatgcaatttctgttatccagtctttgggagaggaagatataaatgtgaagtttctcgtgcaactagacaaattaatccgtcttttagagactcctgtatttgcttacttacgtttgcaggtagagctccattttccaataatacctcatctttgtttcattcggttgatatgaaactacttcctccgtcccagaatataagaagttttagagttggacacggttattaagaaagtaggtagaagtgagtggtggagggttgtgattggatgagtagtggaggtaggtgggaaaagtgaatggtggagggttgtgattggttggaaagagtgttggagaagttgttatattttgggacaaatcctgagggctaaaagttgttatattttgggacggagggagtagttgttttttggtttgcattttatttaaactttttgatatctcctaatgcttccacattcagtacaaatgctgtaaagcccatatgtatgtgttattcagtttatgtgatgtgtcacactgacactgtgtcagtagtagtttatgaatctttggtgacatgggcactgttcttgttatcttacttgtggtataggcgtatagcagtatggagaattgaatgttctgatgatactattctatgatatggtactccaatgatttgtttaataaaatttgcagcttcttgagcctggaaaacatacctggcttctcaaaacactttatggtctcctgatgctactgcctcaggtatgtttgatatctcattttttgtgaccctacggtcttgctttgatagtttcatgcatattctgtttccaaactgagaagcggaacacttgatacacatagagaaggaaattctcgtgtgttagattgttaggttggatgcaggaatatgcttaagttatgcctaacatggactagttagaactgttttagcttacttaaagtaagcaaagtatctggttgatgtggcaat

SEQ ID NO: 10185 - DNA, 19260 bp, Oryza sativa
ggcccatctccccctccctccccggctctctctctctctctctctttctcgttctctctctctccctcttctccgctctgtcagcgcgccgcgcgcgtgtgcgcgtgagccgcgccgagccgagccctccctctccgctccctcgctgccgcttcccgcgcgccgttgttcgcgtgcgcgcgcccgcgtggtcgccgcccgtgccgcgcctgcgccgtctgcgccgcccggccccactgcctgcggcgcagccgctcggccccgtgagccagcacgcgtgcccaagccgcgccgctcaaatcgccgcgccgcccgttgcttcccgcgcgcacgtgccgtggtggccgaccgcctggtcgccgccgccgtcagcctctgccgcgcctgcccgcgcctgtcgcccgtgtcgccgctttgctccacaccgtccccgccgtcatcgccgtcgtcatcgcccggcccccgccactccacgcgctagcctccaagggacggaggcagagctcctcctccctctgccgcgtcgcccccgctcccctcctccttttcccaaagaggcaaggggcaagccccctttctctccctccttttcccctttttctcccgccggcgtcatcctccctccgccctgtcgccgatttggccgctagccggagcgccagctcgctggcttgaccgtccaaagtcggttcccctctcccaaaccgacattgccatcctataaagcccaggcgccctccctctcttctcctctcgttgtcccatcgcctccactccattgtcgccgcctcccgtgctctgtacgccgtcgccgtttgtcgtcgcgcgtgtcggaggagccggcacgagcgaggacgcggaaggggactccgggcgcgccctcttcttcctcttcctcggcccgaggccgaaacgatcacgtttcgcgccgtcggctctcgtcactgcgcccgcccgcacggtagcgcatctccccgttctccctcttcgctccatctcctccccttagactcgggtagtagcatgagtagcctccccgtagctagccggcgccgccccgacggttgccgtcgctcgccgtgtgctcgccaccgtcgtcgcccgagctcggaagcgccgctcgtcgccggcctcgctcggcgccgctccgcccaatccaacgctagcatcggattcccgtagccgcgtagatgctctcgccgccgggaatcggcccctcgtgacctcgtcaccgtttcccccttcttccgccgccggttgccaccgccgcaatccgccgccgtcgagcatcccccggcaaatccgagccgttggctcgactcccctcgtcccgtgcaacttcccggtgtgctcgctttcgcctagatcaccgtgtttcgctccgccgctcgccaccgccgtccgccgtccgttccggccggcgtcttcttcaacctcccgccggcccgcgtggctgccacgtaggcgccacgtcggcgccagctcggccaagaccgggtcgagccgaccccggtcagccgctccctccggccccgctcgcgggcgcggtccaccgcgaaccacgcgcatgcaccgcgccccgctccacaccctagcgccgcgccgcgtgctccctccgcacggtgagccaagccgctgacaagctggtcccaccccggaccacgcgagatggactcggtccaccggcgccctctctctcccctccccgcgccctattgggccgtgtcctcttgggccggccggcccatttagctcggccgagccgccccttttctctcgggccgcgccctagccgcccgagggaagtctacttcccctccctctaccttttctttttccaaaagggtttaattaaatcatttttcctttagaccaaaaatccaataatcttataaattcaatatcttcccaaccgtaagtccgtttgactccgttcaacttccaaaattcctcaaatctcgagatctatctaatggcacgcttagaggtcattaataggactttattttcgccgtttgttgagtcgtcccgttttgcgtgtagtttcggagcccgaagacccgcagtgcgaggatttcgatgatcaagctcaagatctcgagcaaggcaagccacctttgaacatcttgagcctatatttgaacttaattatgttgcttgaaaaatattatgcattgataggatcgcacttaatctgtttgtcccgtctgcaaggcagattggcggacctacctagtttgttgcatttgatccttcctttgtcaattgttataccatattcacttgtaaccacccagttgcgcctcggaaatcgtgcactctgcacgagtatcgacggtcgccttcaaacttaaaatctgaaaaacaacttgggtaaaacttgggttttacaaaagacttggaaaacccgacacctgggtcggtgcttgcgaactaaatgaatttccaaaaccgcggaccggggatcgtaccgggtgtacggtttctcgctcttgcacttaaggaccgtttccttggaatttcatccgaacataagacaagtacgaccacatgggtggaatgggacacccctggctgagtaactagcttatcaggggagccttgatgccgagagacatgtggattcgccggggtggtgtcggggaggacccctgggcttcctggcacagtatggtctgggacctaacctgttgttggtctgggacccctctcgtcggcatatggtaaacctgtgtcggctttggaaatgccttgtcatgaaagcttggaggtctcccgacgtggctgatccccacgggctgggtgatccgggttagtaatgtcgtgtgggtaaagtgtaccccctctgcagaggttaacaaactgttcgaacagccgtgcccacggtcatgggcggatgtgaggtgattcctagcgtagttttgtttgactactgccttgtgaaattgctgttgtggaaaggggttcaatgtttggaaaatctgcagctgatgggatcagctaggcccgggtggccgtttgaaagttgttggcccgggtggccgtttgaaagttgttggccgggtgccaatcttgaacaattttaaagactgatacattgcacatactccgaccggacgagacgcactgtctcatccgtgtcgtttgagaagcactcacttagttgttttcagaaaagagttcaaataaaatcaattgcaaaaacaacagcctttcgttgaagcctgcattaaacacttatttcccatggcttgctgagtactcccgtactcacccttgctctatataaataatcccccccagttgctgaagaagatgaagcggatcccgctgacgaggagttcttccaggagcaagccggctacgatgagttttagggtttcggcctagttcccaagtcgcgcctgtgttgcttggtccaagtcttggcttccgcttccctttgtaatgcagttgtgagctcgggatctgtccgcagcccagcatgactgtacctctactctataataaagaactttgttgctgtgatattctgtcttcctgtgataccagcactgtttcctgggactggtatcgattaacaggttaatttagagtgtcacgggctagttccggtcgggactagtttggggcgtgacacggctgctttcgaccacaacgctccccttgccacacgcgttgttgtcacaaccttgaggagctcccaccgtcgcctgagggaccaccttcctcagctccaactcaccaccattgccgcccccccccccccacttgcacaagtggatgttttcgtggaggggggcaacggcggcgatgcgtcgaaggatatagatgagagagggccggcttggggatagcaagtgcctcctcgagctcccgtgccatcgtggcctatgatgtccttgctttatcgacctcccgcagcgcaatagcctccttcggcagcaacgttttcgtggtcctgtcacgtccatctgcagcagcttgtccctgctagtcccgccacatccatgcgtcacatatggatggacggcctttgcccctctccctcctcctcacacgtacgtcactcgacgaagatgatcacgacaccaaagagctagagaggaggcatggctgacgcatgactactaaagtccatcctctctttgggggcatgggtaggtggatctgtcatggataggaggtggagaccaaggtgtgggggcgcggcaaggcggatccatctccgccaacctgtccctctcctcctcttcgcaggcgttgatgcccgtcagtctgtccccggaccatggagaagaagcgataccaaagagagagaaaatggtaaagggaaagaagtgagactgacatgtgaggcccactgtcattttttttctatctagaataacacctaagtgccacgtatgacgaaaaccgctttagaaaactacttgagaagtcaatttgcaccggtttccggagataaggacgctacccggttttgtggttgagggatgatattcgaccaaaggcaagagataagggacgcagagacttattcttttcatggccgtgtcatttgggcctttagcccatcttgatttaattttgtcgaacattaatcgttgcttcaagatctgcaaactctttcagttcaacaaataaaagatgtttgtcatgccaaactttgtattacttgaaatgggccgtgggccggccttattccaactcactgctggactcatcatttatttttttgtttatagaaagaatactaaaataaaccatatgttaccgtatttattttaagaaccatagattaccttataatataaaataagaaatatttattatgtgaaataaattataaactttgatatactaattgataatatctattatattcaaacaaatttcactttgtcatggctatacataaagtcgcatatcaccatctttcgtaaacatacaggttaatatgggtttagatttttttcttttactatacatctaagtcacctacgtatattcatgggtaatattcgaaggaataattcatattgtcaaaattatttgtgctaattttgtcaacactatttagatgagaatgacatacttatataaggatataataggtttccatgcgacattttttattgtacgtatgtattttttttgtattttttttgtgaatagtactgcgcatattcgtaggatggttgtgcacatatttatatgagtgtctatgatttcgttttagatcattagttaaaaaaatattttaaaaaagttttgtgggatggcatgaagcgatgccacggtggcatgactttttcgataacatcgtaaagagtttcactatatatatgcataatttgaggaaaactttagtgctgcaaagaaagaaacaaaaaaacaaccagacggagcagatcatatatacattcttcttttttttttcctttttgacatctcttgtataggtacgtacatagggagagattagttggtttttagctcgaatatatccaatataatggttgaaaataatggatctaccagttgaagtgtaaattgatgaccagatattttcttttttatatttttccttatactttttttctaatttatgagatctattacgtgatatattaagggttcttgtagaagtgtagaattctattgcttatactgacaatatacttgtaatcgattattatttgctgtggcttggtggcatgctttactttacctatcatttgttgatagttctccacttagcatagtccgttatatatggtgcttcatgacataagtgctcgttggatggtagctaattattaggtgcactatgaatgaatacctcgtaagcaatatgacttgacgattagttgatagaatttatatacttatggataagtggtggcatatgattatatattaggatatttttttattcataaagtatattatatactacacattaaacattttagtaaataagcaataagttctagagtacttatcagattggttgctccttgttttcccagttatctacccattgatataggaattattacaaaagacatatcttttgataataatatctaaatccatctgaaccattttatgcactataattaaattgacaaccataacctacatcgtatatatttaaaagcaacttgtgtataattaaaatatattttatataaaagtttaaaaattaaataaatctattttggctttattatattcaatatttaattaatcttgcactaatgatatgtgtcgtttcatgtatcctgaataagctcagccatccagctacagccatccagctagatcaaatgaagcataagtagaagataaagtagatcagtatggtgtgaaaagaatatatacaatctttgatatttaaatattatacgaatagagaaaacacattcatgataaatttagtgatatcagtttgacatatcattattttttataaggagtaggtaacttttgagaattgctagtcacaattagaattgtttttattttaaaaaatgcaagtctaatttaactattacataatatatactttaattaattttttcttctcattggtgtttcgatgacatatatgtgcctatatttttacaacgtaagtagagcatagttaatatgggcagtttggttttctatccgagtgaaaaaaaaagaaaataaaaagatgtcgttagcccggcctgcttatgtacatatgtacgtacttttttaccttggaatatatgtacgtaccttttttttttggaatacctactaaacgtccgtacttatgtgcacatgcacataaagattggcaatattgggttttggagataattttaattggtatgttttacaatagatctaatggttgaaaatcatgggtaatatacgatggaataatatgtaatgttaataattagcatattattatatagatgggaatgatataattaagaagatataatatggttacatgcgacattttatgaatgtgggaaatactaaaatgacttacattgtaaaacaaaggaagtattatttgttgtggcttggtggtatcaattcttacctatcatttgttgatggtttctcacttagaattgtccattatcagtacttgataacacactgcatattagatgtcatctaattattaggtgcattaagcacggatgcctcataagtaattaatatgacttgataattggtggatagtggtttgtatatgaaacttatacacataggaattagtagggatatatgattgatatatttagctctattcctaattgacaaaatatattatatactatatattttatagtaaatttaaggttgagttctaaaatcttatcggattggctactccctttatggtgagatgtttcctgaaatgattcatgttttcagatactttctatgcaaagtttttttaaaatatcaaataaaaccatattcaagtttgtaatatttaatagttaattaatcttacgctgacgacatgcttttttttcgcgtgtcctagataagctcatctaatgaggtagaccgaatgaagcctaagagataaaaaaaatacatccacatggtgtaaaaaatatataatcgttaattttccaaaaatatatgaataaaggaacatataatatatgaaaatatattcatgataatttaataatgtcatttgggcatatcaatattatacagtagggagtgagtaaatttttagaacgctgctcataatttaaattctttttattttttgaaaatataagtccaataatttaactatgttattaagagatatacaatcatataatctacaattttaatttattaatatttttaatggatgttttgatgcgatgcactatttagaataaaacttgaaatagcatatatttttacaactttaatttaacatagtttttcatctaatctaccatatattaaatgaaaatcgatggctaatattttcttagaatttctataatttattagatcgccacatggcggcgtaggagcgtttctaggggtcctatgtggcggcttaggagggtttctaggaagtttaatggacttttagtatataatagatagatagataatagataatagatatattactactatcttactatatcctttcctgatcacatctacacatagcacaaactgccaccaaaaaaaaggaaaacgaaaacgaaaacgtgtacatgcatcctgtactttcctagatatttccttttgattttatatatccaacaattaggtcaaaaggctcttcttttttttctttccttttttttactcctgctcatcatcctgtgcaattctatgaaccctaatgggaaggcccttggggaagtcgacgaaggggaagacgaaggcttggtccggctcggcgagctcccacctgaagttgagcaccaggtggtgcaagaacacggccatctccagcttcgcgagctccgacccggcgcacagccgcgtcccgccgccgtacggcatgaagctgctgctctgagccaagccgccggatgatccgctactctgcaatcgaacaaaagaagaacacttgtgtgtcaacaattcgaagcgaagttatcgtatcagcagtagtaattattgttttttttttcgcgtcatggaatgatcgattggctgcagtttttgcgcagcagattatcttgctcaatctcctgcaggataatccggacacatgtctttttcgcggctgcatgcagacgagcagataatctcgtcggcgttggcaactacaccacacacagatccattgttcgatcgatcgatcgagcatacatacacacatgcgtcgttcacccctcaacaactaatgtccgtgagtcgcagcggataagaatggagatgtgatggatggactgcagggctccaatcgtccactgattggttcggtttgatccgcttgcgatttggaccaacgctcctggatttttctcgcacgaatgcataatccatcacggcgtcgccgcctaatcccccgttccattaccgcacatgcacctcggttttcaccactgactttgtgtgatgagaagagaaaacaattcgtgggaacaccattgactagctagcacgcaacacggcgaaatgagaaagcacatgcgcgcgcgagcgagcgagctgagctgagcattcactttcatatcaggttcagtgattcaccatgcatgttcctatcgcggagcttgcctctctgcatgattgctgctcgaggcaagcacgcgtttagcctgtgctgcttttgcagattctgacatgatccccttcgcttatgattgacagacactgcccaacagcgacatccgcgcttgtcccagtattttcttttccttgaatcccagcaattaaaccgagattaatagattagattcactgataatcctactgcgactgaccttccatctccagggattgaagcgctgggggtcctcgtacagggacgagtccagatgcaccgcggctaacaccggcaggatcttccatccgcttggaatgtcataaccttcagttcagttcagttcagttcagttcagttagcttctgctgtcagatagaggagaggtcgattcagggaagaagagtgaaatcgagctactcacccttgtagtgcacgtccttgatgaccttccggtgcaggaacctgaccacgtttcctagccgcaacgtctcgtttatgacctgcaataaggacccaaacaaaagaaatatcagtgccaagtactgtatatttcttttttcatgttttgtttcctgaatgcaagttctgttttgggtctgctttgaacgcaagtactacaatctacagtactgcagcgactaaactatcctgctgactaagacccataattacatcacatacatgcatgcaacttattctcgatcggtaggcgacaattgtcgagcaactcatctgaatttctaaggcctcaaattactctgctcctttatctgataccaccacacacatatactgcaactgactggaatggtatttcggcatgttctgctctgccgtctgaacagcaatgcagaagattcagataccttcttgggggcaggccgtgctactggaagcctacaacaacaggtacttgtcatggcatttggatcgttgcaagacgatgggcctcaccctgtagaaacttccaaggcgaaagaacctcagctggctagcttacaaggcagaacagatcgactctatcgatcaatgcacacatgcgtgcgccttcttagctcgatcgatccaaactgaagagagggagcgtaagtactgtagtacgtggcccggcaattatttcgcagagctttcagtctccattcgtacatgacatttcgggaagttgctatctctctacgcaagtgaccaaacaaaacagcaagagctacgctagcacaaagcctttgcaccgatttatattagtagcgtttagggaggagggatcggaaggaacaaagtagggggggccttacacattgcgtgaaaaccatctctttgtagtcttcccagctcaatttgcactcccctcttagcctttgtctccttgcaatcccaagatgctcctcctgcatgtcacgcgtcagtgtgagtgtaactaatcgattcccatgtcatttctgatgccttcgctttctgcaattgttgctctacagttaaacgtagcactgagctagtgacagtagatgttaatttcgaatctgtaattctctgtaccctcagttcttggacagccttggggcagccttcaaggaagaagatggcgagggcgagcgccatggacgacgtctcgtgcccggcgaagagcaagctcagcaagaggtccaggatttgctcttttgaaaggttagattgtttcagagcccatccgagaagatcgtcttgctctacgcttgcatcctccttgctcagcttctcaacccgctcttccattttcctctctattactccgagaatggcagcacgcgactgcaggggaacagtaaaaatacacagtaaacatcatggaactaatgtcgacatagaacagaaaaaaataagctcacggtgaaaagttccttcttatcaggaaaagaaaaaaaatatgtgggacacctatcaaattcagatatggtgttgcctaaccgcctactagtctaggattatgtctcttgtcatagctttctgttttgaagagaaaaaatgtcgtttcctttcgatatagaaaagacacatattgtgtcgaccttcaaatgagagagaggtgttcttcagctgggtagctaccccttttcttttccaagtgcgctgtatgtataattcattcttaaacatccatgttggcagtgtttagttataggcctgcagggtacttgaaacttaacacacggataacaacattctcgacaaagtataatttccgggtctacactaattaactaagagtgcacacaaccatatttacggagactaggattaatttgaccgtactgggtgagataatgcactcagaactccacaactataccaatgatgtttccttgtatattcctcggcactgaacataagatagataattaatccaactcatctggcatttcatgagacatgcaaattaatgtgttatagtgttagcagctgtgatcagtgatcacagtttatttttgttagccaattagtggaagaatctcctatggtgtattgccatttgacttggatcactgatgtgtgggcctgataagtgtgagacctagctacatgttattcacttaaagttaaaggatagtactgcagagatctatttcccaattaaggagaacgctcagtaggagtactgcagtgtctcttcagctaataaaactacaagcaccctttcattaactaattaaaaccaaactgtgaaggttgctggctaatcatccgcttaacgaaattaatgtggttcgggtgtgtggcaaagagtttggtcagcggttgaatcatgataaatgatagattccccagcatataatcatgccaaattatgaaggttggtcatttactttccaacagattaaaaattccacctgccaggttgcatgctgttgagcacagcacagggtgtgtgtatcggagagagatcgtgaaagctagcagcatgcatgctgaggcaatcaataaagatcatttgagtgtgacctcacatgcagtaaaaagtaggcaacattttatgctcacatgagtgatgatcagtacgtccccagggaaaaagaaagaaaagaatctgcatgatcgatcagtccccaggatgcatactcagaagaagtaccaatgcatggttttttgagttaactatatataggttttggctcatgtttggaagataataaatatattcatatgacctctgctagaatttcaccttaagcaactgcctttgagaaaaaaaaaaaaactggacctggcctaaaagacatactgctagcatgcatgcacgcacctttcaatcaacattttttagctttctatattgccaaatagctatggtctattgctagtatgcagtttcaatcctatgttgattatctcaaaggcaagataatttgtccgaacaaatcgtactaaaagacccgctgtgcgagctgaccgattggacctgatctcgatatggatcactaattcactatgctagtatagaactagctgcaacaattcctggaccatccacaattctaaacacatacaccttgtatatgcccctacatatatataataagtgcactgccgtcatgtatatatatctaatgatgggccatgcatatatatgatatatcatgcatgcggactagctacacacaaaaccaccaaacaaaaattaaagaaactaaacctggccctctctagccaattcctttctctaaactcttttccccccgtgtgcataccaaacaaaacattgacagggaagtcatcgtcactcctacacaaatatatagtatatatattcacttatcactcacaagtcgcaaatcatctctctctcctctccaatataaatatgatccccttgcgtacatctcgatcgtcgtagtaacttgttttctctttagataatgaaaacaacaaaaatggtttacatctctaacctctgtcaacagggacctgcacatgatcgtcgttgcaagttgtttgctttagctaagctgggtatagtagtatatgcctatatgcagctgcttatagtatgcatacggaataggggaagaaaggaacctggccggccggtcataactcatatgtaaagtactctctcctcctaaaaaaggcaacatagacaaagatatgatgtaatctaggacaatgaatttggatatactcctgtatagattcgttgttctaggttacatcatattacttgtctaggtcgttttttttttgaaacggaaggagtaaaactcatgcgcgcacgactttgcgcgcgtacggccggggcgcagggtgtgtgtaggcagagagggacatcgatcgatcgatcaatccgcacgggtggggtggtagctagctacttcctccgtttcgaaatatttgacaccgttgactttttagcaaatgtttgaccgttcgtcttatttaaaaacttttgtgagatatgtaaaattatatgcctacataaaaatatatttaacaatgaatcaaatgataggaaaataattaataattacttaatttttttaaataaaacgaacggtcaaatatgtgataaaaagtcaacggcgtcaaacatttcgaaacggagggagtagctagtagctacgagtacgtaccttgagagccttccagtagggcgtcccgggcaggttgagcggcgcggagaccacgcccttcatgaaggtgatgtactcccgccgcagccgctccgtctcttcctcccccgggtccatgctcattatgttcttcgccatcaggttgaacgtgaactgcacgcacgcacgcaaacgcgcgtttcattgatattgatcgctagagcgagctgattgatatatgcatgctcaacttaatggaggacgatgtgtgttgtaccttcttggcttggtgctgagcggagaaggtggaggaagggggccaggcgcggaggacgaggagggtgtggcgctcgacctcggggaggaggacggcgcggaggcggacggaggagaggaagttgagggagatggcgcgcatctcgcggtgcgggtccccgacgaggaccagcatggaccacttgcccaggatgccgccgatgctgcgcgggtagctgcactcgaacagcctcccctcgttctgcaggatgtaccggttgagccccgcgtccgccgacaccaccgtccgctccccgaacaggctcgaccggtatatcttcccgtacctgcatgcacgcacgcacgcaaccgcacgccaccccccagctcgccgtcagcctattattaccgatcgatcgatatcctagctactagctaagcttgcttcacggcgaggcgagcagtgcgcgtgcttatatagctgtgtgcgtgtaccgagtaatgaaaccaccgaccgtgcgatgtgctgctccatgaagcggccgacggaggtggcggggtgggcgcggaggtagccgaacgtctcgccgacgagcggccacccggcggcgccgggcggcaggttcatccgcttcctcttcgccggcgtcgtcccacctcgccaccagtgcccgccgtggcatttggccacggtggtggtgtagaacgtgagcagggcaaggaggatgaaggggagaaagaagagcagctcgctggttatggacgccatcatggcggccatcagcctgcaagcaagctagctatacaccgatcgagatgcccgccgactgccggccagttgctctctcttcttctactacaaaatttatttatttttccctcttgctcgccaaattacaagagtatcctccacgcctctgagtctgcaaaaacctttctgctggctgctttgcgcaaagaagagaatttggtagctaggagaggaaggtgtgcccacttcacctcgctctctgctgtggacatggggtactcttatataagtttttgaggcgtgagacaggaagaagaaggatgtggttgttgcgaggattcttttgctataattcaatttttggtgtggcgcaagcatgcaggggaggaggagtggggctcctgctagtagtaatagctactggagtagtggtattttttttcccgctctacttgccatacaatggaatactataatgcatatattcatgccaagatatataatacatacaactatagtactagagattagtgaataattaacaaactattctaccgttctgatcctgactaatgacagggtctgcacaggaggcgcctcttgttcagttaaaattggcaggatgtggatgtgagaagctggttatgtttttatttgtcacatgcatctttttttgagatcaggataatataaaaggtaaactttctttcaaaaattatatatatatatatatatatataagttagactagcaaagtcttttattacagtttagtatagagatcacctggatatagaagaaataaagcaatgctccactggttaaacaacttgtaatctgtctcataggaatcaatgggcaagttaggtctcctgcggatactatagtgctaggttttcatacttgcacgcttcttaaaattccacctttgtatcaaatttcaattggcgctaatttcatgggctggttagcggacatgcatgttgcaaattactccatactgttgtagtgtgttgtacatactctgcagtctgcacccttaaaaatagaatatctagtagtatagtgtactaatataatgcaacaacaggtcagatgctaattgtgttttattcttatacagttgaggatgtgaacatacataattagtcaagccaagacagtacaaacctatgttgcatataacatctaattaatgaagacatagcacttcccctgctgtgcagacggctgcaaaatcggaatcatccaacagataatgacagctctactggatcagagtctaattgattgctagtttgccgctactccgtggctctgtgtgtattgctggaaatccaaagatggttgctgcggctacagcagcgccgtcatgccagctctgctccatgtccatcgcctctacgaggcagagcttgacctttgctgctgttatatgacacctgaagatccaaacttacccctacaagtatttgatatttagaacaagatttaatcaaaaatttcaactttgaccaccagtagtttctcaaatgctagatttaaaaacataaatggaacactgaaaattaccatcataatattataactcattagccgccgtagtattttttttccttcctagctacttttttgttttgctttttcttccttcccctagcataaaccggtctggctgattatgttgtgtataaaaaaaatttcgctctaatatattgacgtgcaattcttttgcgcgttcgtgaaaaagattttacaatcattttcaaatataaaactgattgtcgaagttcaaatgtttaatcaaaccttgtcctaaacattaattttttgcaagacttttggctcttgaatataatgtgaattgttatatatgaaagagtctacaaacaaataacataaaatgtagtgatatagaccacttcacaaagaaaatgttcactgcctaacttgaatttaaaaactacaaattcaactatgagtagtgcaggtactgtccattacattttttttcccttgatgcgtggatcaagttcaattaggacttgaaatttttgggatgatggatgtaaattgttctagtgttttcaattactagtatgttgggaagaactattcattatgtggtagtatttgagaagtgggggacatccttaatgattagaggactttctctaagatgaccagcttcttaatttacaaaagagttgcacctgaattatgtatttctaaatagaagaaaaacaccactagttaatgtattggtgaaacatgcatattcatatcatgatgctctgtcaaggtcttgaactttttattagtatactgatttatcatttgagttgaaagctagccagcatcgatctgatttgttttagaaaacagagcatgaacagtattcttagtgcttccagcttgttaacggaatctaatggctctcatcaaaactgattggtcccgttcatccacgaacggcatgagattccgtagcactgacaatcaattcttggtagcctgatcaatggcactggcagagagatggcccctgcgccatgaggaagcatggaacagaaatgatcaaaaggaagggtctggatccagatttccagataggccagcatcattgttaatttggtgccatggaaagatgattagggtgatgtttacagataacttttttatatgtatgctgcataattcgtggctgttgctgcggtcccatgtaattatggtgtgatgcacctttaatttatggacagaggcctggaggttgcgaaatagtatctgttgcacgccctgcccctcatttagtcgatgttcactcaattgttatgcgtatggatcgtatgcgtccttgtggtagtactcctacctcttaagaaaaaaaaatgtaatcatacggccatctgttgtctatgcataatttagctgggcagtgattactaaatcgctaaataaaacgacaaaaaaaaatagacgatggctcatagataaaatccaaagagtaaattgcatccacggtgcatcaacttgacaggtgggtgtaatttggtgcaataacatgagaaatgaacattccaatgtaacaacttggtaagtaggtgtaatttaatataaaaaatttataagtgatcgtataaatgcaacaacttacaagttaggtatgattttgatataacaaattaaaaggttatgtgacaacttaattatttgcaacattatatatatataaattcatttttaagaacttattttgacaatatactagcgcggatttgtataagtatatttatatttttatcctaataactaatagctgaaaatcaattaaactggatgtagaaattattatatttcgattgataattgagaaggtgaagaaaaaaaaatcttaaaggtaattggatgtaaattgtactactatgtgcagtataattcataaatattaaattcaatataaggtaatatccgtatgattactatgtaatggcatgttgacatcgtaaaaaaactcacctaagatatacttagccaagttaatacaacaaaatactaaattgttaagttattgtactagaacgcacctgacggagcgtggggctcctcaccgggagaccgcgcaggcccccctttgccggttcggccggggactcagggagagattctaagctctctgtatgtggaaggctcgcgagacaggaaacacacaagacacgggcgatgtatacaggttcgggccgctgagaagcgtaataccctactcctgtattttgggagatctgtgtatgaaggagctacaaagtatcagccagcctctcccttgttctgggtttctaatctggaaaagtccagtcccctcccccatctcagtgggcaaggtcctccttttatatcttaaggggataccacatgcaccatttctctcttttttgtggggacttaccccaccttttcataaacagacggagacttgtatggttgctgtccgaatgaccttctgatgagacgggccacaactacctccacttccgccggaagcaggcgcgacgtggaatcgtggctgtctgctgacgacatgaccggtatcagaccagtcacgtcggtcattcttgtccaccacgtgtcagcttagcaacctacatgctcacccttcttcacacaacatcttgcctgtaatggttaggatgaagcctggcatatatctgaccaggactaacgtgccatctctgggaggtaacacgctagctccagctggggacgagcgcctagaagccctcgtcctgacgggatggggcgaggcgtgcgtcagatcgcctgttgccacctaacccgcgatctgaccggtctgtgactggtcacagaccggataaacgagtgcactgcactgcgttacatacggcgtgacacgctcagcccaaccgcaataaatg

SEQ ID NO: 10186 - DNA, 11854 bp, Oryza sativa
atttgagttcttaaatgatggttgtaggttcctggtgtcaaacctgatgatgttattggcacactagctgtcagcagtgtatctgcaggctacaaggtaataaaactttctactgtgattatttgtgaacattttattcatgaattgttcttcaatattctcaatggatatttcataagtatctctcttcatgaatcgttctccagtgccgtctttaatctttcacatcatttacaaaagttagtacttataaactgctgaggtgttatagattcactgaaactgtttttatttgttttgaaatgattgatattttgtaaaagttgattcataactaacttttccaattgcacatgacaaaactgaatgtctggaattaagtcataggtatgttgaattttgtaacaaaaatgcaagaaatacagtgtaactaaaatgtgatgccgttgcagtgtgttggatatgatatcttattgtgtactctggtccttatttgaaggtacggattgtctcccctgataaagacttcttccaaattctttcaccttctttacgtttgctgaggattgctcctcgtggttctgggtaagtgtacttggttttttttgcctttcttgcatgcttactggaatactctaatagctaatcgtttttatttggacatggaggatggtttcatttggagttgaagactttgtcaagagatatggagcactgaaaccatcacagtttgttgacgttgttgcgctttctggagataaagccgacaatataccaggtaccctttatttctattgtgccttatgctacacatctgttctgacatccattcttctttcagactaatttttgttggtagctatgaaaactatgagagaaaggatactaaactttggtctgcattgggttgtatttatttatttatttctcgcaataaattcttgtgcttggctacctttgtttttcttgtccaatatctttcatttcagctctaaaacagaaaaatggaccacagttgcacacgattttgatgtgtcaaagtatttttaagttgataatgtgatagaaaataaagttcatacactgtatataatgtgcttgccgaagaaaatggtggttgcatgatctatagacatagtgatttcattttggttcttctacctatttatttattatttattatgtgctgtaatcttactgtttgataaaaaccttaaatcaactcatcaaatatgttatggaccctatgaagtctactgtcccccatctttttaaggggaaaaacatgattctcatgtctgaaaattatttcatgttatgatatatgtttgtacgttaccaacacttcaccagtgcaatgcagattcgtaagctaattttctatatatggtagtctatcgaccaagttgtttatgatgtgaccggaaccatgttctttttcaggagttgaagggattggagatattaatgcggtaaaactgataactaagtttggtatgttcttctctttaaagtttttttttagattgtcgccttggtgcgaaccactcgagctaaacacattctgttctaataaaggactgcttgtatacactcaaactactcaagattgaaaagttcatgatttccctgtgatcaatctacctgtttagtcttggttattaagttctactcccctaaaaaatataagtagtttttagctttctcaagtctttcctaaatgtaagtcatcctaaacttctagccaccttttactcctccctttcttccgtgaataattcacattattcaatgtggtataagtaaagggtaacaaggtcgtttgatgtactttattatccctgtacataaatctagaataacttatatttggaatccaagtattctatgttttgagtttggaaatagtgggcatattagctgtcctgataatcctgcaattctccaaaagttataactttgtcattttattggtactcacataggttccttggagaatctgttgaaatctgtggatgaagttgaggaagaacgaattaaacaggtatcattcttaatattatacattagatgagatatcccctcttcgcatttatcagcatgcacttatgcacagaaatgccaagatacagaaactgggttgcatgacgcttttgtttcactagaacagcgcaatacaatgaccccattaaatggcattgatattttaccctttagtataatatgattatcttcttgaatgttgattgcacatactctcttgtcaaatatatcattttttatcttatgacttctcaaatggttgagcaaatcatatttggtgtggtcctttacaggctttgatatctcaatctgaacaagcaatgctttgcaaaagcctggtaatcttttttttatgttgctcaaaagtcctttctattgtcttgatgaatcatgaaatgcaatcatcttccatattatattgtgagattctatctcaaccagactcttctcattgaatttacacttcttgtaggccacattacgttctgaccttccatcctatatggttccttttaagacatcggatcttgtgtttcagaagccaaaggtagcaattgtagcatcatatatttatgaaaacaactaaaccattactaaagtttgtccctctgattcctgcttacactgttattcttgcccgcaatgcttcttcaggatgatggagccaaattcataaaactcttgcgagctttggaagcatatgcagaaggctcgtcagcagacctaatcataagaagagccgcctatctttggaacaaacttaactcatgactatgctgatgtttccagcagtgacaacatacgaacttttcaagcacaaaagttccacctgagaagataggtgccttggtgctatgtttctgtcaaatttggtgcgagcggctcgctgtgctttctggcacaaaaggtggacggtgcatgtttagacaggctgtgcataccatgaaactgataattagttagttttgtagataaaagcacgtcatggctcatgcaatctacagaacatgatattttttacactctaatgaatggtggctgctggctggaaggtggaagaatggcatgtaggtacctgaaagcttaatcattcgattatgtgcaacttcgtagaaatattatctagtgacatgtcactattcatatgcacaatgataccaagttggtcacaaaagtatgtggagtacgtgtcttttcctcttagcaggtgacgggtacctagtacgtatactcccttcgtctcagaaaaaaaggcaaaccctgaattttcgtgtccaactttgactgtccgtctcatatgaaatttttttataattcgtattttcattgttgttagatgataaaacatgattaatattttatgcgtgacttgtctttttaatttttttcataattttttcaaataagacggacggtcaaacgttagacacggcaacccgggtttgtctttttttttggacggagggagtgtacctacgcagccatctacttgcggactaaagtcaccaggcaaagcaacactccaagccaaacaagccgacgcacggcggcgtcagctcgccgcgaaaccgcgcctgcggggatgtagcacgagctggtctgcggcacctgctgcccctgcgtcgtccccggcacgccggccgccgtcacacagtaccccgtcggcgtcatccctctgctcggctgcggcgtgttctgcaaaaaccaaaaaaagacatggagatcagatcagggacgtccattccattcgatccaaagactgcaggcagaatcggtaggcaacgagcatcgatgaaacctgcaccgtaactggagtaacggtggccggagccgccgtgccgggagcggcggcgagcccgatgtcgtagttcgccgtgaggtcagtccggtagaggccgaacgaccgctcggactccggcccacccttgaggtcctcgtcgtagagcgcgaagaggtacgtgtccaccgatttgcctggcgtccgcggcgtgccgacctgcgacttgaggtgcgcgacgaggttgccgttgtacgccctggcgttgtccaccgtggcgccgccctcgtcggcgtcgcccttgtacggccacccggtctcggcgatgacgatgtccacgccgctgtaccccttggcgtccagcgccgcgcggatggcgtccagctgcgcgtcgaacatgttggtgtaggtgagccctgacccggcgtcgacgcgccccgggttcggctggaacaggcagaacgccagcgtctccggccgcgtgtcggaggcgtaggcgaagtacgggtacgggttgatcatgaacggcgcgccgttctgcttcaggaagtccagcaccgggtccaggctcccggcgaggtcggcgtggaacgcgcccgacgacggcgggtccgacgacgagagcaccgccatggaatgcacggtcgagatctgctagtcaaccgcaaactcgttcaagaaaccaccgcgatgcgtacgtagagatgctgtgatgagatacgtgccttggtggttgagccggcggggagcgcggcgaggaggttctgcatggcggggaggagctgcggcgcgagggtgggatcgccggagttgagcagctcgttgccgacggagatggcggagacgggcaccgtggtcgggatgttcgcggcagcccaggccgacgctgccgccggggaggacgcgaggttggggacgtcgccgttcgggacgccgaggaggatggagatgttggagcccgcgagcgcggcgacgaggtccggctggggctcgtagaggcggaccttgccgatggacgtcgacttcagcaggttggccgtcgacgccggcggcgggaggttgtcggctatcgtcccatagttcactccgatgaacgactgcgacgctgcaaatatcaatcaaactcgcatgagaaatccaagtttacaaaatttcagcaaaattcatttcacatacaaattcacatggccaacgctgtcgcaaacttcgtacgcgcagcatctgctaataattacttaattgtcacgttaagcatatggcagtggtgagagcacacgcaaacgtactacctccagagcagtagttggatagcaacaggacgagctgcgttgtacagctttggcctctttggggcagccattatctgtcaaatgctgccgggcgtgaagcgtgatcattgttcctctttgtttggccaatggcgagagctgttgcctgttggtcaagttcgaattattctcccccaaaataaagcctccaactattctagcggccgttaggtgatggatcttgcgcccacgagtgttggctcctatgctttggatatttgatttggtatttgctagattccttgaccaacccttttggtgtactcaatgcgaatcgttggtaaaagtcacctcaccaggccaatgtaaattgagcatggttcatatgcagctagcgcagattacagttcatgccaagttgctctgttctttttttctttttcaaaaaaaaggaagagtcaacttcgggtctctgcaatgtttagctacaaagtcaacagccatagcacaacggcttcttaccatttctaccgtttgagaataaagcgttgaaaaagtctgattaatcctataaagtatggaacaaccgggtaaattatctcccaaaagtatgaaattggttcaaataacctgtagagtggttttggccaccgggaccacgacgaacacacagtgacatgaggatgtaattgattaaatgcatttttactcctaactatagcggcttaggaaagaagtaacgtgatcggagaaagttagtgattgaactattcggctgaaattggttaacgtgtctgtcatgcaaacaataccactcggtcgcatcaccgcctaaaagaacacttacaaaccatcctcacatgtttctttagaaaataaaaaaaacttccaaacaactttgatatgttgtttttttggaacacggtataaacgtaaatattcatacacatgcgtgcacttatctctataaacatatatatatatatatatatatatatatatatatatatatatatatatatatatatatatatatatatatatatatatatatatatacacacacacacacacacacatacacacacacctaatatcatatctctttaactagcttaaaagtacctcccagaaactatagaatactttatgtggaacgcttttcgtactttaggggcacaataaccgatttcatacgttatgtagactgataagtgctttaggtattaaataaagagttttctctaacaaacaatatatggtgttctgtataattaaccgtcgcttttgaatgcaatcccaaaataattcctctctttatctaggcgttgggaatatgatcaggagtcgtggcagagaaactccatttctctccccactttgcccctcgtgttggcgaaatctcaatttctcggagcaaaaaagtaagatctcatcaaatcctccccacctatttattagaaaaaaaaatgtgccatcaatcgccatcttctttgctcaccattccggaagctagaaaaggttcggtaactcggcacgaatgagtaacctgcatccgtaaaaacgacgcagaatttcgtcctaccacttcgctgaactgactaaagtattctagtgcagtacgctaattcgaggaacaaagaatcacaacgaaagtgaagccattgttccactattccaaaaccgaactaagctaaccagttaataagcatccagcgagcgaaacatgatctgaagatgattcggtgataccatttcatctatctatctaccaacaaaatgcaaaaacgaaatcaaaactttcaccgcgataagaaacaacaaggtagcatgtcaatgatgtacaagaagcaacgaatcactggcacaattcgcaggagacagcttgagtgagaaagaagcgctctagcgcggaaagaacttacttgccaagtggaagaggagcgcttgcagcagcccagaggtgacagcagcatccagccacctcctcgcccccatgccaccactgccagccaagctactagcaacaagaatcctactgcttgatgcaatctcgccgcagcttctcagatgttcgagtccaattatggctactacttgggatcagtgaaatggtcgaagactcaaaggagctcgagtggcaaactggcaatgggagaggcaaagaagaagacaaggaggaaagaggccaggaaggaggaggaggaggcgagtcgtcgatgcagtctttggcccccttgcttgctgcgtaaaataagaggagagaaagcggcggggcgcgaggtgacaccgtggggtcggcagcacaggacagggacgacgacgacgacaagggttgtgtgcgggagaagccgcggtcaccgtcgcctcgcctcctttctcgcggtgcctgcctctgaccgcacgtctacacgcgcggcgcggcccgccaatgcgttttttcccctctcctttggtgcgtcaactcgccgagaaatacagccccggcatataagaggaaaaagcgaaacggtagtatttacaaatgaaaaataatttgtaaataaacttttatatacgtgttcttaacgatctaaaagcaaaggctaaaaaataagcaacaataaaaaaaatcccaaaataaactctaaatttaaagttgaaaatttaaattttagctgataagcacaagcataaagataatggtgataagcaggtgagccgtaagacttgtttagaggagattctgatagctacaatttttttttaaatcatcgcataacataattttctctagaccgtctaaattttcacttagacttttagaatttatagttgtagaaaaaaataaaatagaagatagaagctagagaacccatttttttctcaccagttagtttaatcataagctttaagaataaaaccgcagtgtggatcggcacagcgaatagtggctttgatcagggaagggaacggaggcgatacatcgttctcggttctcgggtgtacttgcttctatctttttcgtgaacgcgtaaaaaatgtgcatgtcaatatatcgtcgcgaggatggcccgtgacgagtatgtggctgtgcggttgtgccgtgagcctgactcgcgagagcagatcagcgtcgtacctggaattttggtttcgggaggtgatgggattttgctgtctgtcaacaatctgtcatggacgttaagcaggattgcatgagcgagcgagtggcgaatatgggcgagtcgtgttgtggcgcggaaacagccacacgggtggttatcgtcgtaattaatgggtatactaatcaccggtgctcatctccaattattaagccgctggcgctcgctgagtgaggtaaagcgattccatatgccataatgccacccggatcgtgatggggatgatggcaaatatgggaagaaaacagcgtttcacctcttgttcatcattgccccggttaattgcagtagtatgcacaagaagctttgacctgtgctgctgacaacctcgtatgagtgcgaatgctctcctcctcgtcggtggttactggcccgttgctctatcacaagttcacaactcacaaattaaacacaccatcgtccacaaggcagagcaaggctaccaggccaccgtgtccacgcgcggctgggtcccctttgtcacggacgcccgcggtacccacggcccacggccacgggggatcggctgcctggccatggtggacttgggcgtcctcgaattcggctgagttaagtggcagtgtctgtgaagagcatctttttcatccttgaaaaagtaacatgaggtaccaatctaatctaaccattgatttagcagggatatgatcagtctaataaaaacagatgtcctctcttcgtcgtccctgcccatccgtcgccgccgtgcatccagcccgccgccgtccccctcgagctagccgccacgccgctgctctcccgacgtttttttctctcgtgaaacagaaaatgacataaattccctcccacccatagtaccacttcaatgagaaggtacggtaccatgaggtacggacgatttctgaccgttggatgatgccagatcaatgatcaagatttggtactccataacctcaataacagtaaaaaacctcttctgtgaaattttcggggacatgggcaattggccaaatggctggctggatgactgaagccggaccgagtaggtctctgtccgttctccgagcctgcgttgacgtgttgcgtggctgtagctgtagtttaggcgatctgtttgctcggattatcgagatggcaaaatgggaaccatggtcaggccagagtcggcgtgtctcgcggcagcatccgaaaatatagagcacttcaagcactactggagaaatgatctttaccaggtcgaggaaaaaccacaattgtcccggttcataaaaaacagggactaaaaataatttttagtccggtttataagttcaatgggaagatttgatctatcaaccgggactaaagatggcaaagatggtgttggacgacacgtggctgcgccatctttagtcccggttggtgttttgtcccagttattttaaccgggagtaaagatggacatctttagttccggattcgccgtcagtttccaaccgacgttaaagatgggttccagcagtgaagcgttaaagatgggttccagcagtgaaggcaaactaggcaaagtgtgtactatggagtgatcacacgcgcaaatagcaagtgtgtggatatgtgattcacgtttatacgtaagtaatttaagcattacgcgctgacatcccatgtgtaggtatgtatatatatactcagggtaggcgacttcagacagaaactgtcaggggcaatgtacaagttgtaaatagacacatgtggttcatgatggctgagggttttgtttcctaaataaaatagggagctgagaactgtttgtatcgggctaataagagcatctccaacagtctctacatctcactcttcaagttaaattttaataattctaataaaaaaacatgctccaacaacctctccaaccggatggctaagccatccgactgaccaaaacccttcctccactagccaaatttagccactctatttggctgaccaatggtgggccccacacatccagtcttctctatccccacacggcaaccaatgaggaggcacaagaggagcatgaggaggaggcatggggaggagctcgagcacggcagccgccggcccccgctcgtcgcgaccgccgacctccgcactcgccgtcgtcatcatgtcgcgcgtgcctatatctcgtcgtcgccgccttccacctctcgcgcacctggatctcgtcggcgccaccttccacctcgccgcgcctggatctcgtcgtcgttaccatacacctcgcgcgtgcccggatatctcgtcgtcatcgcctctcgcccgcccggatcctcgtcgttgttgcctcctgcctcatgcgggcggatccccgtcgccgtcgccccccgcctcacgtgcgctggcgtcctcgcttcagagagggccagtaaggagctcgaggatgggccgatggggttgccctagcgggaaaagaggaagcaaggaagaaaagaggaagaagggcggtggaggctgacatgtgggttccattgtcatagactcaggatgaaaagtacaaatggagagtctattggagcgaggaactagtttgacttgctaaatcagataaagagttggctatatgggtgtttggagagccggattttagtagtctgttggagatgctataaggtcgacaggtcgttcatcaagtcttgcacccaatgttcatgtgaattcagtcaaaaatgtgtactcacaagtcacaacgtgctatcggaaggcattagtgtatcctctgaaactgcgtagtacgtgctctcgtgcaagcaatcatgcatagcatagtgttttcaggtgtaggtgaagtaaaggagtaaaggactcattctcatgctaatacaaagatcgtcagacctctcgaaattagatcacatttatagaaaaaactacaacgacatctacaatctcaaattagtttcatcaaaattcaccataatataaagtatatcttgatggtatattttatttggtattatagatattaattatttttctattaacttgttcaaagttaaagaactttgactaaaaataaaatcaaaacaccttataatacgaaatcaaaggagtatttttcagctacttcaacgtacggattattaacatggatcatttgctccataactctaaagatatgtttccttagaaaccttcttctattgcattgtttagatcatttattttaacctatttttaggtcttttttctcaagacatttgatttcttcctataatcaaatacgcaaaatctatttcgagaggcatctcgatttatacttaacgagcgacgcggacaattgcgtgagaagtactagtagcgttacagacatgcatgcaagtagtttttgctattaggttgtccatattttttttcttatgaaattttctcttaaattacttattcgatctataatccgattacaccgttgtgttcataacaattaaatctttacaacaagatctcacatgattatattttgatgaaaaatcacaaattacttttatgatatgtctaaattacttttagatttcactaagttacttcttagacatacaaaagtaaattcagtaaagcctagaagtaatttacatatattatagaagtaacttagaaca

SEQ ID NO: 10187 - DNA, 9700 bp, Oryza sativa
attcctgcagcccttagtatagatgaatctggatatatacatgcttagattcatggtattaggttgcgtcaatatcaaatagtaggttcagtttttttttaacggatggagtatggcataattactgcagtgaattaaatttgggtcatggaggttgagaggctaaatccttacggagctatcgtttctcttattcgcaaaacgacatatttacaaacgaaaaataacttgtgaataaaacttttatatacgtgctcttagcgatctaaaagtaaatgctgaaaaataaacttcaatgaaaaaaaacctcaaaatcaactccaaatttaagattgaatattcaaaatttggttgataagcataagcataagcataagtgaaaaaacgaggcctttacttcatgcaattcttaatcgatcccggcgagcaggtgttgaggaagggtgaggcacgatggtcgttgtcgggccaaaggcggtcatcgtagctgctggggaggctgggctcattgtactccggctagagcggctcagacgaagacggcggcggggatgactccgacgaccctcctggccgcctctagccatcgatcccggtgagcaggcatcggggaagggcggcggggcacgggggtcgtcgtcaggccaaaggcagttgtcgttgtcacaactacgggggaggctgggctcgtggtactccggcaggagtggctcggacgaagacgacgacggcgatggtagggatgactctgacgattctcctggcctcccgcccccctcgctagccacctccctcttctactcgcttactggcctcctggccgccagttggcttcaactcaccgaccgccgccctttctctgtccccagctctccgcacgcgctcgtccgtggactcgtggagccggtgatgacgtgcccaagctagagacagagaggagggtgggacccactgacatgtgggccccccattttgttttattgttttgtttttatattttgtttttagtgtcacatcatcgccacgtaggattacgtgatgatgaccaagtcaaaccaaccacgtaaacatcacgccagccaaaaccgtcatccaaatcgttgtgggacctcatctgcacagttttgagacttgagggaccagttgtatctggtattgtcgttcagggacgaaaatcaaactcgttgtcaagttaagggaccttatataaacttagggctgggctttccgaatcgaaagtcagtccattcccgtgcctaccgatgacgcagtcctccctcctttcttttcggtccacgcggcccgcttctctagtccagctcgcgcgtggctggcacacgcagcaacgcgtgtcgttttgtgagtggcaaatacgggagggccacggatcgctacacggatcggcaatattagccgtccgatggattccgatcgaacgggtagaaccgtaggagttctctcccgttcatcacgcgggcggcatcgacacgtgtagttttgcgaatggtcagcgcggaagcgccacggatcgccacgcggatcggcagtatatgccgtcggatcgcttctgatcgaacggataggagcgcaaatgtgttttcccttttcctcgccgggatccagcggcgcctcgccggcaaatataaatgtgagctccgacggcgacatctgccgtacctcctcttcgttaggtttagccagtgaaacacgatgccctacgtcacgtcggaggcgcaggcccgcgccctcctgcaggtcggcgggtggcccgtcggaactctggtccatgtcgtcatcgtcgacgccgcctgccgtgcccgccgtctcgaccacacgctgcgggcgatggtggcgcgcagggggtgggtcgtggtcaaccgccacgccgtgcttcgagtcatccgcgtcagcgacctggtccacaacatcctcgacatcaccctcccccgcctcctcgacgacgcctacgacgccacgcagctcactcacttccggaggcaggcggcggctcttcgtacgatggcgggtgtgatcggagggaacttccgcaaccgcgcctacgtcgtcgtccgcaagattcgcttcgtcgccagcagcgcccgcaaccactccatggcggcggcgaggctccagcagcgtctgctcgacatcaggcgtcgcctcagtggtctcgtcgaagcacctgttcacctttgagcgtttttagggtgaatgttttgtccggtagcagtgtggtttcaccttcgactcatgtgcagtagttttgtttgatgataggcctgagtttcatctaatggttgcataggcggagcacattctcaccttaggaggagtatataggtactatatgaaatacagatagaatcctgcatatattaggagtaaacatagaggagattcgaatttcgaaatgctatatgaattgtggaatggtatatcggaaaggatcccgtaatgttcaattgtaattgccttaacaatcatgtaaggaatggatatgatttgaacagaaatcgagttaatatgacacgatgcatttatttctcgtttgtttttggtctctgttcagatttttgctgaatgctgtttgtactttaggatttgaacctattatcatcctgttttacgatttccctgcttactatcctccctgcaatatccatgttgaaattgaggatcaatggaaatgaggatgatgcatagtggcactgttagttgagaggaagatagagaagacagaaaaacagggttaaggccttaagagacaaaattggagtaagaagccaggtcgtggataaaagatcattgcattctgataactagaagtggtcgctctgttttcaggatatgaacttacaaaggctttgtgcagactgctcctatctaataaatcaggtgactgcaataccctggagtgaactgtttttagtttttcttcttgttgctataattatctaataataccactttgcagattgctggtgaattgttggctcttcttgctgatgctgcttttgaaacagttagtatcccctttcggtaagattagaagaccattttattttgcatgttgttcttcatacatgttacagagataagatagccaaaagaaagattctgagataacctgcaattgttataacttctattgatattcagctagatgctagtatatgtcacctagttctatattctgcaacctgtctaggaagtagggtatataaaccagactaattcgaggactcattttactggtgcaaatcacgtgataagatcactaaaccctactagttggccatatgtccaaaggctatgccggtgtggtcagcatttagaactgtctagggagacaactagaaatatagtgaacgctaagttagtacaacaagaagactatccatgttccaattaggaagtccagtgcgagaggactatcttaagccttactggtgctgtttattgtggctaactggtgatacgatgaaaaggcactgcattgctatgttcgttaagcactttatttattttctttgtcaactatatctacatttgcatacaatgagttgaaattattttacactggatatttattgcactgttgtttgtctgtcatacaccatgtctatttagttgaaaacatttttcatggttctcactggtgctacaagaggtattgtagaactacaagaaagtagttctgtagcacacccaaattactagggatctgaagtgacaaatgcatgtagttttgctggattcagtcccacattggatttgctcaagtgtagcccctaggttgttgactaattttcacctaggcctaattttgtataccatggcggtttcttcttaatattgtttgtgaagccttgaaaaagttgcagagttatgtggaatgccttctccacatgtacatgtggctacatgcactaacatcactgacaattgtgctttaagattactgtgacttttaatatggaaaccaaccaaatattcaaactgaccagattcatcataatctctttggcacaaatacataagcacttcagatgggtacttgggtaggataatgcatgtacttgtaaggcctgtatataaatttggagatgcatcttgtatttttcccttcctttgtgtcttggttttggctggtggttagttggctgatgttgtacattcttctggtctggtttaattttaatcttcgtggcaatgtttatcctgcagtttcttggctgtttgaaagatgatttgaattctgaggtgccttgggcactgtaacaaatgtcacggaggcctgtgtggctgtgctgtttcgctatacatatttataaggatgaagactaatcctctggtgtatgggatagcttgggaagaggtatccttttcttcccttgttcacatcttcgacgacttgcataagcttattctggaagtacgtattttgtagtgtgagttgactactgtgttgtatgctaactttttatgcattagcagttgcggtagtgtgacatattctgtgtattactgatgatcatttctatcatgcgacaagcaagataattgtctttgttatggtacttcattgcactattgatactcatgctctggtttttgaatctaaattgaatctttttgcaactcccagtttcatatttgccaaggttattggtgattgttccttggttgccaagcaaagagcgtttattattcatgctgcatgtgcgctagataaagctatgatggtgcggttatgtgaaaagagcggcaacttttattgcacagaacttggtcgaattgcaaaccacttttaccttcagtactccagtgtggagacttacaatgagatgctttggcatcacatgaatgagagtaaggtgataatatatatttttctctttttatttatatgatgcttgtaaatttgcactaaccttttgttagaataattgggctaggcccaatttattctattaaatctcaaaggcccataataaatgttaaggataataataccacctctggatttaagcgagaaatatctcaacctaaatagggagttattagaggctccctgttgaccagttgaggtgggggtcggaatgccacacgcgcgcgcgcgccgggccgggccggggcgtgggcgagggcgaggcgagggcgtggctggctggcggcgtgcgtgcgtcacgtcgctatccttttgcagccactaacccacgttccacgattccctccgcaacagcgcgtccacgttctttctcctgatagataaggaggccgcgagtccgatccgagttcctcgcttctttcccggtgttagtttctccttctccgcgcctgagttgctctcgcttctccgcttctgatctcttgcgcgcacgagagattggaagaagcagtgcctccgaaaccacaccttcgcctgagatgggtgatcaggtttttgggggagtgcctcctgcacgactgctcatcgccatgtctggagttgctgccgccgctattggcggaggtggtgcgccgccgccgacaggagctggtgcgccaggaggaggtgccgtgaacgactacaacaacggaggcaattctgcctcaccatccagcggagggccattctcggggtataatcttctccttctactgctgttagcgttactcctgttcccattgttagcgctatactgtgtgcgctatgttcttgttcctgttctacatgatgcctttagcatgttatcgcattattggtatgttcctgattctgacattcatgatgcgcttagtatgctactggttatgttaagatcaccctacactgcttatgccatgatcatagtttcaatttcttggattaaaatatgccgaataatgactatatttccaacaatccaaaaacctgataggtcattttcggtagttggctttgctgctgcactgaaaccacatgcttttgatggttcaaactataagagatggaaagcacgtgcactattgtggttgacagcgatgcagtgcttctatgtttcacggggcaaacgaagtgaaccacctctttctcctgaggaagaggctaagttcgaggcttcggattgcctgttccgtggagcattgatcagtgtactcgctgacaacatagtggacgtgtacatgcacatgccttctgggaaggacatgtgggatgcactcgaggccaagttcggagtctgacgccggcagtgagctgtatgtcatggagcagttctatgactacaagatggtcgatgaccgttctgtagtagaacaagctcatgagattcagatgctggctaaggaacttgagaacaacaactgtgagttgccggacaagtttgtggcgggtggcattattgccaaactaccaccttcttggtcggactttgccacttctctaaagcacaagagacaagagttcagtgttcctgatctcattggctctttgggtgttgaggagaaggcgagggcaaaggacatccggggcaaaaaggttgagggaggttctagtgccaatatggtacagaagaagaaccctcatgcatcccacaacaacaagaaagtcaagcctgatgtcaaacccaaggctgcaaccaattttaagaagaaaggcaagggaaaggcaaaaggagactgctttgtgtgtggcaagtctgggcattgggccaaggactgtcttgagcgcaaagacaggaagtctgccaacatgatcattagcgagggcggaggaacatcggggtacggtaaaaaattacctacagttctctctgtttttcattcacctgattggtgggtggatactggtgctaatattcatgtatgtgctgacatttctctgttttcttcttatcaggtcgggagaggttcctccttgttgatgggaaacgggtcgcttgcggttgttcatggtgttggtacggtcgatctgaagtttacttcgggaaagaccgtgcagctgaagaacgtgcagcatgtcccttcaataaagaagaatctagttagcggctctctattgtgtagagaaggttttagacttgtgtttgagtccaataaatgtgtcgtatctaaatatgggacttttgttggaaaaggttatgacagcggaggcttgttccgcttttctttgaatgacatgtgtaataatcataatgctgtgaaccatattagcgagaatgatgagtctaatgtgtggcattcgcgactctgtcatgtgaatttcggttgtatgacgcgcttagctaacatgagtttaattccaaaattcactttggtcaaagttccaagtgccatacttgtgttcaatcgaaacaacctcgcaagcctcacaaggcatctgaggcgaggaatttggcacctctagaacttgttcattccgatttgtgcgaaatgaacggcgtgttgactaaagggggaaagaaatatttcatgacactgatagatgattgcactagattttgctatgtgtatctattgaaaacaaaggatgaggcattgcattactttaaaatctataaagctgaggtagaaaaccaacttgaaaggaaaatcaaacggttgaggtctgatagaggtggggagtatttttccaatgagtttgcatctttttgcgaagagtttggaattattcatgagatgacgcctccctattcaccccaatcaaatggggtggccgaaagaaagaaccgtactctaactgagatggtgaatgccatgttagacactgcggggctttcgaaggaatggtggggtgaggcagttttgactgcgtgtcatgtcctgaataaaattccaatgaagcataaggaagtaacaccattcgaggaatgggaaaggaagaaattaaatctctcatacctacgaacatggggctgtttggccaaggtaaatgtacctatagtcaaaaagcggaaacttggaccaaaaactgttgattgcgtgtttcttggttatgctatccatagtgtgggttatagattcttaatagtaaactctggagtacccgacatgcatgctggtacaatttttgagtccagagatgctacattctttgagaatgaattttctatgaaatatacacctagcacttctagtaaagaaactgtcatgccccatgagcactttgcaccgatagaacacaatgatgaaacgcctgaggaaaatcctgaggaggacaacattgtagatactcgcaagagtaagagacaaagggttgcaaaatcctttggagatgactacattgtatacctcgtggatgacaccccaagaaccatagaagaggcgtattcatctcctgacgctgactactggaaggaagcagtacgcagtgaaatggactcgattatgtctaatggtacttgggaagtcgttgagcgtccatatgggtgcaagcccgtaggatgcaaatgggttttcaagaaaaagcttaggcctgatggtacaatcgaaaagtacaaggcaaggcttgtggccaagggttatacccaaaaggaaggcgaggatttcttcgacacatattcaccagttgctcgcttgactacgattcgagtactacttgctctggcagcctctcatggtcttctcgtccatcagatggacgttaagacagctttcctaaacggagagctggaggaggagatctatatggatcaaccagacgggtatgtactagaaggtcaggaggaaatggtgtgtaaactattgaaatccttgtatggcctcaagcaagcacctaagcaatggcatgagaagtttgacatcacgcttacatctgcaggctttgttgtgaacgaagctgacaaatgtgtatactatcgctatggtgggggagaaggggtgatcttgtgcttgtatgtcgatgacatactgatctttgggaccagccttaatgtgattgaggaggtcaaagactatctgtctaagaattttgaaatgaaggatttgggagaggctgatgttattcttaacatcaaactacaaagaggagatgagggtgggattacacttgtgcaatcccactatgtggacaaggttttgagtcgctttggatatagtgactgtaagccagctcctactccttatgatcccagcgtgctattaaggaaaaaccgaagaatagcaagggatcaactgagatactctcaaatcattggttcattgatgtacttggctagcgcaacgaggcctgacatctcatttgctgtaagcaagctgagccggtttgtctcaaatccgggagatgatcattggcaggctctggaaagagtaatgcgctatctaaagggcactatgagctatggaattcactataccgggtatccaaaagtactagaaggatatagtgactcaaactggatatctgatgctgatgagataaaagccacaagtggatatgcgttcacacttggaggtggcgctgtttcctggaagtcttgcaagcagaccatcttaacgaggtcaacaatggaagcagaacttacagcactagatactgcgacagttgaggctgagtggcttcgtgaactcctgatggatttgccggtggttgaaaaaccagtgccagcaatcctaatgaactgcgataatcaaacagtgattattaaagtgaacagttcaaaggacaacatgaagtcatctagacacatcaagagaagactgaaatctgtcagaaagcagaaaaactccggagtgatag

SEQ ID NO: 10188 - DNA, 8073 bp, Oryza sativa
atacccacctaaggttgcataatagtggaaacctgtccattgtgatcggagatcccgtgaatttggatggtgaaacaaactattgtgtgactgagagaagagacccttgaaaggggctcattttcatgatgtgcttctcttctttcctgtatggtaggatggcttatgtcttaatgtgatccgagtggcttttccaagcagagatgttgacctgcagaacatctcagaaggaacacacctatatgagttcgactgctagtcacagtctatgaggtttgggcaatctctagatactcatgaaaggcctggagtttgacttatatgctccaaacagaggggatgcgaacggcagcccagtaccagtcaaggttctgagtgaaacctgatcacacaaaacttacaattcaaggcatagtccattgttaagttgtggtctgatgtagctcatttcctaggtggaagttcaacttaacagtctccaccaaaaccctggtatatcaaacaggcacaacattgagaacatttcttatgagccttgaaatttggtggggattgttagaataattgggctaggcccaatttattctattaaatctcaaaggcccataataaatgttaaggataataataccacctctggatttaagcgagaaatatctcaacctaaatagggagttattagaggctccctgttgaccagttgaggtgggggtcggaatgccacacgcgcgcgcgcgcgccgggccgggcgtgggcgtgggcgtgggcgtgggcgagggcgaggcgaggcgtggctggctggcggcgtgcgtgcgtcacgtcgctatccttttgcagccactaacccacgttccacgattccctccgcaacagcgcgtccacgttctttctcctgatagataaggaggccgcgagtccgatccgagttcctcgcttctttcccggtgttagtttctccttctccgcgcctgagttgctctcgcttctccgcttctgatctcttgcgcgcacgagagattggaagaagcagtgcctccgaaaccacaccttcgcctgagatctgcaccgggtaggcgggtgatcaggtttttggggagtgcctcctgcacgactgctcatcgccatgtctggagttgctgccgccgctattggcggaggtggtgcgccgccgccgacaggagctggatccggagctggtgcgccaggaggaggtgccgtgaacgactacaacaacggaggcaattctgcctcaccatccagcggagggccattctcggggtataatcttctccttctactgctgttagcgctactcctgttcccattgttagcgctatactgtgtgcgctatgttcttgttcctgttctacatgatgcctctagcatgttatcgcattactggtatgttcctgtttctgacattcatgatgcgcttagtatgctactggttatgttaagatcaccctacactgcttatgccatgatcatagtttcaatttcttggattaaaatatgccgaataatgactatatttccaacacctttctggatactgggggtcccattcctctggattcgaaaatagtgtattaagagaagaagagcaggatgaattagaatgcatgcccacaagatattaaggggaagtttgggaggggggacccactgacaaacataggaaaatttcaattctcatacaggtatctattggagaaatgctgtttatcaataattcttgagtctaacaactttctttaactgagcacttgtatcaactttgcaggtttacatatcacgtgctctacttgataactcctctttgcactctaatgctcaaagcattagtcgaagcttggatcatgttatgaggacattatttgagatttgtctgcgtcaaaggtggtctgagatgacatccttattattagagtactgcaagggtgttgaccacaaaatatgggcagtttgtaatggaccttcctaatgaggtttttcatcagttaccgcttgccatttacatttttatgtgtttgctatttttttatgtgttctctgaattagatatgtaaaatagtagacttgaggatgaaaatatctatctggatcgtctttatgggatagaagaaaatgatatcggagctctgattcactcttctcatccaggaaaggtatgccctgacttaacaagtggtacctgtaactttgcaaagttcatacgaatactgcaattactgaaaagtactggctaatgtaatttacaacaatcttttgctgaaggtctttccatatgtcaacttatcttcttgtgtgagcccaatcaccaggactgttcttaaagtaagggcttttggaagccatctgcagccttttttgctgagaaaggtgaactcccaaagagatttggtttagatcagctacactgggaatcctcctgcaggtgataaactgtaccagtcttcctttttcttctctaaactgatatttctaaagaaatgtttctttcaaataaatgtatgatgcattaatccagaatgtcttctgttgaaacctcaggatattgcacagcggttcctctcttggtcatactccctgtgctagagagttaaggtacgcagaaattcagcactgcagacctgtattattaattgcacctaattcaacataagggcttgttagtgcctttggacattattatgcttattattgcaataacttcacttcaacgagattgttttatttacaaatgaggatagtatcacaaaggtagatatgctaagcaattaagcacactcatatagaatcagtaataacttgttatagtctctatggtctcctactttcctaactactactttcgcaacatattaccttaatattgcttcatagtattagctaaacggagaaacatgtgtagggtgtactaaatgctgcttgtccacttgccacttgcattcacagatccatcttagtggcattgatgtgctttgtctttcaggcagttgctcttagtggcattgatgtgctttgacttgtacaaaacatccttggatattcttttaatccatcttgagttatctgtccatgtgtagctttctcatctgagagcagcataatattcttagagatttattgaacaactaccgtaataggcccaacagtggggctaaatcttcaagaaagtgtaatgataggactgtagctttctcaaggagactttaggtttgtggtgtttacattggcaaacaattcagtgattatcaattttctctctcttttctactcgatcatattcttatttctattttattagctaccatcgctggaatttttttttatccctgtaggaagtttctaggcagtgcggtttcaaaaaggtttttaagcagaaagttttttgtattgttatagaaagtttatgcatagtaatgtttatttcttgtataaactttttgactagaagtttctgagcacaaagatttgtgttctagaaaatttatgcgtaataagcttcgtattcctgtagaaagtttatgtattcctgagcagacaattttttatcctgtgggaagtttctgagcacaaagcttcctttgtttatcaatagacttggctataacacatgcatacaagttttaatgacaagtctcacgtactatatggctgcacattgctataatgagaagcactaccctgaaatcaaagctatcacaaagaaatctaacactgaatctgtataaatatgtgaaccgcactgtcggcacatcgccacctctacattatgtaaatctgtattgacagttacatggaaaaccaaacaaattctaaccgagatgagtgaacttaagtgaaaatcaagcataaaacactgtattttttctataaaatttggttttcaaattaaatcatcaccatttcactgctgtcttgtatgacctctacatttgacctatatcagaaagaaacaggtcatattgtactgccagtatctttctgtttttctcctgcagttctacctaactgagacactaacagtatacaggatctgcgtgggatgactcaagcacatatgccaggctgttggtttcttggtatgtacctcaaacttaaacatgtttcttggtgtgtagctcaaacttaaacaagtggatgtttatttatatgtaaacaacaaaattgatggaatgctgactgatttttaattacacatgatctttcatagacaaaatcttgatgaaaattgtggccattcttggcctcacgtcagataaattcttacatgggttttctggttgtattttgtgatgtgctgcaggtcatttataaaacattcaggatttcatacatggaaacgataaatgatctgctcacagtaagtacctataagctaacttcgcaccgtctcgtgcgagtcgttcaaaaaaaatgaaatgcttatacgtactcaaggctaaaccaaacattagtgtaaatattagacttttacagagtagtacactgggtgtaaaagatgataggtttagtaattattggcaagttgttggaattaacagtgttcttaatgcagaccatttcaaattgtagtgctagaactgtgcaagctgtatgcacattcaaagggaatagcgccctagcccaacataatatcttctctgtttttaaagaaaatagtgcagtttgtgggtatacattattagttactttttcaatctattgcaaatcctgatttttactcaacagctagacattctgaccaaatggctgttcttctatatgattgtttgattctattttcatagattttcatttttacaataagtggttactgtttttaatcatatatctttcctgcttgccttggtcatagcacaggcatatacatgatacatttgtatgatcatacattcaaattttgtcatgcatagagcacataagacggggaaagcaacatgtacattctttacaatcctgcaccagagaagtttgacgatgaagtttttcattaactaatcgacatgatattttgtaattcaacatgaatcatctgtgactttatacatgtgtgaagtgtgctaccagtatttcgacatggaagatcataaccgaagattttacggggggcagaggggacgaggtggtggatgacgatggcgagctcagaggccacggtgatggccaaggatcgttttgctgtccggggagtactaggcttaggagattgcaactatggtgtccatgtggaagtgccagcaacgacgaggcagagctcgatgatggcgttgacggtagcgaactcaccgtgcagcccggcagtccaccaccaccgttggttgctgctagcgctgtgtgtgtttgtatgtattcctctacgtcgcaatgaagcctatggcgatgggcgttgtggcatacaacgtgtacacaaggtgtacggtgctatgaagctatgaaggtggcgatcttgggcaggaggcacaaaggcaggagacgccaccagtaaacatgtgtggacttattagctagcgtacttcctcggaataagtccgcttaacattcgtcatctttacgtggaatttagttgaaatccctaaaccgcaaaaccaaatatcttcaccttccatcgtagcaaaaccgtcttagtcgggtcccatcatagtatggatggttgttttaacttatgtgcatcctagccaatagaaagaaaataaaaaacatttgagatccatatatgttaggagatctctatttcctttgatcgccctctctcatctattcccatctctcccacttcttccttctttccccatccctctttagggcgacgaccagtgttgacatggggagtggcggtggcgggagagaggagacaagacaatggtgggggctagacacatggaggtcacaccaatgacctcatcgtggaggtcacaccctagcatgacacatacaaaaaggaaatggaaagctagaagattgcttcgtcaccgtacaagggcggaagggataatcaaaattggtccgtgctgcctgttgtcagttgtcacaccatttatgcctctgcggatcataacaaccatctgctacaactgttgtccgtcatcatctaaatccccttatgctgtcgcccgtattttgaacgctcctagtgcaccgcgaagccactttgcagcgctaccattcaaactcaatccccttatgctgtcgccgtattttgaacgctcccagtgcaccgcgaagccgctttgcagcgctaccattgtcttgcgcagatcgtcaaactcgtcgtcgctcctagagtgttgctgcaactgcctttattgccatgagatcgttggagatgctccactgtcatccacacctcttagcaatcagatttggtgtcgacgctcgcttggcaagtgatgcctctaggacactgccaccagcctcatctgcattaggcgagctgacaacaatcacaccgtcagccgaccctgtcaccaatgaccaccgtcccctgttctcgcctggcgccgatgaaggggcggagccagccagtgtaccttgctccaatcctccaaatcttaaccaagccagtgggagacaggtaaaataccacctgttttcagctttcctacagtttcatcaatgaacgtaggatggtctggtactggcactctggtgatgaattaaccaagcacatggctgaatagaccactgatgacttggataaaagcacgacacacctcaagttacacaagtctgttattaataactccaaataaattaatggaggcacagacctaaataatggacaccacaccactaataactcaaaacgtaaagcacgacacatctcaagttacacaagtctgttattaataaattaaccaaggcacatacctaaacaatggacacaacaaataacttaaaacataaaggacaacacaccttaagttacaaaattaaatactgggtaataatgatccgacatccaagttaccaaccatggcaacggctgcaaggctcccggacattgaacttgactgtagagggaattttcccctcgatgtatgttcggatagccaagagcgaattatgcactcccttgataacatcctgatccaatgggaggcagacatcgatgttgccgtcagaacaccgaagttgagtgcaaagagtgtccaatgtaaggcactcaagggacgttgtattttccataatatgacatattagctcagccaagcttcttgtggcactgaaaccagtgatcttcacattcttaagcttgtcgtgccggtgttcggggatttgccttagacatatgggatccttaaatgtcaagtcatgcttctctttctgtgaaatctgaagatgaaaaatcaatgatacttcaataaattataaatggtccaccatagttattagataagcattgcataatgaacggcaacttacacataggatgaaagtctccaaggaaggagaagcatcaagaaaagatgcaagagaaaaataatcataagcccaggaaaatctccatgttgcaaaagtaatcctcaagtatctaaggtggaggaatttgccagggccagttggtgtatccaccatctgcaaaaagaaggctcagaccaattatatttcagagcatggtactacattacacgccaacaatgtatcacctaaagtgcggtgcatacctcacaagacaaaatgacattaagagtttcaatatctggcatactaaacggaagctcaacacgagcataacagacactgttggggaaaaccacttccagattcttcaatcgcacaggttcctctagtgagaattgcgcttgtttaccttcaaagtgaaaactgcatagatttggagctttgctttctagcatttgtagcccgaaacatccaaatacccccaggaagctaagccgctgtagcagacaaggtattgtcaggcgattaatctcgccacaacgcttgatttccaacctctccaaagctaaagcattggaaagaagatattctatgtcggtatcaataatacgcacacaagatatgtagcgcccgttccgtcgtggcgcctagcgggaaaatgta

SEQ ID NO: 10189 - DNA, 6312 bp, Oryza sativa
aatgctagaatgacttacattgtgaaacggagggagtatgaactatttccttgataatttttacagaggtcagtataggtctataagagtcagatataggacaatacatcatctacataatcgagagcgagtgaaaaaaaaagttatttttagttttcttttttcagaaggctgtgaaccatactttaatttactatgtaagactattaataatcgtactagtatttttttatgtcatcatcatgcatgcacatcatgtcagatactcagatatctcaatgcaaggtaaacatgtaccctccgaatggactagagaagctaaatttgtcgatgttaacatacaagctctgtactgaaaaccactccctgtgtgttgcagatctcaacggccgtggtggagccttacaacagcgtgctctcgacccactccctgatcgagcacaccgacgtcgtcgtcctcctggacaacgaggccatctacgacatctgcaagaggtcgctggacatcgagcggccgacgtacaccaacctgaacaggctcatctcccaggtgatctcgtcgctgaccacgtcgctgcggttcgacggcgccatcaacgtcgacatcaccgagttccagaccaacctggtgccgtacccgaggatccacttcatgctgtcctcctacgcccccatcatctccgtcgagaaggcgttccacgagcagcactccgtcccggagatcaccaactccgtcttcgagcccgccagcgtcatggccaagtgcgaccccaggcacggcaagtacatggcctgctgcctgatgtaccgcggcgacgtcgtccccaaggacgtcaacgccgccgtccactccatcaagaccaggaggactgtgcagttcgtcgactggtacgttaactccatcatctcgctgaattccagagattttagccggagatgatgacgatgatgatgacgaagacggtgatcttgtgtttcaggtgtccgacagggttcaagtgcgggataaactaccagccgccgacggcggtgccgggaggggacctggcgaaggtgaggagggcggtgtgcatgatcagcaacaacacggcggtggcggaggtgttctcgcggatcgaccgcaagttcgacctcatgtacgccaagcgcgcgttcgtgcactggtacgtgggcgaagggatggaggaaggggagttctccgaggccagggaggacctcgccgcgctggagaaggactacgaggaggtcggcgccgaagtcgaggacgacgacgaggaacagggcgagtactgatcgggctagcctgctaggtgaatctagcacggtagataaaccgcaagtttgtaaggtcggtggaagggggtctctcggtttacatggactcttgtgactttgtggtgtgagagtgggttttgttgtacttgcatcacaaaaaataaaagaattcgtcagaaatcaaaatgtgaatcaaaagcaaatcacagtgagtatgtatgtcgataaattattcgcggcacaattatttgtgccccatttggaacatagaaatccacatgaaataatccaaaaagaaaagacaaatgtcatagaagacacaaaaacggtttcacagaaaccaaaatgtgaaagcaaatgaaaaaccgcatatcgataactttctcccaacaaaaattgtcatatcgatcgtttcaaaaaaaaaaaatcatatatcgataatttattcgcggcccaattatttaagccccatttgaaacatagaaatccacatgaagcaattcaattctaggcccacaagacaaattccgtccctggcccaaaagcgggctgctgtttcccgtgggcgccggacgggcagacgacgaaccagtggttttgggcgaaccgaaaaaaataaataaaaaaaagagccgaaaaaagtgaaaggcctgggagcgaagcggcagagaatggcagggaaagccggcggcctcaagggcgtcgccctcatcggcggcgccggcggcaacagcgcggtcgccggcgccctccacttcttccaggacccctccaccggtacgcgtctcctccctgtagctccgtgctgttcgcctgcgcgcacagcagctcgtctcgtaagtgaattgacctcttctcgctgatgtgattttggtggactactcgatctctgcgtggttttttagggtataccgaggtgagggggagggtcaccggcctcgctccgggcctccatggcttccacatccactcctttggcgacaccaccaacggctgcaactctaccggttcgttgccttccgtttcccttgcttggttttgtgacttaggttgtgaaattgatgggggatttggccatttggagcactgctcgataagatcgtgtattgcaattgtgaactcgcatactcctatattatgtataagtagaacttacaacgctaactaccataagagaagataggcatctaatttgagttgactgctgatcaaaacatggataggacgaaaacgtcactgaggtaggaacttcgtttaccaattgagttgtgctgtgaagaattatcaaatgaccgatttatttgttaaaaagtgcactggacaaaacttttttttttgtcgggacggccaaagataggccggccaatttcattaagattgggggaaataaagttttaattacaacgacatgaaggatgtcgcgccggtctcaagcaaactcaagcactggacaaaactgttggttgtatttatgtgtgcactacaaaaagagattgtcacgcctcccgcagagtttttatgagttacaatgccttcggcaagcctatggaaacactactattagcctttgcccaatgaatgatggatcatggaatgggtagtgagtgtactcaggtgaaagttttggggaactgcataagctcaatgtatgctgcaaaaaatgtttccaatacagaatcatctgctcacccttccattctaattgtcctgttcaaatcttgctactgcatttttaagtgaatggttttcatttcttttatttagggtttgtttttcatgaaaatttgacttttttcttcttcacgtgtacggggtctatatttgaaatgttatggagagatggataacatcaaactctatgttactagatttatttgagaattttcataacccaagttgggggtgctccatggagcagctgaagtgttctctcatgccatcttgcaattgttatttttcatttgttctgattaaattacttgtcccagggccccattttaatcctcacaataagtcccatggggcaccatctgatgatgaaagacatgtgggcgacctgggaaacatagtagccaacaaagatggttagcactctgtcaggccgtctacattaagacctttgaggcaactaacgcaaagaaactttgtaaattaattcatgtgtgtctaccaataatacatcacctttttgttccaggtgttgcagatatcttcataaaggacctacaggttccattgtcttgaaatatgtaaaatatcagtttgttcatcttattgtttatgctaatgcattggtaattcatattcattgctttgtgaagatttcactaagcgggcctcattccatattgggaagggcagttgttgttcatgctgattctgatgacctaggaaggggtaagcattatgtcattactcttgcaagattgttattggtcattcagaattgaagagaagtctcccttcctacattatatatgtcctcttattttagaaaatattgaattcactatttagagggtaatttagagcttattacctgccgaatggcgtgctatcatgcatttgaatattcatataactatttaacgtagaagttcccttgttagctatggttgatatgggattattcggtgttccaaagctgcctgagatttggctcttcaaccttgagtgtaactactagtaaaaatcatattcataagacaggtaatccctcccaagcccaactaacctgggatatgctgaattgctgatagctgtcatgaaattattgtggactgtggtactatgttaacatacagtagggtataaatcataatccagtaggcaagggcccaaaacaggtccagataacaggatttgcatgggctgtaccatgctgcagttcaaaatctaactgcccatgggctgtacaatgctacaggtcaaaaatctaattgccagtctctgttcctctgctgcatttatgctaggtttgtggtagcagacaaatgttactgtggtgccttaagaaatacatttctagcaatctagatctaggattctggcactatctatgctgcattgttttgccaattattttcagtgcctccagaggcctttttatacattatttgtgcaagacatgtcctaggagttgggatgataaagctcttgccattaccatcaataactgcgtcatactcaattctgaacaacatctgtttgtgtccaattatttaagtatgaaatattttggtataatatttttctctcctgttcaaactctatgttccatttgttaacaattggctaactttgactagtggtaggttccaaaatacatgctcaagtatccatcagttgagtcaaattacggattgcgagcctaatgttagaataggtttcatgcacaattatgttttgccatttagtatcacatggtgaagcattcactttttatgctgctgctcattgtactactttgatattttgaaggtggtcatgaactcagtaaaacaacaggaaatgcaggagcaagaattggatgcggtaagtgagaatctttttgtagtttctgaaactgagaggaggaaagaaccattcggacatactagtactcaggaacacataggacaaatattgtacaaaataaaaagaaactttttttttctctgcaagaccgatccttccagtggaatgacaagctaatatgtctgctaataacttgtaggtatcattggacttcgatctgcagtttaacaatctatagtcatgaagcttgaggtggtggtggtatgctgttcagagatatggaaatcattggcgctcctcattccagactgtttcaagaatggcttttgacgtgttatcactgccttcagttatctatacgtactttgttacggagtatattctttttttgaacgaacatacggagtatattctataaataaaggaaaagtttcctcatacttatactgtaccttggactgaagctgtgcaaactcacaataatgtgttactatttctcaatcttcagcttacaagcgatgctgctttgaatttggccataagccaatgtcctttatggtactattaaatgaatacatagcagctttttgtgaatatatatgctcgtaatactgttatactacgaccttaaggcactcctgttgcctggcaaccaagcaaacgctgacaaatctggaaacgggtttgtcatggtgtgtgttttatctttgcttcaaacatactgaaacacaatttgtcaacttcaaacctgtgtcagattctactccctattggatcgaagaactggaagtgctcgcctaccctctgtttaaccaaccattccaatttgtcaacttcaaacttgtgtcagattctactccctaccgtattgaaaaaactggaaatgctcaaggatcaaagtatcctgacagcgtatgacgtcgtgagcaccagccggccatgatccgtgagtgaccatcaaaggctgtgacagtcccaagacactccgtccaaacactacaatcttccgtctccaagatgcaaacaagagcaagagttcatgctacattaataggacttgcagtttgcaggttaagtaaatcacgcttagcctccggttgatgctgataccaaggtcagccctgggccctgggggggtaagaatgcctcgacgggaaccggacacaccggaacgcgccaaaagggcgagcgagccgtgcgcgcccgattcggtctcgcggcgcgcgcgaccctggagcttcccccttggctccgggcggtagcctagccgggcgggcggagcagagcggataccggcggccgcgagccgcgacggctgctacggacaccaccgtccaccacaccccgcgcgcgcgcgcgcctccccgcgcgatgccgccacggagaagcggttcgtggactttccggaggcgtccggtctcggcggcctagacataacggcgtcacgcacgcacgtagcgcgtacgtaccctgggtcggtttggggcgagtaaaataaacgagcacgcacgtagtacgtgg

SEQ ID NO: 10190 - DNA, 6856 bp, Oryza sativa
taccactaccaagcgaaccagcacaattaaagtctcccgaagtctgcaaaacctcttcctccatacaaagtcttcgatgcagaatgtcctccttgtattgtgggggtgactgcggactagaatttgtgaaggatagactcggttctaccagcttgttcatcaaatttgatgaaactccatttgtatgtaagtttccagtgccatcttccatctcacaaaaagaatcagcatgcgaaatggctacaaaatttagtggaggaagttgctgggaagaattcaagtgcaactttaaaggagcctggtatatattcccttcatgtgaggattctgtggtaacaccattagcactgtaacatgcaccatcagtgaaagataagtcagattccaaaatgtttgagctgctcccaccttctgacgtctgtaccaagtctgagatgtcctttgagttcttttgagctttctgcattttcttttgttcctcataccttccattgctactgttgaactctatgtaaaggttgtcaggttctgtattctccatgttttcatccatccactccttaaattcacgcagccaatcagttgatttctctttcttcaataattcagctgtattgatcaacgaagtaatttttatgtcattatcagcacctgcaacttcatccttcttagaactgtcactttcgtggggggtggtctgctggtccacaccttcatcacaaagacttctctcttcctccacaattaaggcaagtcgagaaatctttttctacagcaaatagaagggcaaacagactatcgtaaagagatatcagcaaattttgcagagtacaaatgcaggatgccctacttttgcagagttgtttcaatttagtagcgtttaatagatggtgttatatcttgcatttctcgaaacaagattaccataatatgtcaatgggaaatctctgttaaaactagtgaataccccgggtgttgtagcgggaaatttaaaaatactttaaagaaaacacaaggaaaataatttgtaaattatatacttgtaatgcctgaaaaacaatattttgagctcatagtaattgatttagaattgcaattgtacatgacacatggatttatcaagcatgagaggatccaatggctattacttttctaagtgacatggttcaatgcacattgagttttatatcaataactacaataagtgggttgtaaatgtacatgacacatgattgagatcaaaacatgcaagagatccataggctactattttctaaatgatgtggcccaatgcatgtcaagcttttggttccaactatataggatatatagatatgcccccccccccaaaaaaaactgaggctataagaaaccagcttctgcatgtgaaataaacaaatcgtaagcatgagaagagatcactatgcaatatttctattggtaatgagataaaccgctctaactaacagttcttgaatattttctgtcgcatacaatagatgaattttgtggcagatgttaacttaccatctttgaatttgatgtgtcttcatcctcatggtcatcttttgcaggaaaataaaatccatagccagcaggttgcttttgcctgcttgaaaacagtacttgtttttcccagtactcctgtgtgttcatacctttatcatctaacttcaactgaggcagaaaaaggtacagaacagagctgtcatatcactctaatactgtggaagagactattatgatggagaacataaagaaaaaaacatgagaaaataatgcaatttgatgactactcacactttctgagttgtggagaaaactgaaaacacgtgctcgataccaacgagcacagcagattgggttgccttccaaccataggttctgtagcaaaaaaaggctaccaagtatttccagctccgagaaatttgagatgatgttgtaagacagatcaaggtccataagcgactttagatttttgatcccatgtagtgtagttaaagcattatttctcagtacaagttgcacaattcgaccgcaagcctgcacggaagtaacatgccatcaaacaaaaacaacagtacgggaaacaagctcgccggtttagcaatattccaaaggtattcaaaagaaaagacattttacctcactcaaggatgatatagagcgcaaatgattaaatccaagatctagatttcgtagctttgtgcatttccgcagattatccacctttgcaaactggttccgactaagatcaagggtttcaactgcaggtaacaactgcaatgactcatccatgagcaccagaccatttgaagcacatgatacatacaacagccgaccccatacgggtgagtccttgatatccatgatcctgctcgtgaagatatgcctaagagcatcctgaagtagtgcaaaactgaactgttacatggccatggacagtattgttgcattgtgtggaaatgaacaaaaaggaagcctaatcagaagaattgtttgaccaatgcaactaactgtgcaacttcttcctctattaacttttttgctgctactgagcttttgtttgtgtaccaataaaagatccaagcaatggcactgcccagtaaattgcagcctctaaagccacaaccaaatattgaggttctcaggctatatgctctaaacagtcaattatatgtctctactagtaattacacggtccatccacacacacaaacactttgtttgtttccaatcaacagtgttttagttgtttataatgggtaccctgtgataattacctagacaagatgacttattacagcattattaccttaaatgaccactgcggactccactgaaacctctaactcagataaatgacaaattgcctaagttttcctcagtaaatttgcaaaggagtatgtcaagaagcataaccctattttcagctgcatgaaagcatacacaagacaaacgtacaaagatattaaatggctacagtgccacacaacttctgcattcagagattaactaagcacgtcaggagggtaattgcagcgagcacaaaagggacagacgctacaattgcaatactgtggagtgcaccatgtgccacaaacccacaacacaagcctgaatgtgatcagaacttagtattgcaaagatgctcacaattctctagtccagagaaacagcatgtggattagattgctatcaaattcatattcaccagaggggtgcttgatgataacctaaagacctagcagcatcccgttaaatcccatgggttacaatggaaacattagtaaccatcaaatgcttgtggcgtcatgtcatatgtcatactagtatcttagaactcggaaaatgggcaaattcacccatagaaaagccagtaacatgctgagtaactatagtacaatacttgtaatatatgtgccagccaccaggatgggtcagatcctaggaacatagtattgattgtggctttgtggtctgtggggcataggtgggataacacttaaaaccagttcgttggatgtagaagaaccagactgcaaacaataagcacaattcacacttaatatagttcatagtttagtatgagatcaaaactagcgcctctgctcaccatgtgaattgccggaaacaacgaattaagtagctgcaggatcagaattactggggaacatgtcgtaatcgcaccgtggaattgtaacagatgagcttctcgagggtgtggcggaggtcgagcaggcccctggcggcggaggaggtggagaggtcgcacccacgcagctcgagcacgcgcaggcgcgcgaacggcacgagtgatagcggcgccgggtcccgccccggcccgggggccacgaccttgagcgacgtgagcaggcgcaggatccggcggagctgctcgagcgcgcggtggtcgccgaggtcggcgacgtaggcgcggaggtagtcgacgggcgcgccggcgccgaccgcctccagctcccgcagcgcctcgaggcgggaggcgacgtagtggagccccacggggtggagtcgcagggtgacggagccgtcgagcagcgccccggcgttgcggcccacgaagcggaccagcaagtcgaggtagcggtcgccggtgaccggcggcgcgccccccgcacggccagccgccatcgccgccgtcgggatcgggctagggtttggggacccgccgcatcggcgaatgggggcggagcggacgccggggagggaagaggtggtggtggtggtggtggcgacggaggaggaaacggacacggccgcgctagtatgattggggacacgcgggctcgtgggggagggaacggaaggcgacggggtgcggccgtgcagccaggccgcgcggttgccagtgggtaactggcaagtttcggctggcacctcgcggatcgctgtgctgtgatctccttcggagaagctcccggtttgtggaggccaaaacggacggaatcgcgagagtttcccgtgtaaactttgggtcggttcgagccggacggactgccggagcgacgggttgtggcactggtctgtgctcccgtgcgctgtgtgcggcagtttccggcgctaaagctttgcgttgtgagatgtgccgccctcgctggcttggcgtgtccactccaggagaaggcctcttttggtgttacctacagaagcgtttgtcctggtcttagctgccgcgtgaggcgggggatcgctttccccggaccgcgccccgtcttctcgtgatcgcgtcaggtgatgcttcatcagttcagcgttgtttcaggctcctacgcgcgcatgttggttcaccagatcagagttgttctcgtccgagaattatattactttttttcttgtactttagatcagatatgatcagaattagatccgatgagctattgtttcttcggcggctggatgaccacctgcctgagtgttattgctgtattccttctcgtagaacatggtatgtttcctcgtaatttcactaggataacatatggcatattttggcagtgtgggcagtgctattatcagcgactctatcttgcaggatcacgattcaatccttactcgctctcgcgttgcccacatgtccccttccagaatttaatgagccacatgtcgaccgcatgcgccgtttagcatgccacgctagacgctacaatgaactaataatgaagtcaaatttgtttattccctgccttgccagattcaaatcaaggtgtggctgcatccacggtatcctaggagaaactagctgtattttttggcatgttcacacgaatgttagttctacaaacgaaaagcatgaataatagtatcgggctgatcctgtgtagcagtactgcagtagcactggggaggaaacgtatcctgaaggccttgtttgccaaggctgaaaattctcaggaccttagggatatgggctttggcgaagatggccgaagagtttgagcgtcatgttgtaacgggagaaagtctacaagacgtccttcacatacaagcctagtctaatttttttctcaaccccaaaacaaggtacagcattacagcacccatattaagaattaaaaccggttcaatttacctctttcagtgttttgtttcctgggtttatcccatgtgatatgttgatcggttaaccaatgttaacgtattgtccacataagcaccaatgcgagtgtaagtaaagaaaaaaagaaaaaagaaaagcaacgggcttacatgtcatgtcattccctcactctccctcctccccacccccaaactcgaggaaggcatgccgagggtgggtgcggagctccgagaggataagctcgtgttcatcatcggtgacatgggaacaacagggcttacggatcgcacgggtggagcttgagctcgccaacaactgtgcccaaatgaagaagctcatgctcatatgtcatcagcgacggtggcaccattgaaggtggcagtgccccacgatggagtttgagctctgcgacaatatcaacttcttgagaaggtcctaaccctacggtagcttacctttctgagggagagagaaaagggggagaagagcagaggagagagaggattttatttcgtgtgcatcccatttttttttatttttgataagagacctccctacggctacacctattttttttgagaaaagtatgaattacccctctgaactatcacggtcgaccgaattacaccccttaacacgaaaaccagatattgttcaccctgaactttcaataccggacgaattacccccctcgatctaattcagagcggttttgtcctatgtggcgtacccgtggcaacccagtcagcattttctatttttaaaaaatgtaggacccacatgtcgttcccttcttcctctctcttcactctctctctcgatcacggggcggtgcaggggaggatgtgggcggcggcgcgagcggcagcggcggacgcagctggcggcaagcggcggcagagggcggcggtgcccaggggcggtgggcggcggtgcacgggggcggacaggacggaggcgcgaggcgaggcggcatcgccggaggtggaggcctgtggctcgcggtctgcccgtggcccgtggctcgtgccggcagtcgactacacgcagagccccgaggaggaggacgcggaggagaccgacgacgacgaggaggcggcggcggagcaggagctcacgctcgccgtgggcaccgccgccagtgtcaagtagaggtacaaccgcaacgagcaccactcccccgggcagagcttcttgtcgtcgtcgtcgacggagtccgatgtgctcgtcaccggcatctgggattagcaggtgcctcacggcgacgcaaccgcggaa

SEQ ID NO: 10191 - DNA, 11096 bp, Oryza sativa
tttatactctcgacctatctatcaccaatactactacttttttttaataatgagaaatactttttttaataatgaggaacactttgggtatttttactcctcgctaattttacattgggatgctaggattcgtctttttttagaacggagagggagtatattctaaccgaaactcctaatgggctatcgatcgcccctagtcacccccctcctccacgtggttttcttttctggcaccgcattactttcctattttagtaaatttatgcacctaaagtttatacacctcaagtttatacatctaaagtttagagacccaaagtttataaatcaaaagtttatatgtccgattcaaatttaaatttgaattcaaatattttttatatatagtatttctatacatctaaagtttatacacctaaagtttatagacccaaagtttatatacccgattcaaatttgaatttgaattatatcggattcaaatttgaatttgaattcaaatatttttatatatagtatttctatacatctaaagtttatacacctaaagtttatagacccaaagtttataagtcaaaagtttacatacccgattcaattttgaatttgaattcaaatattagtttataaacccaaagtttataactcaaaagtttacatacccgattcaattttgaatttgaattcaaatattagtttatagacccaaagtttataagtcaagagtttacatacccatttcaaatttgaatttgaattcaaatattttttttatatatagtatttctatacataaatttttcaactttgcttttttattttttaaaaatttatggtgtagtaggaagagatgaaggagaggaggaaggaagagagtagcgtatagggggatggggggtgatcgcccggagcagtcacccgcccattagccacaccctattctaacaccatatgcgtacgtttacaagatgatgtataattacttcatcttgaggaagtatcaaagttgtggtggagtggattatttcacttaaaagggttaaaattctgatatccacgtgcccataatgttaaaaaattgaagtttagtacacgataagaatttactcgtggtggtctcttgatcatgtattaagtattaaggtggtattttcatgaacgtgtatatatgtataggtctttaattaatgtaacaaaaacgaactacacgaatattcttcttatgtttttgtatataggatttaagggccctgattcaaatgattgaagcttttcaaatcctatgaaattcctatggaatggcacattgcatgtggattttaaaggaaatttagcaagaggtctaacttcttgaaaaatttcctttgagtctacctctttcatccgattcctgcgtttttcatgcgctccaatcaaatgaccatttctatgtttttcctgtgttttgcaatcctctgttttacacttcaattcctgtcagaatccttttgttttactattcctccgttttttctaacctgcgattcaaaggggtcctaaatggttctatgaagtgggtccccatgttcgaaaagttaccgattctttgggaaagctggcgagaccaagccgttacggccccatggggccgttcctggcgaatgttaagctccctggctaaatttaacacgtcccatcccatcaccacacattgcatgaggctgttttcttgagagctcacctgaacagtcgaatctactgtatgcagcttttgtaacacctttctcctcacgaccgactccgtgctattgggtgttggccaccacggatccatcggcgatcgagtctccattcgtacgccagaccgagcccatgatctacacgtactactattactaccaccagaccctgtgtagtttccgcacaaaaaaaatttacaccttatcacacctttctcctcacgatagactctgtgctgttgggtgttgccaccacggatccatcggcgatcgagtctccgttcgtacgccagaccgagcccatgatctacacgtactactattactaccaccaggccctgtgtacttcccgtgcaaaaattttacatcttgtcacatcgaacgtttagacacttacatgaaatattaaatataggctaaaaaaataactaattacagagattacaactaatttgcgagatgaatcttttaagcctaattgcttcatgatttaataatgtagtgctacagtaaacatttgctaatgatggattaattaggcttaataaattcatctcgtagtttacggacggattttgtaattgttttttttgttagtgtccgaacatcctatacgatatcctatataatatctgatgtgacacgttaaaactttgagcattgctccagtccagcatattgtacctcgaggtaccagtaccttcaggtaccaatttaaatccaaccgttcattcacggagggtaagattgaaaatctcacacgctaaacagctcatgatcgtgatgctccttctctctgactgagtgactgtgtcaacgaagactccaagagcaactgagcaagtccaaaccaagagcaaggacgtggtgggagcgcgacaaggggtggtcggcgccggtggtgccgggggcgtcggcggcggggtgttggacggcagcgtgttgggcgccggcggtgtctgcacggcggcgaggtaacgaggagcaggaggggtggtcggcaccggtggtgttggacggcggcgcctgcgtcgaaggctgctacgcggcggcgaaggcgacgaggacctgcgtcgcttgccgatgtgcttgaatccagcagcgagattaggggaagggccgcggtagacgtatgtcaccggcgagcttgggggaagtggtgcacggaggctcgtcggccccctccacctccactccggctagcctgtccatccctggtgagagccatcgatcgatgcaggcatgcagcatcttttggagagagaaaagacaggaggaagatgaagaagatacacgcgaaattacttaactacccttgcttctttagtactccatccattccaaaatataaggcataaccaccctaacccaaagaccaagaaataattattattattatcttgtagtttggatcatcctaataaatacaatgcatgcatccaatagaattagaaagcatgagagtgaaggatctaaaaaagtaatattttattggagaagtggtcatagttaattctctacatgtatgcatgccttataatatggaacatctaaaaaaagtggttgtgacttatattatggaatggagggagtacctttctatgctctataaaatcacgtggacagtactactaggtacaactctttctcacccgttagatcaaacgaaatcgatggttcaaattacatgtacgggcaggtaccaagtacctgctggaccgtaaaaattctctaaaactttagtgtcttaacaccccatgtatcggtggccggggcccgggagccccagagcgcgcgaccaatgatgcgcacgagtacacaacagcgaaagcgaagcatgcatgccacgcgcgcgccggcgagcacccaccaccgcagtgatccctcgtcgaattcactctgatccagccgctgccgcacccgccgacccgcgggcgctgctgcctgcacaccagcacgtaaaagcgcgcacggctcgatcgtcgcgatggcctttccctccagtctcgtgcgtgcgtctggccgaaagaggagagatatatcgaccacggcagcgacgcacgcagcgtgctgcttgcatcggcgcacgatgcaccgtctcgtggttgccgctcagcgggagccacactcggatgcgtgtattacgtatgtgtcgctgtgcgcgtctcgtgtgttgctgtgcggtccgcggtggcgtggaccacacgctccacgcgcgcgcaggccatgggcgctagtataccatctttctgttctgttccgctcttccaggtggctagtggcaaagcctgtttgtcttggacccattttcgaaacgctccagatcatcagtgtgagtttgtgaccgtgacgtcccagagtggccacgtcaatatatagtactccctccggcccattttaaacaccactacgagttttcatatctaactttaattgttcgtcttatttaaaacttttctattaatatttctattgtattatatgataataaaacatgaatagtacttgatgtttttttttaaaaataagacaaacgattaaaattggacattgaaactcatatgcgcttaaaatgagacggaggccgcacacaaaaatcttgttggaagtccatatgcatgtacgtaatattcacgaggatttgaaccctagtgggttgagtctaggagtgggtattcggtctgaccaaaaatttcggtttcggtcttcgatcttttggtcatttcactctttggaaagtgaagaccgaatttcaaggcaaaatgtcagaaccgacaaattcggtctctgtcttttcggtctcggtctcggtcctaaccgaaattcaacaatattttcatatatgcaaacaaataatgaaaaatttcaacacaaaaatcacaaaaaatttcgtaagcacgtattagtaaagactcttattaggttgcatgcctaaaagaagtagggatgtgaaaaatagagtttaatcctattgaacttagtgggttttaggttgcatttagatatttttgctaattcggtctattcggttaaccgaggagactaaccgaattgagagaacaaatttcggtttttcactgcctaggatcgaattgatgaccgaatttttggtctcggtctttttctacctacccctaattgagtcatgcacccacgagtccatgacttcatcaccacaccgctggtgcttcctaatagtactactattagtatatctctcctccatgtgtctgccttctttgtgaccccatcgatcgatcgatcgatagctttagagtgtgtttaagaaggaggggattgaggagattggaaagatacgtaaaatgaggtgatccattagcacatgattaattgagtattaattattttaaactttaaaaatggattaatatgattatttaaagcaactttcctatagaaatattttgcaaaaaacacaccgtttagtagttcgggaagcgtgcgcgcgaaaaacaaaactatttttctctctttctcatgcgctcgaacgcagcctaatagttgtgcttcagaaaagtttgtttgaaaaaactagcactactgctactttagcaggactgtgcgtttattggtacggggtgactggatgattgccgatttgccttaaacttcctagtttcctacttctgttgtcgatgagcgattaaccttggccactgaggcactgtaaattgccctagctagatcaggctttcggtttcaaccaataagtttgtcactgcatgcgttcttggcgactcattggtccgttgctaccttttgtcatttcgatagcctttttcatgtcaccgaagagtcaaaggcagtgatcaaacgctgatgatctgatccacatccaagtaaatactacaggtagtagaactcttgcagtagatcagccaaacctacaggtaattttcactgattagtgattacaactctacgcactgatctagctcgactttagttggcaactgtttcctcaagcttctgtacaattaatgaaactaaaatgtgatcctatagcacgatatgactaaacaaagtcaaacgacaaaacggtatgggctggtttggtttgtgctttgtggcctaaatttagccttaattaccaatattggtaattttaatagtgtttagtatcattttgtttgatgctaaattttgacatgcttagaaaaatataccatttcaatagcaaacttaagctattttggctttaatccaaacacaatattgccttgtcaaaattagtgatgctaaaacttgccaaaattcagacattgtttgttattttttataagactctttttgtctgttgggctttctttcaaagccgggtcaatataattaatctgtttcaaaaaacaaaaacttgccaaaattttacattgataaaaattggtagatcaattttggccataaaccaaaccttccctgtatacgctcaaggaatattgctcgatcttcgcgtagtaaacacatcattcgttcctaccaagagtgttcggttaaccgccctatcatcctcttctcattgtcactcgacacaaggcgcacatatacgcacactcgcacatgcaacgcatgaatgttactagcttagtacctttcaacctgtacgcctgcagtaacaataatcttagccaaaaactaaatcccaaaacgagataagagcctggtcatggccacaccgacgacgtccatcccctgaaacggccaactgatagcgtccaaattaagcacacacatgtaaggattactgcactggctagacatgccacaccaccagagacagagacgcaaggatggcgactgtaccagcagcagcagctagctagctagctgcaggcctgagcttagcattcatggcatgaacaataaaatggaacaagtgaggcacacggactgtgcacagcgtgcaaggcaaatgtacttaacagagatggacaccggcccgggtcacagtgtaactgcccagatttcttcttggtgatgtacgagagatgtgtttgttgtgctgcatgactgcatctctccctgtgcatggctaatgggtgccattttccatgtgcatatgcctcaataatgaatgcaggtgcaattccatggggtccatgagatggtactatatatccgatgttatgtttaatttctctctcccggtcttcctcttttccctgtttacctgcaacacctttccctttcctgcgatttgtttacttgcaattagttgggcaatttgtttattttattactcctacctgtgcacttgcttgtgtaccaggcaaggagtggcctggctggctagccgggtcacttttttaggtgctgatgtgaaattggctggtgtcttggcatgaaggagacaaggacatcagacattccatgacttcataccttcccaaacttccaaacaaataccccaatcagtgtccgtctgtgttctaagcaggcaggcacctttttttgctggtcatgtggcttatctgtttgattagtataaacaaatgcagtcttgatcgagtactggggagtagctttctcacgaactttggctggaggatgaaccgtgggtcctcatgttagtggggctcatctgtcattggaatgtaatggcaatgggctctctcatctctcttcacattagcccagaaaccttagctagaagctcgtgcatcagtggctgcagctccaggtttatgataagtttccagagagaatatacttcaaatcacactgtccgaagtctgataattcacacaacattttgaaaggaaaagttaacggagtctgggggaatagaactagctactgtgtactgctttacatgccctgtttatctcttctcctactgctactctgtattcggtcgatcgatccattcatcatactgttaccttcagaaaaaaatgaaaagtgagtagtcgttgtactgctactgttttgagattccgaatcaaataattccaaaatggacagcataagtccattgagtcctcgatctcacagcagcttaaagaattatagcagtgtactatattggctctactatttttatatgttctccgagggacctgttttgcgcgtctgtgcagtcatatgaatgcattcgaatgccacattttctgccatcaagcaaagctgtaaggcccaacccggccaattatttcacgtccacggtacacacatcgcaatctttcttcttggaagatatctgcaagaaaacttttagtctgaatcaatcaatcagtagccattcttacccagccaaaggccatggcttcagctcaatgctgtccctctgaagcttgcataaagaaaaattacagtaaacaagaggacatcgcttgcaagattagtactaaaaacgaatcaaacgggccccgtatcaaactgaatcgcctctcatggaatacagttccgttgcgtggatgcacgaaagtaagaacaaattaatggcttgctcattccgtcatgtagtacgattgtacgaacgtacaaaccggcagctaattgacaagggaaaaacatcacctacattatatacacatacataatcacgcggggacagctgtcgctaacatgaacagctggtgaacagacatagcatgatgttcaggaaagagtggttcttcagtcttcaccgatgtgtaaagaactatagctagagactaaagacaaagagagacatacatacctatacatatatactctcttcttgtccattgcaatgctagacacacgtacggacacaacatagtttacgtcgaaatcatccatctcggagacgaagctccgggcatttctgcttggtccaagaggtgatcatcgacagtgctctcgttcatccattggctgcttcctgacttgtgatcaggacccgtccaagacgatgcagcagatgcaatgatccaggcaacggtgaaatgccaatgccatgagcgttgccgcaggctatcttgcaatacacactcgatgcccctgtcgtcgcttgcacacatacgcaacaaggtactataatttgaggtttgacaagcagctttcagctccatttccctggagaaacaggaaaaattggtagcaatgtcagctcatgcatgatggtggaatataaatccagcaactttgaattcaacatgcatgcatgcagtacaaaaaagtacagtatgttcttctattcgtggtgataacctgcttacaaaattgttgcgtagacggcataacaactgaataggtgaatgaattgcatgcacatgatgtcagtccacaaaagaaagctactagttcatagttttactaatataattacttgtcctatgcacacataatagtataaagtatagtagtataaccatagggaatacctttagtcagtgatgtaaaagaaaagaaagggtgatcgatttgatctgattcttcaggtcatgggcgagggagcaaaattagctgttggtgcagagaagaggaagacagcaagcaagtaaaaagaagagctcgaaaaggttaggacaagggcaagtggaggtcagtcactttgatagaatggcatgttacatacatacataaaaaaatagaatgctgtaacagatgtgtccttggggaataaacatgcagtagcaaacaaaccctggtttccgtgcccaacgtctgaccgtccgtcttatttgaaaaaattataaaaaaaattaaaaagacaagtcacgcataaaatattaatcatgttttatcatttaacaacaatgaaaatagaaattataaaaaaaattcatatgagacggacagtcaaaattggaaacgaaaattcagggtttgccttttttttgggacagagggagtaggaaggaataatgtctcaaggcgtttctgagcggccaaagttacacacacacaaaaaaaaaaaagagaggaagaactagcagtagtactagcctacaatatgttatagtagcagcatatgaccatgtacctactccatccagtgttccggtgttccctgattccaagctgattgcatcaagactggagagctcatgctcttccaatggccagcttccaatccatgcatagatctagctagctagctaggccatcacaagggtctaaacgagagccacgtcacgcacaggaagccctgtctcctgcttgattattcgtaggcatcctccctgaccagtcgagggtgtactgtttgtcgttgtagcaagtagcagaagatgaggatcaatgatgcatttgatcgtgctgtattcgagtgagctctgaaattttcatctctgatgagacatgggttttggttcgctgctgtttcatggatgaacatgtagaattgagttgagttcaaacaatcaaacgcctgcaaaattgtactgcgacggacttgtttcaaattttgaatggaccatttctgctatatagctgtagtcctgttgattcgcactcgatgtattgttcaaaccatccagggaaaaaagaacttgccattgtctttttataattttgttccaagccgccgtatgatgcccaggacatactgatatgtgatgtggttcatactttaattatgatccatgtcgacagggtcaccttttttccttgttaagtgcagcaatgctttgaccaattgacgtcaccaaaaccatcacttaggccagctttagcagacagggcaatcttaattgtatactagtatattatgcctgtattgtactggaggaaccatgccatatgattctgtcatatgtaaggctatgttgctgcaagctccctgccaattctgaaatatttaaaaatttcccagtttcaggatggagattctgatgtctgaaatctgaatccttgaattctcattgcccaggagttgatgggcctcaaatgcatcctggaagctcagcctcagcatagcccatgggctatataaactctctttgcaggctttcaacaataggcgaacctgatacagagtgtcagagtcacaggaagcacaaactgaagatcacgctcagaaagaatccagtgaggtactgatcgcttaaatgcccatttgttccctcataaataagaggctgaagctaggagcaacatgaactcatcccaatcatatcggtttcatgattcaatattcaaatgaacccctcgagcagcaaatgtaaactaaatcatttttcttagtgttgacaagaaacatcacagatcacaccacaatagaagattgcaggatgttaaccaaacccaggaggcacatcaggatcctcctcatcatcatccccagggcagctaacggcgttgggctcaccttcatttggtttcacttggttatgattctcagtatttgacgactgctgctgctgagttgccatgatgttgctgcgctga

SEQ ID NO: 10192 - DNA, 4358 bp, Oryza sativa
atgggatcagccaggcccgggtggccgtttgaaagctgttggccgggtgccaatcttgatcaattcaaaagactgatacattgcacatactccgaccggacgagacgcactgtctcatccgtgtcgtttgagaagcactcacttagttgtttcgaaaagagttcaaataaaatcaattgcaaaaaaataacagcctttctttgaagcctgcattaaacacttattttccatggctttctgagtactcccgtactcacccttgctttatataaataattcccccccagttgctgaagaagatgaagcggatcccgctgacgagaagttcttccaggagcaagccggctacgatgagttttagggtttcggcctagttcccaagtcgcgcctgtgatgtttggtccaagtcttggcttccgcttcccttttgtaatgcagttgtgagctcgggatctgtccacagcccaacatgactgtactcctactctataataaagagacctctgttgctgtgatattctgtcttcctgtgataccagcactgttttcctgggactggtatcgattaacaggttaatttggagcgtcacgggctagttccgctcgggactagttcggggcgtgacaacggccaaactgtcaggccgagtcggcacaggcccgacaccagtcgtgccgtgccgtgcttgggctaggatggctgtgccgtgggccaggccgtcgggcctcaggccttatggccatctatactatatcctttgatggtttaggaagcggtttctactaacatagcaggttgacttcgttcaagtgtgttgatgtggcagtccagatcatataagaaattaaaaatagaagtaggtccgacgtgtaattgataggggttaaaataaaaaaaaatgttgaggcccacttatcatcgccatggccaccatcctggacaaccgacgaagaatttcagtgggaagttgggttgaggagaaggtggagataggcgacggcgatggggagccactcatggggagggaagctgggtgggaggcactggctctgactcacctcgatctcacattgccagcaacaaaggtggcatcatcggtgagcggtcattgagcaaggcaatggggcggagaagaggaggggttgctgccatcgtggagtgagtcccagaaaaccggggtggggaggagcgagatatcggcggtcgacataccgtccgccatcacccgccactgctgaagccgggccaagaagtggatccaactaggcggagtgtctcggctgtgatggcgctgtatacatggtgacgatggcggagacctcgggggtaggtagcgagcttggccaactatgtgacgttgagggggagctcgtccaaatcgaagcatacggaatcaaagatcggaaaccaccagggctgccgggttggcggaggacatggaagcgttaaggaaggctgcggcagcgtggttagccgtacgaggcggtggcgccaggccaccacggtcgggtcgtgatagatcttgtatgccccgaatgtctctgttgtcccacccgccatgaggaggatctagtgctagccgctgctgtcacttagcacacttggaccaagttaatccgccgcattgatagaaatagcttcctaaactatcgaaggagtcaatttgtactttttttgaagtctgtgaaggagttgtacccggttttatagttgagagatgtggctctactgaggacaagaaatgagggaagcaatatacttatatattccaatgaaaaaaggccactgcacgggcacagagcactgggagtgacagggcgagcaacccagctacagtccatgcaggactgggccgagagcttagcctgtctccgtctccgtggattaaatgatttattcgtgtggacgatgaaggtagccgagccgcatatagttagcggaagaaccgaagaaatcaccaaaaaattccatggggtgtgagcaagccgttctggttgattgatcggaaaaattcccgggttcgttaccgtgcaaacgtgcagtcctgaaagtcgtgcatacaaccgcgcacccaattgactcggacttatcatttctgcacgttaccttttttttctccctagttaagggttgaacttttttttccctatatacgtttcttttgtgcctttgttttttttttccatttctttttattctgtatagatagccaaatcaccgacaacacctatatagaaccttagagaaggataacactgaaccggtcgctgctataccaacaaagaaactacatccgaaccacccaaaaccaaactctaaccatcaagcaccgcactcaacttcatctacgcctgatggattggaaggaaaaaggtgagagaaaagaatgtaaccgctctcctccataaggcctgccaacatggctagcttgtattagataggactacaccgcaaaaggacaaacatatagagagagcgcccacaagttgtatgagagaagttttggcgcgggggaggggggctcctggacgaagtcttcagggagaaaagcagcgatgagcacaaacaccgccatccgttgtggtctcgagaaaaaccaagatgaggttttcacctggcagccccaccaaagaaagagggagacaacaccccaagagggaaatgacgcccaaagcaccgtcattgttggcccgacaaggttgagctacgtttttacacctactgcacacccctaatataatcgataaaaaaataatctacctcactttattctccgaaattttgacaaaatgactcttttagaaaacttatttgaagattgaaccgtaccaaaaaaactaattgtagaaatgagcctttgtgccaaccccgatggcgctgagctataacatctcaacgccactaatattggcgctgagattctatctgaggcggcgaagaagtgccaaattgtcgtagctcagcgccgaatttattcttctaggtttaggagtagattaatctaattcctttactgatttgattgaaaaattggtcggtcgttatcacgaaagtgcatagtttttttttatttcgtttcaaaaaaatagttatctttttattaatttgttcttgactaagggtgcgttcgttccagtgatattgggtgagaaaacacctcgttttccgcgtgcacacttcctaaactactaaacggtgcgttttttgtaaaaaattctataggaaaattactttaaaaaaatcatattaatcaatttttgtaatttaaaatagttaatactcaattaattatgcgctaatggcccacctcgttttgtgtatcttcccaatcttctcaatcccctcctcctcaaatacatcctaaatgcgtgctagcgattttcgacgccaacattaacatgcattgtttgtcgaaagttcggcttgctagttgtaacgtcccgccttcccccaggccgggtccacttacatctgatagctttcataggtcatagactgccctcacagaccaacacatgtcttttctgcacactttgtcttcactcgtgtgcacccccctggagttctttggagattggcttccggaaaagaagttgcaacttgttgatatgagtattctattaatcctattaagccctaggccgggatgttacaccctcacccccttaagagagatcgacgcccccgtcgatcaaccctaggccaggaacgtcctctcttggccacgtccatgtgtccagtgccagcgcatgtgccatgctgtgtaaccactcccggtctacaccagccatgcgcaccatgcctgcgcaactgcgacacacgcgcctgtgaaaccgcgagagtcggctctgataccattttgtaacgtcccgccttcccccaggccgggtccacttacatctgatagctttcataggtcatagactgccctcacagaccaacacatgtcttttctgcacactttgtcctcactcgtgtgcacccgggaagaatttcccggtcggtcacccatcccaaattgctccaggccaagcacgcttaaccctggagttccgtcgtggcgcctagcgggaaaattatctcttaaaaaccctaattgcgaaatttgtttctttgcttgttgtctagtgtccgtgccatctcagatctcaaatccccgatctatcgtcgagttcaatcccgaatccaaaccctttccaaatcaattcctccgtaaaagtctattttgcctctcccagggtcgatgggccgaatttctctcggcctatcttctcctctcccccggccctctcctctcccccggcgcgctcccgctctccctctctctctctctctctcgccccctcccctcccccgg

SEQ ID NO: 10193 - DNA, 9042 bp, Oryza sativa
attcctgcagcccggtctgttcttgctgctacacatcactagcaagtgtgtgcacaggtgaagtgacctggacatgatctttgtgcagttttgcatttggttaagagtgagctgtgaaacctctaatataggagtagcttgtttggttgtaatgatgaggtggtaaagtatgagatgcctagcttggattccgatttgatatattgctacaggtcaaggagtagggaggaagtgatctggattatgatattttattgttactaccacttgataatgcttgcatattgccttgtttaaaaaactgcttgcaaattgcagatagctagtcgttagttgagttttttttttaaaaggaatgaatgtttagaaacgaaggagcgtgatttcggacgtgtaatacgttgtgatagggaataaaagaatgcataaacatataaataaaaaacacatgagaagagttgacgatagaaatcagaccgttcaatagtacctgcgtgcaattaactatggaataagctgcagaccagaaaaatggatatatgacacaaggttgtttattaaacattgttaagcctagtcattggaagattatttatataactgcatgaccttgctgtaatgatcctctgattgacagagcctcatgttgagttaaaaacggctttctggatttcatttcctccaaccagtttcagtgacttgccatgtactgaatcatagtgttgaaaacctgaatagtttatccttcatttcttcaccaagaaggcaaaatatagtagagatatattagcaatgctaatgctgccgatttataccgttttgtgacaacatctgcacatgggtaacaattaacaaatcccatgtagtcaaattacttctaccccaatcgctgattttctcaatcccgataaacaaaacctatggttacacccaacaagtgtggtccaggatcatgctacatatcagagagttgactatgctgatcagtggctgttagctcaacactggatcttgcaatgttcactgaagcatgcctttcaaacaagcattaaatacaagctccatcccgttgcttcacttgataaaacagtaaagcaaagtgaaatgtattattgcctactgcctaatgacgaaaacgaagcacgtccaaacccataagagtggtcatgcattagtagtttggactaaccatctagcttgctaattggtactgtaaatcaccatctattcttagcttagctcacattataggatgactcagccctgacaccagccacgtttgctcctcctgaaagacaatcatataaatagtcgtcactagcagaatcgacaatcgagttagtttaaccaaaaaccgaacctggaaatgctcctacaaaacaatctctgcagacagaggaatcattgtttcattagtcacagtgaatgtgcgcctagctgtaccttgcaagaaaatttttaattgtcagacaaaatccatctgcatcgaaaccatttgattctgattgcttcctaatacctaccatgtatagtgtcatccgtgtctgaagagggcggctttcttgttgcaattgacatagagctctgggttacagatgtgttcgttcttttcactgatttccattatatataaaaaaaagtagaacttttcagtgaacatggagagggttgtaactttaaacttttgtctcgttgtcgccatggaatcgatcgagaccaggtcgaaggcttgatgacaacgcaaagccgcacggtttcttctcctctctcgcctgcggtctgtctgcgtcgatgggcacgggtagaagaagaccaaaggccctgttacatccttcaaaatggcaaaagttttgttattttgtagcactttttgtcattttggatctaaacactaataggaaaagttgttaatttggcatttgctagtccatagtagtaaattgtgccaaaaagtgctttgagaccactccctctctctttctctctcttactttagtgctagaatggcaaaaatttaacatgcatctaaacaccaactagtacttttacaatgccaaaacttttgtcatttgccatttgccattccaaatggatctaaggccctgtttagatccttcaaaatagcaaaagttttggaggatctaaacagggcctaaacaggcccaaaggcgagcatcgcgttttctttatcgaaagaagagaaagttagaagcaaagcatgagcagtggaaagtgacaagttagctcagacttactaatcatacggtaataagggctttaattcaatcgcacaccacagataaacaatgtggggcgggtagaaagtgaaactgccatgtctgctactgattaatagcagtaccagtcctctggtatctccagtgatttgcaatcagcgagttcgtgtcgactgatatctaaagttatttgcaatcgatcagtgggtttaagttgaactaaatcgatgcaatctacagtatttgtatgcttagacaaatttagtcgaacttttaaaactttaagtgccggttttataaaaaaatttataaaatctaacaagtctgtattactatgataatatttttcaagtcaagtctacgcatgccaattttttcaaggccgtagcttgaaaacgagttttcggaggccaacatactcactcaaaagaagtaaagaactcgctcccttgccttgaagatacaggtttaggtttcacctgatgtctagttccaaagaagacctaagcaagcaaagcaaatgatcattttccagtattcctttcaaatgataatgaccggttcaaggttgttcagcggtctgccgcaattgcatctcccatcaagcgccctagatttcattgaatccgtgactatctaatgagtactagtaatgactaatgacatacgtgtcatgatcttcccaaagagaaaatgaaaagcatttacatacagcagctgtatgaataggcccaggacgtgccaccaacgtagctttaggcccggcccaattattcggacggttctatattcggcctggtaagaagtttagagatcggcaccatcatctgcatgggaaactgtttctttctgctacgggccatggtccacaagcccaaatgtcacattcaattgcctctaactttcaccctagtggggagcccatccgccattcgcagcgtcagtgacgtcacctgccgcggccggtacgcgccgtcgacggcgagctcgagctcctggagcacgcaggcgatgatggacttcatctgtatgtacgccatctccttcccgaggcacaccctcggcccgccgtggaacgacacgtaccggaacgggctctccggccggaacgtcgccgccgccgcgtcctccagccaccgctccgcccggaactccgccgcgtccttgccccacacggactccatgcgccccatggcgtacgagttgtacgccacgaaccacccggcctccaccgccgtgccgtccggcaggacgtcgtcctcctgcgcatgcagcgagtccaccggcaccggcgggtagaggcgcatcgactccgtgattgcggcgtgcacgtactgcatctctctcagctcgtccaggtcgaagccgaccctgtcgacgtcgccgtcgccacggcgtgcgcgcaccgtggcgacttcttcgcggatgcgccgctccacgtccgggcgagaggagagaagccagaagaaccaggtgagcgccgacgacgtggtctcccgccccgcgaggaggaagctgatgacgacgtcgcggagggccacctcggtgtacgactcgtcgtggctcgccatgaaccgggacaggaggtcgtgcttctcgaggccggcgcgtatctcctcccgccgcgaccggatgatgcggtcggcgaagtcgtggacgatggcgatggactcgcgcagccgccgctcggacccaatgtggagcgccttcttcaccctccagaaccacgggacagcataccggaaccgccccgcgctgagattagcggcgtcgcggaacgcgtcggcgaacctgccgctggcagtggagccatcgtcggcctccgcgagagcgccgccgccgctggcgtcagggagctggccggggtcgtggtcgaaggcgacacggcagatgttgtcgaacgcgaagcgctcgagcgcgtcctggaggtcgatggcgcggccctccgccgcggcgcgccgcagcagcgggaggaggcgcccgtgcagctccccgtgcacgcaccgcgccacgaaggcgcggagcgaccgcgtgttgaactcgtagctcgccgccttgcgctgcgaccgccacgcctcgccgtcagcgttgaagatgccgcgcccgaggaagtcgtgcagcagcgacgcgaagcgctcgcccttggggtagttgtcgaacccggatcggaggaagcgctccacgttcgccgggttcgcggtgatcacgccccgcacgccgccggggcggcggagcacgaacgtgcgcgtcggctgccgcgacagcacctccgtcatccagtccaggatgcggtgccggttggcgaggaactgcggcaggtggccgaccagcggatacggccgcagctcggccgtcgcataccgcgccttctcatgagatctcctactagcactccatgttcgaacaaccaaggccacactcaccaagaacacgagcagcagcagcaggatggcagccatgctgatccgatttgcgaggacgacgaatttgagattaataatctgtttcatctgtacttcgagcgaattaagcaggtaggagtaccagataactggataaggaaatggcagagtgtaatgactggtgattagtgaaactgttgcggtggtgtcgccatggccactcgtgaaactcgtgatcttgttgtgttcttgtgcacgggctgctgtagtgccaacgtcaggtttgtccggtacgtagggacagacgaacagtgttgatttgttgctggttgggttcacaatttctctgaacgaaaatgccatgtagcaacacatcgatgtcgatgacgatgacattacgactactaactgcgtactctagtcctcagtgtcacgtcgttctacggtggcattccgcgtccatccaaagatttctgctcttgccatgttctcgagtcaacactagactaacccctagagattaatctttaaaatttcagtccgaattggggacttatctgaaaaattttctgaccactatgagttattaatggttttggtccaaattaatggggttttcagcgaacaaacctcaagtgagttctcctatctaggctcgagttcactagctttcgcgtaaacttgcactttatctcggtcttttagagctcgaatggagcctaggatgatgtacttgggaaccttgagctttttcaagagccaatcactagcaaaattgaactgaaggatctgtttgcaagatattcatccatcacatgcagatgcttccattcttttggtcgttaaaattcaacttctacaagttgtaaagaaaaacaaattaaactatgactagttaacgtatattcacagtcaatttttttttgcaacttgtagaagttaaatttaactttgcatgtttgtggagtgatttatcacatatcaatctatcttctgaattattttttataacaatttagatgacaaggaaacaacaagggaatgtcccctcgagagtttaaaataatttcccccttatcatgtaatgataccaccatataccatagagatagcatgcacataatatctttgtgccatcacaaagaatctctataatataactatgaaatatcatatataccttcagaatatttttgtggcatcaatcataaaatatcaatggtgaaaaaaaagttgcttctggactggcgaacaactcctgggtctctgatatccgcggtgccttcactgtcccggtcatttctcagtttcttcttatttgggatgcggtgcttcacgttcagctctcaccgggtgtcgaggattgtctcgtttggcattggacggctgaccagcgctctcagcgcgttcggtgcaccaggaattcttctatgaccagcatttctttgcctgtgccgatcttctctagcacgcaaagtgtcctgccaaatgcaggttcttcctttggttcgcatttcagtagcgctgctgaacggctgatctccttcagaagcgtggcatcgatagtcactcgacctgcctcttttgcgctaaggatcttgagacggcgaaccacatcctcctcgactgcgtgttcgctcggcaggtctggctccgggtgttgttgcctcttggctgggctgccttctctcccccctgtggcagctggttccaggactggtggccgtcctctagggcctgcttacctaagcatctccgcgagagtttcgactccctggtgctcctggtctcttggaaactgtggaaggagttgaactctagggttttcgactctgctctctcttcagtctcagtgattttggagtctatccattcggagggccatctatggtctttagctggtgtcgctacttttggtgatttgtttggagtgtagcgtggcttggtcccttcctgttgcttggagtctatttttagccgccatagtttctctaagcttcagttttttttttcatttgctttttctcccttcccctggtataagccaatctggctgattgcgttgtgtaactaaaactctttttcttctaatatattgacgtgcaatacttttgtgcgttcgtaaaaaataaaatatcaatggtacttgtatgataccaatatgaaattccaaaaatatcttcatgatactactagtactatatatagcaatggtatctttatgacacctccttggtatcatggaggtatcatgttctcttaaagtatcactatgaaatctctgcaatacaaccaagaaaaatttgtgataccgatacctccttgataccacgaagtacagggctgggcaaaattacttgaatctggaaaactaggatcaagacgaataaatttgatcatccattcagtcttagcatctaactgatcaaattttgtttggtcaattctgttaatatactcgattgaccgtttgtagcgcccgttccgtcgtggcgcctagcgggaaaatttaaactctaaaaaccataattgcgaaatctgtttctttgcttgttgtcagtctccgtgccaatccctgatctcgaatccccgatctatcgtcaaattcaaatcccgaatccaaatccttgccaaatcaaattcctccgcaaaagtctattttgcctccctcaggttcggtgggccaatttcctctcggcccatctctctctctctctatctctctctctccctcagctctcccctcgctctgcctgtgtgccgcatgtgcatgagccgacgccgagccgagctctccctctctctctcgttctcccgctctccctccctgctccatccccggcaaactccccgcgcgccgttaccttgcgtgcgcgcgcggtcgccgccgtcgtcagccgcctgctgcccgtgcctgcgccttccggccccgcgccctgccacgctgcgccgcctgcgccgcgccctgccccgcgagccagcacgcgtgccctgctgcgcctgagcccgcgcctgccgcccctgtagccgcgcccttccaaaccgcccccgccgtcatcgccgtcgtcacgacccggccccgccaccaccgcgcatacttccaagggttggaggcagagctcctcctcccactgcctcgtcgccctctccctccttccttcttttcccaaagtggcaagaggcaagtctcctttccctctttcttttcttcttccccccctctcccccccgccggcgtcatcctccctatcgccgttttggccgctagccggagaaccaactcgctggcttgaccgcccaatgtcggttcctccctcccaaaccgacaatgccgccctataaacccgagcctctccccaaaccaatcttccccgttttcgcccttgccattgccgcgccctgccctgttcgtcgtcgccgttcgtcgtcgcgcgtatcggaggagccggcacgagcgagacgcgtgacgtggactccgggcgcaccctctccttcctcttccccgcccgaggccgaagcgatcacgccccgcgccgtcggccaccgtcactgcgccccttcatcccgcacggtagtgcctcctccccgttctccctcctcgttcctcctcttccccttagctttcggtagaagctcgtatagcctccctgtagctagctggcgctgccccgaccgctgccgccgctcactatgtgccgccaccgtcgccgcccgtgctccgtagcgcccgcacgtcgccgacctctctcgtagtgtctccgtccaatccgacgctagaaccggattcccggagtcgcgtagatgctctagtcgcccgaatcgatctcccgtcgcgccgtcgccgtttcccccttccctcgccgccggttgccgccgccgcaatccgccgccgtcgagccccctccggcgaatccgagccgttggctcgtctcccctcgtcccatgcaacctcccggtgcgctcgcccttgcctgcatcgctgtagatcgccccgccgctcgccgccgccgtccgtcgtccgttccggccgacgtcgtcgtcttcctcccgccgacccgcatggcagccacgtaggcgccacgtcggcgccacctcggccaagaccgggtcaagcctaccccggtccgctgctaccctctgccccgctcgcgcgcgcggtccaccgcgagccgtgaggttgcgcgtgggcccgccgcaaccgcacccaccgcgagccgcgcgcgtgcaccgcgtcccttccccaaaccctagcgcgcgccgcgtgctccctccgcacggtgaaccgtgtcaccgacaagcgggtcccactcgggaccacacgaggtgagcccggtccaccggctccctctctcctcccctcccgcgcgtgccttgggccgtcttctcgggccggccggcccatt

SEQ ID NO: 10194 - DNA, 6680 bp, Oryza sativa
aaaaatcgatggcatattatagaacgtgacaaagtcagtggcaaattgtagacctatgacaaactcagtggcatacaatggattatctcaaaaaaatatatggaaagctacaaaacctaaacgttcatccttaaagaatcgtttggtacggaaatttacaacacggtacaaattgaagttgtagaacatgaatgcaacaagagatctttgtgtcgcttttaagagctctagttcactttgcactcctctcctgaatcctgatccaccgcaagtaatgccagacgaatggcatcgcccgcaggacttactagcaatcagcccaaaataactttaccacattaacagccgtaattccgtaattcatactgattgtttggctaaaataaggaggttgcacagatggataatatttgattgatatgcagtctcttggtacccttgggatctcgcaatgacgtcaaccacaggaagagcatatcagagatcatgtccaattgaaccaggatggctggctttctctctacttggtagagcaaatgcacaatcccatgttttacagtgccgagaatacaaattgaaatggctacttattagataataatttctcttctaactctcggaaacctcgatagtcattctttttttggttctgtggaaggttgaaccgcctcatctcagccaacctgaagttacacatacaacataaagtagaaggaaaataatcagctctaactgtaaagtggtttcatgatatacaagaaaatatgttgagatagcaatagtacaaagaagcaggagtattttctaattgcttacggggatcaggtgcttacaattttttttggcaatgtcacaactaacaaaaaaaatgccatgttaaagataaaattgaaatttcacgataatttattcaaatcttagttatcaaaataaattgtgatgattcggttcagaatttcatgatgcgtagttgctacctggctagcataccacacatcaggtagggccaatgtataaggccagtgacttctttctataaagttaagacccaaagccgaaacctcagcgttccatgtcatcactaattctcagccgttcgatcggtgaaagagatcgcatatgaaccgttggatgagaagatccctgggccttgggccttggatcaaagatgaagggagattagacccattcatccttccagttgatctgatccgaattctgaacgctccttgattcccatctctctgtccatcattgctgatatattgagcccagcccacccagtataccaagcgatccaatgtatccgatcggtttccttccaatgatgcatgcatgtcgtgtgacgtgcgtgtaaaaatctactacgcaggtttcaatcgccttcacttcaatgttgtgcccgcacatgtgcacgttctgtctcccggtccatcaattcgcttaatcacattctaccttgcctgaaaccgtcggttggtcgactgccacaagaaacagcttccaacgagattaattggcgatttgtgcttgcaatcctcccttcaagatcatcccttaattccacaattcctttcgcaaggtcatcgatcaacctcaggctgcgcagcgcaccgtgagcaggctatggaatcatcatctggcaagctttacatgatctctcctcctctccttcctctctaaattcatgtgttgcctcctgtttccagctactgatttgttttttggttcacgcatggaatttagacttgagagttgaaggtatgttgaattttttaggcttactctgcactttctatcatatctgttcgtctgtaccacttcttgattttggttcattatgtacttttgtttgctcatcaatgtgaactgatagtttctacttttctccagaatattagaaactgtctctccctctctaaacatttgcagcaaatggatataaagatggactactacgcaaaaaggaattcatatggatctcaagtaccaggtgccaatcatcgcctcacatttaagttttgttaccgcctcatgctgaaaaatatttggattggattcttcacttttacctttctgatggtacacaaatgcaaatttatataggttggtactttgttcgaaataaaggtgcaggtatgtgcttttacatctgagtttatacttgaagtctaatccattttattttgtctaatccactttattttgtcccgtattatatgtggtatttaatccatgctagattaacctcagatcatcccgtttgcatgttatgcaaattccaactcagaattacacatagctaccgcacggatatttcacattttgtttcagttttctttatataaactatatgctcaattttgaaggtgtctttttcctatcaagcatccttttagacaaatactttctgtcgcttttacaattttttctcctattcaaatcaagaataacagttgaatgcatgggaaatcttggggtggcaattaacggtgtggttatctcccgtggttcctctctaattagtggtgcaattctatgttttttttcttgatttcccttataaattaggtcaacactgtcctttctatagtaaattatattagctcggtgcttaaaaaattgcatgacatattctataagaatataaatatcctgcagcaatgcgtgaggtatctatctagtgcatatttgtacagaagtccaacaacaaaaatattgcactttgtaaaacacgctaagaatgggagaattttgagaattaaaaatgccacttagatgaagtaaacttaccagtttgccaaactaattattttatcccggatgccttgatttaaagaccatgtttgattcggtgaaaatgttccatcaagaaagaatgaagccccagcagttgtggtgcctagtttatgtgcaatgacagtcatgcccattcacgaaggattaaaaggactgatctcagaagccacaccttcaggtttagggagggcacaatagcgccatttgataacagttgatcatacacggcaagcacaggttcaggtagacctttacaggctccaagaagggctcttgcaacatcctcgtcaccaactaatccttctccgagcttaatctatcctgtagcatgatagcatagctatgtaaatgccactacaaaatgggttgctgttacttgttagtatagaaaataccatttatttatagacagaattgacagattaccagtgcagccttctcgagatgaaggcatattatatccaatggtaaacaagagccatctgcaggatcaagttttgaacctactcttctcaccacagaacatgcttctgcaacaccacctcttgtactggccaaggagcctggcccaaatttctcaaataattttactgtcagcatctccagaataatttgcaaagttaacaagaaggttcaagtcatcatgaaaaattacagtgactatctaaaacagatttaccttaccaagtgaataagtgcaagtaaagcactacatacagctgcacaagaaaaatgcagaccataatatataactttagagcagcaacttgtgagaatttactgtgatcccacacccagttatagagctatattactatatcacaaactgtaaactcagcaacatgagaaattcgaaaagagttttttgtggatgcaaattcagaggatttagatatacctatcgtaacatgtaaaaaatattgataaagtgcttgcttattttcacacaactaagtaaactcttttgagatacaatttacactgagaaagttgtattacccatttaatgtagttatgtggaaagcttccgaaaccttattggtaattctgtatatagtaaccagtcaagtatatttattaaatgtataaagacgcaatggaatgctgaggatatgctcagatcaccggttttcattgtatgatcacactaccaccgcaagtccacaacacgtcatagtctatcctactgatttgtggtatcagttcatatgactttaacagtaaaagaagtgcaatctttatgacagtttagaacttatcaagtgaatttcacagttctactaactgtcacgatccccatagatatgttggttattcctggtaaaaacaagtggatctgctgtgctgctatcaatagtaaaaaaaatgcttattgcctagtaaccctcttacaagagagaagaaagcaggatcaaggaaaaaatctccaagaaacaaagatagccatacctcccaaagattaaaaggaacagcataattgttgaaaagttgagtaatactcttgagattcagtgaaagctctttagccttgtccatgggacatctagcagtctccacatcagctagaatgttatcatgaggaaggcatcatttggtgattcagtactgcctggcagattttcaagccgtgaagccatgaactattcttacttgatttgcatttggaactgaagaactgcaagtttgccttcaagtcgatctactgcgctgctatcaatagggttcctcgaggaatctgcagtaatcccttcacttttgccctgaaccgcagcactgctcagatattgatacctggatgcaaaaaaagtaggtctcattccatatgacacatggaccttatgaaagcaaggacaaaaactgagcaaaaatcaaataagtaaacaaaaagaagttgagtcaaaattgggagacctctggtcaagagttgaagcttcttccgcactggagcactgtctttctgccaatatcaacaacattctagcagcagcaatatgctcccccttgagaacataatacctggctagcagctcaagatacttggtttgactagttgaaataggtgcatccaaatcagtcaatttagaggcttttgatgcaacaacaggaagtccttgaacctaaatgaaataaatttagaggcttttgatgcaaccacaggaagtccttgaacctaaatgaaataactggtcaggatagcataacatgcagatatccataacacagtagagacataacatgcagatatccataacacggtagagacataaactgagtttgatgtaaccacttgatgaattggaaagatatagcaaactcaaagttatctgtggattcatatagccagcatataagaaagacttgtccagatacttaatgcagagagcacattatttcgtaggatggtacacgatagtaagagatctagctggcattatttaagtcatgacgagctgcttcatgtgtatctttccaatagtttgtttgtactgaaaggatattaatcaggtaaatcatgccaaatagtttgtttgtcttgttaaagatacatcatacatgggtcagaacacatggatcctatcaggacagtaagcacatacaaggaaaggggcgaagaagggccaaaatgcaagaaagcaaaaaaaaaaaagttgagaggcgaactctaaaccctttgtcccatctgttaaaaggaaataaaagttggttcctagtttcataaaattgcattgcctacctagaatatgcccccgagatcccccaaactacactcaaactatggatgttctcccagaaagaaggaatttaagggagacaggaaaataagctcacagaatgataaatgatgctgcaaaaaagtgtcactattaacgtatatatctcccctagagttttccccagatttcaaatataactggagagttcattccataatttattatacataatccagggttagcaagatcctaaaatttaatataaaaaactaaattggcccaacattgatgatctctgtttttgtcccggcctcggcctcccgggatctcaaattatgacacggaagataaaccataattttcaaatgatacaccaccgtagctgtagaaaaattcaccccacgttctactaaactaatcatttttagaaaatgagataaacccggcctctacatccgatcggatgtacacagccaacaataaaacaagagttcttagactccaccttacaaaggttcacaaacaaacatcacgacacatcaacaccaacacaagagaacttagcctctcagtcctcacaagggtgatcttacaactttgacaaacaacacaaaacaagacaaagatacatctagacatccaaccttcgccttaaattccatccatgcttagagaagaaatccaaaattcttccttccaacaaagtgcgcccctccttgactttgtccctatcatcctccttaagtagcaaagaccattgacgtgcccaatacgtccccttgaagattacctgcacaaaggagttagttttggagccattaaagactacatcatttctacaaagccaaaccgcccaacacaaagctgcaatgccaacaaaaaattgatgtttaagcctaggttgaacaccattcagccaattaccaaaaagattagtaatgctagtaggcggatggatcccaaaggttatagacacagcattccagattaatctaaccaaatgacaatcaataaaaagatgttgtatcgtttcattagaatcacaaaagcaacacttagtgctacctttccaccttcttttttgcaagattatcttttgttagagtaacccctttttttaagtaccacaagaaaattttaatcctcaatggaattctaagccccaaa

SEQ ID NO: 10195 - DNA, 11064 bp, Oryza sativa
ttcaaaacatgccatttgcaaactctatgaatagtttcaggccaaaccgctttgatcgccacctccatttgatgacagttatctaaaaaagaagttcacaaccattcgagattaaaaacagaagacatatcattaaacacaccactgatccatccaaataaacatatacctgttaaaattgctgcaggcctattcccatgcattgcatcagtaaatgtttggaaaagccacttgaatgcttcgattgtctcctccctcaacaaagcgcaaccaaaaattgctgtttgaaaatggttatttacatcgacaaaaatcccaaatggcatgttatacctattagtctgatatgtagtatcaaaagtgattgcatccccaaaatggtcaaaacttaatctggaaagagaatgacaccaaaatatatttttaatccttgaagcaccatcaatctgtatggtgtaaaagaaattcttactgcggcattgcatttccctaaaaaaattcagtgtcttctgcacatcattgctacactcatcccttctgatggcatacgccattcttgtcacagccctccttgtaaagggggttaaggacggcccgccgtgcatacctgaaagtaatccatacatagctgtaggtgtcatcccattatctaccatttcctttatgttcctctttgtcccttcatcaatgaaattatgagaccggaagtgtttagtatgctgcaggtcccgtttcatttcatggttgtgctcactaacgaatgcagaaactctccacttttgactttcagaagaacgatttaacctgaccatagccttgcagcctatcctggtcggcggaccagtgacggaattatctctaccctgcataaattacaggaacaccttactacgtaaaacctatgaaatgatgatcctacgcatcacactatagaaccttgccaatcttacaagaatacgaaaccatggttttcaaaaaaaaaaaaagaatacactaaagatttttacctcgcgaatgcagcagaactcttgcatggacttcacgcctccatctttgtatctgttcttggatctccttataccaaaaccagtgaacctagcgtacagattgtagaacgcatagccatcagagtcctcattgaaggtctgcccaattttcggcaacagaatggctgggtcagagagtgaaataggcagcagatcactatcttcctccccctcaaccacgatcctaggatcaaaaaaatgagaattcagctaacaatgcagaaagggaaattgtacactacaatcacactgacataaaaaatacctttccaacggaactacgtccatgggttgtccactatgatcctcgccacctttctccggccagccttcttcctccatagctatcttcgcgaatattgtttctgtccagcacggattctggtagctacccctttcggcaaacagaatttgctatagggcgtcattttttccagctggttggatatatactgacaaataattccggtttattttccattagctgttcaacaacctccccgaaaatcaaggctcctacgtgcgaagcatgttattggactccggaaagtcagccactagcaacattaacgaattctgatgaaaccataccgccacaaaaatagcatctataacaaacattccgagtacgcaacgctacactcacagaaaccaattcgaaatctctgctccattcttgtacaatattctgctcgaagaacttcatcttggtgaaggattgcattcacgatgacaacagggagtttgcagtacacacaacttaaatagataaatgaaaggataacatctcaattttatttcacttcccaaacagcagaagatacagatttctaaacttagatactactcgctttttcctcatagaaaataccatacaaaactagagacagttcgtacgactaatctacgaccgtgcagaaagcaagcccttattacaattttcctgatcatcacactattgtctacatattttcattggacacatgtttgcaaccattactgttgacccgggttgtttcgttgcttctgaaattcatgtcgcaagccgcgcgaatatcacggagtgagcaccaagcgcatctcttcctaggatttctcatgggaagaggatgacatccatcgaaatgaatgacatatttctggagagagtggttcatcacttcactccgagcagcagtatccatgcaacgcacaaaaccattcctgatgaccaaataacgcaataaccagttagagccaaacaaacaaacaagagaaaaaatttcaacagaacataaactaaaactaaacttcaatgtgtacctatctgcggcaggattctgctgcttgtcaccattaattgtaatggttccatcttctgccttcgccatatgatggtgcttgctactactcaccggcgacgacacgcctacggccgccaccgacttctgctgctcgacatcaggcgccgacgagcctccgcctactcgcgccgcggaaggcgacgcaacagacctcgccgacgacattctgccctttccaccggagagtttctgctccatcaaaaacctgcagaacaaaatcttcttcctcacaaatccgaaagataattgtggtcctcattttctgtcctccatcaccgtcaacttaaatagagtatcaatacagcaacctccacactaactactctcctggtcgctcggtcgtgcatgcgtgcgggtaacaaaccatgcatgcagaacattcaaaatgactcaccatgcagaacatagcgcagtgatccgaattttcaaaaaaaaaagaatattcaagtttctgcatcactggtttaatggatcttttctcacaatccgttagtgagttgaagcccgaaaccctgatgtgagttggacaggtgtccgatggttacaataggagtagctactcctgggagtagaatataggcttcctatatatatatatatatatatatatatatatatatatatatatatagtaaatttgtttggtgctccatggtgcccgggcaccattgttgaaattgagtatatacccaattcaaatgagtatgaaactttttcaattacttaggtattaacattaactactttactaactagttcaaagcatgtttgtactgaatttgaacttgtttttgttagattttgattctaggtatatagcatccatacatataattagttaggtatgtaatcatggattgtgaaataaagttaaatttgagttgttttgttgataggtatagatatgaatcgaattattataactaggtatatactcacaatttgaaaattttgaaaaatttgagtgattttgtacattagataccatggtgccccatatgagtgtcctatatagtaaatttgtcctatatatatatatatatatatatatgtttgttttgtgttgaaaatatttctaattttttctataaacttgtttggacttaaaaaaaatattgactagaaaaaaattcaaaacaacgtaaagaaaggaagtagaatttagaagttgccctattttggccatgtttctttccataagtcttagggctaaaaattagttctagggctaaaacataagtcatctttagtcataccctgtttgtttggagggactaaaagggactaaaacctcattaaatgacctatcttttagcacttcatccaacacctacatgcttcatccattcaatagtaggtgcgctataggcctttagtctaaattagcacctcccctagagatttatggacctaggtaattttagcctcttttagtccctcctgtttagtattttaggggctaaaatagactaaagtgaagggacttatgattagcccctccaaacaaacaacccgaagggagtactgttacatagtgattgacacatgaactgttgacagatggaactgtcagtacacgttggatccatgctttagacgtctcgacaataactttggatttggatatactagggaaacaacgagggaatacaatcttcgaattctagccttcgaccaagtcacccgcgcgcatgtaccttggacgacgatgttgtccacttgccgtgcgaacgtgtggaggtaaagcgaaaaaagactaggtaaaaccatgcaagcagcacacgcgtgcttatttactgtttagttacatggacggatgcaccaaataatttcagctagacagcaatcattccacacgttctcctctcctgctccagctccccatcccagatgaggtggcaacaacactgcttaaacacgccaccatctcggccgccgtccggccggccgtcttcgcgagtgacgcagctcccatcagcagcaacgagctctgctagctttcgtctcagcgctccgtcctgcggtcttttgggtctcgaatcgcctcatgtggaccccacaatcacgttggcaaatagcagctgccctggtgctgcttctcacgttttagagcaagtttaatagtggccactgctagctccaattcatcaatagccaataaaataattgcttactatactattaatatatggtctcatctgtcatacatatattatgtcttagagtccgcgctgcagctggttacagatctatagcctgctgctcttctctctcatcttttatctcattaaaatatgtttacaggctattagcctgctattgtacctgctcttagagagagtgtgtcgtgggtgactattcagtctcccctctcatttctctgccacctcatcacttttgccatcgtggacacactatcaccaggctccagctaatttttttcaattgtacgtgctcttagtcgacgtacgtccaatttctttctccaagaaagaacgccgaacaagcgccgacgaaaaacggttcctcgttatttctctccaacgcgcgcgcacgggctatttctacccccgccgccgagtagttaggcgtccaaagtttcgggagttcatcgtgaacggtgatcgatccaaagaacaacaactcggagcaaagctagctaacgaagttagttccaaacaaagctagcttatcgcgattagctagctagaagagagttagctaggcgccatggagctaggcgtgccactgccacgacggcccgtgcccggtagctacggcgtgccgttcgtctcggcggtgcgcgaccgcctcgatttctactacttgcaggggcaggacaagtacttcgagtcgcgcgccgagaggtacggctccaccgtcgtccgcatcaacgtcccgcctggcccattcatggcgcgcgacccccgcgtggtggcgctcctcgacgccaagagcttccccgtcctcttcgacgtcgccaaggtcgagaagcgggacgtgttcaccggcacgttcatgccgtccacctccctcaccggcggctaccgcgtctgcgcctacctcgacccgtccgagcccaaccacgccaagatcaagcagctgctcctctccctcctggtctctcgcaaggacgccttcgtcccggtcttccgctccaacttcggcgcgctcctcgacaccgtcgagtcgcagctcgcgagcggcggcggcaagtccgacttcaccgccctcaacgatgccacctccttcgagttcatcggcgaggcgtacttcggcgtgcgtccctccgcgtcgagctccctcggcaccggcgggccgaccaaggccgccctgtggctcctatggcagctcgccccgctcaccacgctcggcctgcccatgatcatcgaggatccgctcctccacacgctgccgctgccacccttcctcatcagctccgactacaaggcgctgtacgcgtacttcgccgccgcggcgtcgcaggcgctcgacgccgccgagggccttggcctgtcgcgggaggaggcctgccacaacctgctgttcgcgacggtgttcaacagctacggcggcttcaagctgctgctcccgcagatcctgtcgcgcgtcgcgcaggccggcgagaagctccacgagaggctcgccgcggagatacggagcgcggtggccgacgccggcggcaacgtgacgctggccgctctggagaagatggagctgaccaggtcggtggtgtgggaggcgctgcggctggacccgccggtcaggttccagtacgggcgcgccaaggccgacctggagatcgagagccacgacgcgtcgttcgcgatcaagaagggggagatgctgttcggctaccagccgtgcgccaccagggacccgcgggtgttcggcgccacggcgagggagttcgtcggcgaccggttcgtcggcgaggaggggaggaagctgctgcaatacgtgtactggtcgaatgggcgagagacggagaaccctagcgttgacaacaagcagtgccccggcaagaacctggtggtgctcgtcggaaggctgttgctcgtcgagctcttcctccggtacgacaccttcaccgccgaggccggcaaaaaggtggtcatcaccggggtcaccaaagcttcaacctccgccgtcaatcgtactgcttaagccggccatcacttcaggcgtgggtcgtcgatcatccactcaaccagctccgtcctacgcatatgcaataagaaatactcgtacctgaattcttgcatggctaaacactactaataagtgtatgtattctgtttatttgttcgattccatatttgtaattttgttgttattgtttgctgttgaattacgattgtgtattttacagggctgacagtgtctttaaacacctctaatatgtatcggatcaatctgccctagtcatgtctaatttgtgaagatccactttctttaattattcaatcatgcatttttttttcttctttgtcgtcgtccttcccccacgtacatagcacttcatatctcttagaataaaacaagtaatctttacctgttgttccaatattattactccctctgtgtttttaaatatatgacgatgttgatttttgacagcgatgttaaatcatttgtcttaattaaaaaaatataaatacttttttattttattgtgacttattttatcatcaaaagaagctatatgtaattttaacttatgcttttacatatttatattaatttttaaataagacgaatggtaaacattataacaagtcaacggcatcataaataaaaaaacagaggtagtatattgtaagttgttttgaattttccctaactcagatttatttatgtttgtccaagtttttttaaaaataaaacaacatttttaaaacagaataaatatggtataaaaatatgatctatactgaatataacgaaactaattcgataatgctcaaaatcgaccctccccccgggcacgtgcatgccaggcccgccacatgtcgcacgccgctcccatcacttgtccccactatgcgcgccattgtaacaaatcacccgtatattaagggaattcgtttcaatttttattccaccaaaaatgtttcacctaatatgtcgacgggggatacctgtagaccggatatagagggtattgtggtccgttagtacgaggatctacgtagtacgatatcaagcaaacaaaagacaaggattatactggttcaggcctcttggtaggtaatagccctaatccagttgatatgggattatatgatggaaaccacagattacaaagggaatagcagaactcgatggtaccgacgagaccgtagtcgagttggttcaactagatctcccagcgacttggctcctgtaggctccgacttcgtagctgtgatggatgtattggcggtgagattcgatgccttatgtcctgcccagggggtcccttttataccgcgggtcagttgatctccaagtaggactcggagatatcggacccctcacgatatggtaacgacccagtctcgtccgagtaggactcctcccatatgtggattctgtttctatcacgtgatagatttccttaacgtgtacaggaactatccgtatacgcgcgggtataccatatcagtatacaacgtatatccaaggatagagggtataccttatccgtaacactgacataatgtactcacaatgtttcactatgtatagattcaatgttgcagtgaattgaaacattcttttgcaacaaaatcacccacatattatggaaaccctctattaaggaaattcgttttattttttttctaccaaaaatgtttcacctagtgtattcgtgatgtttcactatgtatggattaaatgttgcagtgaattgaaacattatttcgctatttgctgaaacattgtttttatataaggtgacacccgatcttaaacgattgaaacattttcgatctacttagtgaaaaaattccaatacacttggtacaacagcgtgcaacatttaaaaatagttcaataataagctaattttttttcatcagaatatatccatgtgtggtctaattttaacgatttaattgcaacaaatttaatggtacaatcgaatcatgatttggataaataatttaaaagaaaaaacagtttaaagtggttttgcatgcatgcatgctgacgtcagctgacgtgggcgcctgatttttttacacccggatcaggcgcccgacacctagtcccttcctatttgatatatattgtacatattactattttataaactttattcaatttaagaaatttgacttatgataaaaaccagaaatatcttattttattggaggagtactacatttgtcacgtgaaatcaaaggctctgattctttaattttatttttgttaagtagtcgtgaggcttcggtatattgggcttctgtatcttccagttgaattaattaatggttggttaattcagtactccacaaagacagcatatatagctatacgtatatagaccagctgttcttcagtcctcatctagaattttctgccatgcatatatatggaacttaatcatccgacgtgcgtgaagtcagtcatctatataataatctacagtagaaacgttgccgccgcgcgccgccgctctggcagccggcgagtacgtcaccaagtcatcatcaccaaccaccgaagcgtgacgccgcgcctgtccggcgtaagatacgtgcaggtacgccagtagtgactgatatggtttcaactttagtacaagcttagatcggtagtacgtccaggactgaacggtatctctcacctctcacccggatcggacttttcccggctgaccagtgaccagaaatgtcaactaaactaatcgcatgcagaaaaggagggttgaagtgagcagatttactacgatagcatggtaatttaattcgtactatcttctattttgtccatttcgaaacataacgtattgtatatgcaaaggcgttctaatttgaaaacattctcaccgcgtccccactaatgcaccttccatactatacatagtagctcagatgtgtgtttgaacagttcaattcaaactcatcacgcatctttgttaactggtgtcacgccccgaactagtaccgaccggaactagcccgtgacgctccaaattaacctgttgatcgataccagtcccaggaaacagtgctggtatcacagggagacagaatatcacagcaacaacggtctctttattatagagtacggatacagtcatgttgggctacggacagatcccgagctcacaactgcattacaaaagggaaacggaagcaggacttggaccaaacaacacaggcgcgacttgggaactaggccgaaaccctaaaactcatcgtagccggcttgctcctgaaagaactcctcatcagcaggatccgcttcatcttcttcagcaactgggggggatttatttatatagagcaagggtgagtacgggagtactcagcaagccaagggaaattagtgtttaatgcaggcttcaaggaaaggctgttgtttttgcaattgattttatttgaactcttttctaaaaacgactaagtgagtgcttctcaaacgacacggatgagacagtgcatctcgtccggtcggagtatgtgcaatgcatcagtctttagaattgaaacaaggttggcacccggccaacagcttttcaatggccacccgggccaacaacttttcaaacggccacctgggccaacaacttttcaaacggccacccgggcctagctgatcccatcagctacagatttttcaaacatcgaatcccttttcacaacagcaatttcacaagcagtagtcaaacaaaactacgctaggaatcacctcacatccgcccatgaccgtgggcacggctgttcgaacagtttgttaacctctgcagagggggtacactttatccacacgacattactaacccggatcaccagcccgtggggatcagccacgtcgggagacctccaagctttcgtgacaaggcatttcgaaagccgacacaggtttaccatatgccgacgacaggggtcccagaccaacaacaggttaggtcccagaccatactgtgccaggaagcccaggggtcctccccgacaccaccccggcgaatccacatgtctctcggcatcaaggctcccctgataagctagttactcagccaggagtgtcccattccacccatgtggtcgtacttgacttatgtttggatgaaattccaaggaaacggtccttaagtgcaagagcgggaaatcgtacacccggtacgttccccggtctgcggttttggaaattcatttagttcgtaagcaccgacccaggtgtcgggttttccaagtcttttgtaaaacccaagttttacccaagatgtttatcatattttaagtttgaaggcgaccgtcgatactcgcacagagtgcacggataccgaggcgcaactgggtggttacaagggaacatggtgtaacgattaacaaaggaaggatcaaatgcaacaagttaggtatgcccactaatctgcctcgcagacggggcaaacatattacgtgcaatcctatcaatgcatgatattttgcaagcaatataattaagtccaaatataggct

SEQ ID NO: 10196 - DNA, 8229 bp, Oryza sativa
atttaaaggacatgataagatggcatgacaacaaaactgaaaaggaaaaaaagaagatgagaaagatacttacgggcaagggcaaaatattttccttgtgtcctttctctacaaattctttaatacgctcagggcaatcactgaaatttgtaacgattaggcactaacaataaaacaaaaaatgtgaaaggggcataatgaaagagataccaacctgagcccatcaattggctcccatgtatcataacttggatcataccctttccaccgcacctatataaaatataattcacagggtactttttcaataatatagtaccacactagattaatacaaataaatatgaaattaaaggaatgctagttaactagtaaacattaagtctattaccttaaaccacaagccattttttcctgtgttacttggatcaccatagcatatctcaaggagctcctctacatcgaatatatcttctggaagaggctcatttacatcgtcagcatcatttaagggcatatctatactaggttctagtgtatcgtttttgtggacaacatattttctacaaagtgcatcccactgctgaataagggcaagaaaatcctcagttttctcgttccgcacctacaaagtagaggcaaaagcaaacacatgaatttgtctatgtggtggatgtgcaaggtgatactatctagtggcagtacacaagtggaaacaggaatgtactacctgcgagtatgggtgattatgtttgagacaagcacaagcatatttgtttatgtcaacagcccacctctgcacaataaagcaagtattaacattgtcaatagacaaaagagcttagtaggcagttaggagtcacaccaagtacaaaacgtacagtctctaaatttatgccagaaaatgcaaaacccaaacaaagcccagttgacatagcgccacatcctgagtaaagatcaagcagagaagctgtctctgtttgttcactatatggtgccacaatatcagccgacaattttcccttagaagaattgtcagcatcatcgcaggaaatatttgatgttgcctcactccccaatgcaccatcattatctacaagaaaatagctccctcagaagataagacaataaacattgagattgacaatattgaagcaacaagtgtatttttgcatctgtcaaatattcaaaatagtaatataatataaaatatttttctcatacagtttatcataaaaggtctcttatgtaagttaacaacaaagtgaatgatgcacatacacacctatgataattgcaatgggaaaagaatcatgtaaacaattacctgctggaagatttgcaaacgtggaatatgcaacagagtaagacatgtcatagtacaggtcacaatcagatatagcatgagctcttgcttgaggcgtcatctgaatttgtttaaatattagcaacaacaaaaaatcatctgtaacatgacaacataataagcattaaataggatatatgcctaatgaatatatcacttacatttggatcaacatgggcaatctttacttttgagactatgcactcaatcaagttgtcattcttctcctttgaaagaaaaacacgcttatggttatgtctatgatcatgcacctttaacaacttttatgacaatgacctgcaaatacatgtctcttataagtgttacatttccattaaaaagcaacaaaaaggtacttcagagttcagacataccgtatctgctgtacggaaaaaccactgacaagagaaatatgatccacggtcgactccttcaaaaaattcagtaatccgtccaatgtaattttcctcatcaggaccagcctgcaaattagttagtttggttcatatggacctagtagacaagacatatgataagcaaatagataacgcatgaataatttacaacgatacaccatagagcatatgcaagccaaacgaaatgatattcttattaatctccacagtcaaatcaagttatgtacccatttcccacacaaaattgatatgcacagaacaatgatatgagaaaatttacgtgcgtacaaaatgagtgccaacaaattaatcgaaaacttaatatctcgtggttaacaaccagtagaacaaatagtaggataataagtttaataacaattataatgaagagcaaaacaaaaatggcagaaagtaaaaggtacattaatcatcccttgttagtcagtcatataaaaatgctatcgtaaaagcaatacataaaactaggaaacaacattggttaataaagttctaagaagtgtgaacaagatattcatgactgaccttgacatagacatcatcatcaagatgatagatttcatcatccacattagcagccaggtagtgacatcgagccttcatttcttcatcttcgtcaggcctgcataaatgaaaattctgatcaccattataaaagcagcataagaagagattaagagtactttcagaacaatgttagcgtaaaaacacacatactcctgcttaagaagcgaatcagacccctgcaacaaaaacaaaagagcatgtcagttttatttttcaaaatcatctcaaaatcgaagtgataacaaactttagtattccaggagataactctagaatagagttagaggtttactagaaattcttacctttctactgtacctcacgggccatcgttgtcgcgcttcatcatccggtactggatcgcccacaaagtggtcatctgagtcctccacccttctcgcagtgcttggccgcgccaccctcttcctcgtcgcagccttctcggctgatccttctccgacacacttacccatcctctcctctgcttccagcacgtcggctgcctcctcctcctcctccatggccatctgttcggcgtccggctcatccgcgcacacgtcttcggccagcgcgccacccgcatcgttcaccttcatcttctcgggcgcctgagccgccgacttctcggtcgtctccttcgtcttctccttggccgtcttcttacgggtacgacgcttgaccttctccaccccgcgctgccgcttgccgcgtgactctgcgggcgacaacccactgtcgagctcggtcccctcgggctcctgcgccgccgccttctccacgtcctccggcttccattcggtcgctccctcatgggcactaggcttctccttcgccgtcctgcgctggcgcttgcgcaactcggggcgcggcatctcgcggtcgatctcgtcgagctcggccaccccctccgccgccgccgccttctccacgtcctccggcttccattcggtcgctcccttacgggcaccaggcttctccttcgccgtcctgcgctggcgcttgcgcgactcggcgcgcgacatctcgcggtcgatctcgtcgaggtcggccaccgcctccgcctcggcctccatcgcggcggccgtcattaggcgcctgcgcgtggagcgcctcggctccgtcgccgccgcgggagccggctccgggaccatggagccgcaccggcgcagccgcagcccgcaaccgaggccgcggagatcggagacggagacggagacgacagcgagagggggggagagagaaggattagctagggttttacggctcagcgagctctcgatcgcagagtgtggttcgccttggataggagcggaagcaggaggcgctttgatggcttgcggcgtcgcgacgggaggaggtctcgagcaggccggattcgcgggaatgcgtgacgtcgtggtctcgtgccgacgcggaagattggaatggaaatcggagagagcaggggcggtgggcggtgggcccgtgctcgccgcagctcatgcaaaagagggggtcgtggcttccgagtgggccccacttgcagtgacggacactttccttcctcaaatcctcagttctgttggtcttctttttctctccggtggggatagcctagagactagtcaatggcttgtccttcccgcgatgtcagcagcatctgtgatctctcagtgggacccacgtgtcattgggcgaagactgatcagcgccgggagggccaagagcgggacgattcaaactttgggctttgagattcgtgtagacccattgtctggcagcggcgatcgtccgatcggctggtcgtgtgggtccgccaggagcagggtgatcacctcgttttctggtcacagtttccttttgtgtgaaaaactgaaaatttccgaaactttctggttaccgtttgaattccatcgtactcgtacgattcccttggcatacgttttgtatgggaaaaaaaggaagcattttcatgcatatctctatgctcaatctgtgattgattatacttactgtttgaattttgaatcaccgtgcagaaaaaaaattttgctcggcatgaactattcatcttcgccatggatggtgattggtcatggactcgcggttcgggggctcgcggcaagagtaccaaacatagttaccgctatttcagaagcccgtaactatttcagaagcccgtaacaaacaggccgtgagatacagtacactatttcagaagcccgtaactctctaaccagcaactagctaattgggccgaattattaatggctatggtttcctggcccggcccatagttaccgctactactcactctgccgagactgcattgtctacctttccaccttcccatcctcctcccgttccggccaacaccaccctctcctcccatggcctccgcctccgcctccctctcgctggcgttctcccctctcctcctccctaccccgcgaccccgaccctactcgcgacccatcaacccggggtttcctacccccctacggctcagccttgcgtgctcgccgccctcccgtcgcgccggcccggttgccgcggtcccggacggcgtcgccgtcgcggacgtagtggagaaggactggtccttcctcgatgctgcggcggcggcggcggccgcgggcggcagcctcccccgcgcgctcgcggcgggggccctctcccccgcgtcgcgggtgctggccgtgacccccgcgccgtccttcgtggacgccctcctctcggggcacccctgcgagctcctggtggccgcgcacgagtccctgtacgtgctggcggggatcaaggaggggcacgacgaggtgaggtgcttccacttggagggaggcggaggcggcaggggaggcggagtggtggagggcgtgccggagaggttcgacgcgttcgacgccgtgttcgtctgctacttccccgggatgggtgtctcggccgccgcgctgctcaagtcgctggccaagagatgctccaaaggtgagaagctatcttatctctgttttgctctgttagcttcgcaatcatttgagggttaaaactctgcattcctcgcttaattggagggcctagttgtgggtttgtacataatcagcggaattgctgtgttcactgctcttgaggtggtttgtgatggttaagaaactaggagtacattttgttgtgacaaaatttggtttgtatgactaacagtgacttgagatatcaatgttagtactaggtaacctgttgccttgccatattcatgaaataaattggatacattagtttacaattacatgtggttttgatacagtgtcctacatggtttgaatcgttaatccttgtgtgtgctgatttagtttgcttgaaacaattttgatgcgatttatggaacagacaaacagccgtaggcatgcatatacttgttttgttctgattattttcagttcctgtggttaggctagttttaaatcctaattctacattgtagatggtgtttgtttcatggagtgcattagctcaattcaggcactacttgtatagttgtatgtgcctaaccttgccctctaaagttttaatggggtgatttgcggccttgttgctttatatatgctttatagttcatcttttgcatctgagaattgaatcaagctatcaaaatgtccttgttcttagttcaatagtattcagctgtccttttctcttatatacatttgctccactcctcagctccgacaacccagcttctcacaaagctcttagattagctatcttaacccgttgcttcttattattaacaagacatcatcaaggatcagtcatcaacctttgctacatcccctagtttagccaaatttcatgaacatcgacttgtcagggtgcttcatgtgttgaggtcattctgatatgttgtgattataccacctggatatttcttgtatgcattttgtcttgaattgaaacgctgtatgccgtttgccataggtggaagagttgtcatctttttggatcaaggacggcaaagtttggagcaacatcgcagggaacatcctgaagttgtaactgccgatttgcctaccaggccttctctagagaaggctactgccggtagcaagtttgaaatattagagtttgttgacgagcctactttgtatcttgctgttttgcagtttcaatgatgaacttgttgaaaacaacaaattatatagacagcttgccatccatgccggcgagaatcaactcggctttgtagtttgtagatatgcaagaaattattgcaaagttaatgatccttatggcagccaagttactttgtagtatccctgttgacatatgggaattaccagaagcactggcagttaagggcatttacgattagatgaagccctgcgctttactgtgggatatatggatgaatttatgttaaatgtcgtaggactaatcgatagatttgaccggtttgggttaaatattgtgaaaataatgtgagatgataatttagtatgcttctatattgaggtttagaatataatgaattgtagaagtaattgctatgcatgcatggtgagttttaggtgtttagtgagttgatgtggcatgtttgcatgttattcttttgaatatactaacaactactactatgcttacatatgttgagttttagatgtttagtgggttgtaactttataaaagatataggccttgtttagttggggaaaatttttgggttcggttgtcacatcggatatatggacacatatttgaaatattaaacgtggtctaataacaaaacaaaatacaaattccgtcaggaaaccgcgagacgaatttattaagcctaattaatctgtcattagcaaatgtttactggagcaccacattatcaaatcatggcgtaattagacttaaaattcgtctcgcaatttaatatttcatgcatgtattcaaacattcaatgtgatggatgaaaagtttttgttttggtaactaaacaaggccatagatactgtgacgtagggactagcgagtggcctctccttcacgttggaaccggaaccagggctaggtgaccgttctatttccagtgccctgcaaggcagttcgcacttcacatgaactagaactttaccgcatttctgaaatctatgcctttactaagttttcatacacacgaggaacgtacaaggaggaggctaaaataaagaagacagaggcagccaatacaaggaaaaaactcaagcatcttttatttcgttcggacaatacaaatcactcaccaagtatagtgccaaccacaacagcaacaacagtacagatctcccgcgtgtgttgcttttatctcgatataaatgaaaacatgctgccatttttcgagcaaaacagattgtattctttgacatcagtctgctccctcgagcaaggctgaacttgaacctgagccaacggcgttcttgtagctgactctccactcgtgtcatctttggatgatggtggggcagggggagctattggcaggttgaattggaacaacgagaaggatgcattcccctcaggcgagcttttgttctctcctggagcatccttcaggtccaacggcttaggctgagaaggatgcctttatagagtcgggtctccatgaggatggccaacagtttgactctgatgcaatccatttcggtaaggcggcgatgtatgcatgactctgaagcttggcgtggtcttccgaatcggctccggaggagcataactaaaagcaggagctgggaagtgatgaacattgctgtactgcactggaaaatcaggagactgctttccaggtactccaaatccaagtggattggaatagaagtggctaggctgggcatactgcatgtatccacttgctggagcagccca

SEQ ID NO: 10197 - DNA, 53801 bp, Oryza sativa
  unsure (1)..(53801): unsure at all n locations
cccctccgctccgcccgcgcgccgcgcgcgcgtgcgcgcgagagccgcgccgagtgcccctccctcgctctgcccgcgcgccgttgttcgcgcgcgcccgcgtggtcgtcgcccgcgtcgctcctgcgccgtctgcgccgcccggccccgctgccctgccgcgcctgcagccgctcggccccgcagccagcgcgcgtgcccgagccgcgtcgctcaaaccgccgcgccgcccgttgcttcccgcgcgcgcgtgccgtggtggccgaccgcctggtcgccgccgccgtcagcctctgccgcgcctgcccgcgcctgccgcccgtgtcgtcgcgccgctccaaaccgtcccgccgccatcgccgtcgtcatttcctcggccccgccactccgcgggcaagccgccaagggacggaggcagagccctcctccctatgctgcgacgcccccgctcccctcctccttttcccaaagaagcaaggggcgagccccctttctctccccctttttcctcctttttccctttcgccggcgtcacctcctggcgccgttttggccgccagccggagcgccagctcgcgccttgaccgccctaagtcggttcccaaaccgacattgccatcctttaaacccaagcctccccctttcccttcctctcccattcgcctccgcgccattgccgccgcccccgtgctctgttcgccgtcgccgttcgtcgttgcgcgtgtcggaggagccggcacgagcaaggacgcggaaggggactccgggcgcgccctctccttcctcttccccggcccgaggccggagagattactcccgcgccgtcggcctctcgtcactgcgcccgcccgcacggtagagcatctccccgttctccctcctcgctccatctcctccccttagactcgggtagtagcacaagtagcctcccgtagctagccggcgccgccctggccgttgccgtcgctcaccgtgtgctcgccgccgttgccgcccgagctcggaagcgccgctcgtcgccggcctcgctcggcatagctccgcccaatccgacgctagcaacggattcccgtagccgcgtagatgctctcgccgccgggaattggcccctcgtgacctcgtcgccgtttcccccttccctcgccgccggttgccgccgccgcaatccgccgccgacgcactccctccggcgaatccgagccgttggctcgtctccccttgtcctgtgcaaccacccggtgtgctcgctctcgcctgtatcgccgtggtttgctccgtcgctcgccgctgtcgtccgccgtccgttccggccggcgtcgtcgtctacctcccgccggcccgcgtggcagccacgtgggcccgccgcatccgcatccaccgcgaaccgtgcgcgtgcaccgcgtccctcccccaccctagcgccgcgccgcgtgctccctccgcacggtgagccgagccggtgacaagcgggtcccacccgggaccacgcgtggtgagcccggcccaccggccctctctctcctcccctcccgcgcgcgcgcttgggccgccttgggccggccggcccatttagctcggccggaccgctccgtttctctcgggccgtgccctagccgcccgaggaaaagtctatattcccttcctcttttcttttcttttcttttcttttcttttccaaaaaggattttcctttagaccaaaaatccaataatcttagaaattcaatatcttcccaaccgtaaatccgtttggctccgttcaacttccaaaattcctcgaatctcgagatctatctaatggcacgcttagaggtcattaatagggctttattcttcgccgtatattgagttgttccgtttcgcgtgtagtttcggagcccgaagacccgcagtgcgaggatttcgaggatcaagctccagatctcgagcaaggcaagccacccttgaacatcttgagcctatatttgaacttaattatattgcttgcaaaatatcatgcattgataggattgcacgtaatatgtttgccccgtctgcgaggcagattagtgggcatacctaacttgttgcatttgatccttcctttgttaatcgttacaccatgttcccttgtaaccacccagttgcgcctcggtatccgtgcactctgtgcgagtatcgacggtcgccttcaaacttaaaatatgataaacatcttgggtaaaacttgggttttacaaaagacttggaaaacccgacacctgggtcggtgcttacgaactaaatgaatttccaaaaccgcagaccggggaacgtaccgggtgtacgatttcccgctcttgcacttaaggaccgtttccttggaatttcatccgaacataagacaagtacgaccacatgggtggaatgggacacccctggctgagtaactagcttatcgggggagccatgatgctaagagacatgtggattcgccggggtggtgtcggggaggacccctgggcttcctggcacagtatggtctgggacctaatctggtgttggtctgggacccctctcgttggcatatggtgaacctgtgtcggctttcgaaatgccttgtcatgaaagccttaaggtctctagtcgtggccattctgcacggactggatgatccgggttagtaatgtcgtgtgggtaaagtgtacccccctctgcagaggttattaaaactgtttgaacagccgtgcccacggtcatgggcggatgtgaggtgattcctagcgtagttttgtttgactactgccttgtgaaatttgctgttgtggaatgggtttgatgtttgaaaaatctgcggctgatgggatcagccaggcccgggtggccgtttgaaagctgttggccgggtgccaatcttgatcaattcaaaagactgatacattgcacatactccgaccggacgagacgcactgtctcatccgtgtcgtttgagaagcactcacttagttgtttcagaaaagagttcaaataaaatcaattgcaaaaaaataacagcctttctttgaagcctgcattaaacacttattttccatggctttctgagtactcccgtactcacccttgctttatataaataattcccccccagttgctgaagaagatgaagcggatcccgctgacgagaagttcttccaggagcaagccggctacgatgagttttagggtttcggcctagttcccaagtcgcgcctgtgttgtttggtccaagtcttggcttccgcttcccttctgtaatgcagttgtgagctcgggatctgtccgcagcccaacatgactgtacctctactctataataaagagacctctgttgctgtgatattctgtcttcctgtgataccagcactgtttcctgggactggtatcgattaacaggttaatttggagcgtcacgggctagttccggtcggtactagttcggggcgtgacagccagctggggacatttcattgttttctatgagactgtctaggctcgtttttcttagatgatgaaatagggcattatggtctttgcttaaaagttacagccaattattataatctcacacttaaaataagtgaaattaaaaaaacttaaaaatgaaaccaatcaacaagaagaaacaaactaaagagtaaagattgtcaacctaagataattatacaattattgaattctgtttaaatttggattttatgaaaccaactcattgccccggatgcaacattccaatatgatttatagattgctgtgcattaggaagggtatatacagtggtgtgatttcagctggctgggaaatttggcacgcaaaaatttcaagtgacgtgaagaacataataatatcatctgttcaaacatcttgtagatagttttatagtattatctaaaatactgtaggaactgcctatataatcagttcatttcgtgttaagggtggaacccatgcacccacgtcgtgacgtcgtccatcccattttctccgtcttgccattgctagggggcaaccccatgtggttgcgaggattacattggcgggctctcttcctctctcacaccccatctatattggttgagaaagtttgtattccctctatcccaaatataacaatataaaagaggattaaacagcgtatccagattcattatatctaatcttttttactagattgctatattttaaaagagagggagtatatatctactaataaaaatgacaaaaaattgtgcatatctaacaaataccatcatactatacttgcaagagcaagttcccaacactcccctctcattttccgcgtgcatgcttttcaaactgctaaacagtgcgttttttacaaaaaaaaatttctatacaaaagttgtttaaaaaaatcatattgatccatttttaaaaaaaatagctaatacttaattaatcacgtgttaatagaccgctctgtttttcatgtatgggagatgggttcccaacacccacctccaaacacagccttagagcatctccaaattccactctccaaatacttatatatctaactctttaactgatttgggtaatcaaactaggtgttcactccaacagtctctctatttacatctccaaaataacaaagggacccacatataagcctctattaccttcttcctcttctttctcttctcccacatcgacccatccccgcgcgaggtggacggcgaacggcgacggcgacggcgacggcggcagcggcggcggcggcagctcctcgtgcgggcgaggcggaaggcgacggcagcggcggatccccgcgcgcgaggcgggaggcgatggcggcggcagctccccgcgcgcgcaaggcggacgacgacggcggtggctccttgtgcgcgcaaggcgggaggtgacggcggcggcggcggcggatccccacgcgtgagggcaatggtgttctgggcggagatgatgaagacagtggcgttgagtggcgacctcggcagcggtcgacggtggcgtcggcaacgcacgacgacaaggcagcctcggcagcagagggcaaccggcggcgggcccggcagggggcgacgacggcggagtggtggcgccggcggagctgtatctggggagtggtgaatcggagaaattgcagagagagtgtgggatgggagggggaaaaggtgtgggatccatgtttggctaggccattttggctggccaaagttggccagcgtgagaagtgctttggccagccggatggcttggctatacggttggctagtctgttagagcatgattttgatctaaaattgccaaaatttggcttagagagtggagtaaggaggctgttggagatgctcaactttcaaaaatgccggtttccattagctcatagactatatgtattgaagaaaagtacatttttttcttatatagtagtttgtgcctacggagtcatgtagatatttacattacctcatgcgttccaaattgctgatcacgtggtatattagcagtttgttagcacacgcgagctaacctcgagagacttgtcattaatcaggttcatagcttatgcctacattctaccgaccgagttaggttaggtaggtgcacgatttgtttcagtctgagatatctaatctgctcaaagtccggagccacaactgacaacaacaaaattcggcaggggcggccgcgcgcggtccttcgattttctccgtttctttccaatcctctagacttccgagtgggattggttcttcgattctccccgtttcctgcctttctctcggtctctcgcgcggggaggtcaagtccatttccgcaaattctcaaaaaaaaaaaaagtccatttccgcagcggagccatcctcgcgcgcggtcccgagaccggtaaccacaccaacttccgcaggccagtgggggcgaaagcaagatctaaccgagaaagtgagggcgaagtgaggccccgcgccgccccgcgcgataaggacaaggatttttctccgtttcgtcctgatacgatatgcgtgacgtgacggcggcagcgagcgaagggcggcaggcaggggcattcgcgaagaggggaagaactttccgacgtcacggcgcgcgcgggcaacttgcgcccaacgggaggcaaccgcatgggggacggggcgcgtgcgtccgtgcgtgactcgtcgcgctcttacgccgtggcgtggtgttccgttttgtgcttgcgcttggcttgttttgttttgttttggggtgctttgcttttgcagctgaggtgccactgcccaccacgtactactgtgcaaattggccgcaagaaagcgatgcttggataggtacttgctccgttgctcgtcgtgtggcctggatcagtggatctcggaggggataagcatgcatgtaccgtgcgtgcacctatagaagtgtaagtagcgagaggtgaactattgggcgaggcaactcgaaaacttgataggtggcacggcagcgaacacaagtacacaacatgtagtagtagatctttattttttcaccagtggtatggctaggaacgatcgtggaagcgtgagtgaatacggtgaattttttgcggtgatgtacaacgggccaaccttttgattttattttttatttttctgtgcgtggggccaggttagtgtcaatttcagcgtcgttttccaatggcataaacaatgctaaatgacgcacgcattgttcgtgataggatatccatcccgtctctctctctctctctctctctctctctctctctctctctctggccccggctatcctctccctttcttcttttttaggcgcaacttgtcagttgaacccatctcgctcggtattagctttgcgttcggttctcgtaaagacggaataaaaaaaccgtaatacctttgtgaagtaaaagtaaccaacccccatcattcaatccaatccaacctgaggtacacgtgatcgaatacgaagcgcgcacgatggcacgagaggcgcggcttcttccgcctcgcgcgattcgcaaccgtccgttcctgcctccttccatttaactgtggatccattcctgcctcacccctgcaaatctctgtgcgccttgcaggttggaagaaaaagacaagagatacgaagtggtctcgtttcatctcgtgcgctagaaatgctgagatgatgcccagtttttttaagaaagtttctcgtggaattatggtggtttgagctcacatcagccgcccctgttggaggaaatctaacgtccgaaccatatattacgaagtggatggattaggtgtgccatgtttagtttttcagataatgatgcgatgattagctagcagaattccagcaactaaacatcgtactacgtagaaattagtaattggcatacgcgcgcatttgtctcattgtggaggagtgagtgcttgaagaatctcacctgctggccgtatttggtacgaagccgctaagccatcgaaataaatcagtggaaaacgaaaaactcattgctagtcatccaagaagatggatcaaccaactatgcttaaacgtgcagacgattgttggaaagattcttcacccccacttactagtgttctgttttgtccgatcctgtgtatagaataaatgccaactattcttactcgtagctaaaaaacagagtacagtggttcaatgtgaagaaccgttcctggagtatatcccatttcgttttctcaccgcaccaaaaaccaagcaaagatttaggcatgtattgcttgccatcgcacgatacctgatagttgatcaatggattcactgttatctaaccatcatgaataagacctaagcagcgacttgatgtacgagtagttatcggagttcctctcgctggcattgaaagaaattgagacaggacgctggcagagagcgattggatcactgaaacctttttggatcagctgaatttcaatttgcaagagatagtaacatcgatacattaacaagttgctccataattcttaagaggttataccacttgaaacataacatatcttatgtttccatatttaggataaatgccatgtaagacacatgcatggctttcgatcacctggtgagttgcttgtgatattaataagtcctaaaagagacaacttccattctcaactcgcaagtaatctacattaccatgttacttggaggtgatctataatattaatagggtagaatggttggatatatattagagcactgagtctacctgtatataaatttataattgcttccaaatgacttataatcttgcccacagttattatgtaagaaattcagctactctctccgtcccaaaatataacaacttctagcattaaaaatttatcccaaaatgtaacagcttatccaccaatattctcttcacaaccaatcacaatccttcaccattcaatttcttcacttacctccacgtctcaaccaatcacaatattctcctattttattatatctactttcttaatagctatatcaaattataaaacttctaatattctgggacggaggcagtagcaaattcggtaaagtcatcatagttcacaaatattataaagattatgagcattttcaaaactcgcctatagctctgtactgttctattatattattgcatataaggtgaaaagttcacaaatttttcaacactcgcctatagctcttagactgtcatattgaacgggatagcaaactttggaccaactcactttgcatttgcctccatgcatctcctcattgccaacccataggaagcgcacctcttgttgccttgtcaatatcttgaatggattgttttggcggcttcaacactgtgaggacgtatgttgggatggcacttaggactgagttcaccataatctagcgtccccctgcatataagaacgatggattccatctcaagagacaacccttaatcttgtgttggacaagctgcagatgtatactttgtgcaaatggccaagggtgagccgtagtccaacaagttggtgggaaggtagccctcaccatagaggagttgcacaaaacgtcatcgagatcaatttcctgacatcgtatgggtgccaacaggccctttccgagattgacatgcaactctgttgcctcgcggaagtccctaagaatgccaataagattttcatagctccacttcattccttgctggagtgaggaaaacagccgcatcacccacatataagattttcggatttaaatgccaaagttgtagtatagtactaatataattatatttataggtagataaaaaaatatcggtattaaaaacaaagaaaacgactaaaagtaaatttacaggagacatggatccacactttgagagagtgggaaggggcaaataagcatttaccatttttcgatgtggcgttaaataatttgtcacttatatgtttatgatttgtaggtttatgtggtaaaatattacatctaaaagtgacaaataattaaatatctctgtcgatgaatggagtaaccacttcaggttcagtagttcagtgccgggactggttgatcgccacctgctcttcacttcagcagcagctgaaagttgttggcacaccacattacccgtcgccggctcgccgctaacgtgccgaccctattcactctagaaccccaaaaggcagacggctcaacgagagcgcgggcgcaagtggggctgaaaggggggtgtacgcgaacgccctcccttctttctgcagacgcccccaacattcggggcacatgcatgaacaacactctgattaggatggctcaacaaatgccacgcacttcatcatagagaaaagaagccacgccctccccacctcgttttcctcatttttatggcgtgcaggaactctcgcgatccgagtttttaaagtggccgaggcatcgggcgcagccggggtccccactaggccactcgagcagcggcacgaagatgaccgcttcgtccacttcaggtagcccacctggatgcagacccttcctgttgcatcctggagatagattggaatagagaagtctagagaataaaactagagattagtagtagatgttttgatgacatgtacctgagcaaacgaggtggtactctggatcttcagctaactgaacatctgtttgcagatccagaagaagatgatactactagtagcattttattcatcccagaatctgaaacctgagcatcagagtatctgagtatgcgtctttcagggtcacagaatcgaacctcgtgcagtgcaataccacccggagaacaaatttcattctggcaccagttgcaatttgtaaacaggatgtttgattagaacaacaaagtctcaacctttggttgcccttaacacaacgaaggctgattttaagacagcttacaacaggaggttagtcgtagtcactgaagccggcagtagtagcaaaatttcgtggttgcgatgctccctataagtctggtgccatcacaaccacgtttagccggcttctttgccctcttttctaccctgctgtcaaactaatgctatgcacgaagaattagctacagtgcacgtgtactatatacacctcctcctaagcgactctgtacgtactacactgtgtttctgggaatgggcagaagattgggtcggcatatcacctgggtttgttcaaatcaggaagcataattggtcaaccattcgagactctgcataaaaggattactgcacgttatatgccatggcacgctaaagatccgggtaatagtcaaattgctgcaaactgtgtacaacacttttcaccagaatcataatttgaggagaaaacaaaccattaggcattcaggcagatcatcattcttcgttctcatgtgagtctgcatttatgtgaagagcaagtggttagacatttgtattctttgcaaggatcagtatgttgtgaattggaataagcatgtgaagacctaggtgattcatggcatttgtcatctggctacgagataaaatgaaagcagcaacatacaaaactgagcaaaagttcagaatctttttccttaaggaagttctgaacgaatagcagactgcagatataagagaaatagcatagccagtgatggaagattaaagtatttacctccataaccaaatggcatgatgactcattgtttgtggcaaggcaagcaagggctaccactgcggctgccacagtggagggccagaaggagagatgtttgtggtccagaagtgagagcaaggccaagtacttcgccaggtcctcgactctgtcatctgcattcgcagccttcagatagaacctgcaaagttgaaccaaacaattgtaagtttcttattcattctgtccagctgacacagaaaatgaagcaaacacacaggcatagtaccagaggaaatgatgggttgttgtgacaaagcactggaagtcaaggacctcctgaaccagccactccatggcgacgacctcacttcggctgtaagtattgatccctactttgaaagctttttgaaggatgctgaaagagatcgtattattaggttcctgtagagtgttctaaagaaaaggtctatattgcacattgcccttgacagaaactaggcgcttgaaacaaatgcgcatccagaggcaaactcataagttcaaaagtgatacttcgtgcaaagtagacaggcaaagaagaatagttcctgggttcacttcacatgcttctgtgcagtaataagtggcacataaaacattcatttactagcaagttctcagggatacaaataaggtctactttcaaaaatgttgaagattcatatgagtttagtctttaaaacttaagggaaaacacagagaatatctcgcccaccagagcgctgatgtaatagctttattgtaacatcaaaaacagagaaataaaactatatcaaggagatctatgcaagtgataatttctcaaaatcgcatctctcccaataattgatagcttagttctttttttcttaaaaaacaatagctcaaggatgccaactggcgcggtaaattattttgagagatgcttgatcatagtcaacacaatcaagaaacttctggtgtgtttggttctcagccaatcaaaaccataccaatattttggtctgcctaaaattttgttagctttctttttgtcaccaaattttggcaacaccaatatttttccttggtagcaaactaaatactaaactaatcaatcttgccaaaaagtttgtcaacaaaccaaacaagtcctttgccaagattttggagtggctaaatcttgccattgccaaaaaattggtatggcccacaatggcttagaaccaaacaagcccttcatttctaaaatacccatcgtgtgaaacctttttgtagaacaatggtccaatggtctgagttctcacatgcagtgctcagtattgaaagtgataaatagctactagatgagatatgagttaccatcggatgttcctgttgttattaagttatttatagaacataattaaactcataaactcatgctaatgtctgttagaattaagttcaactttcagaaaaatcaaactatcaaagaatactaaggaatttgcagcattgcaattgagcactatcccatttaataatacatgctatattcaaatgagacgaactatttaggtgagtaccagacaagcagacaccaacaacttgcagaagtattcatactgaaactggtcatttaagggagccattaccaattatagggttgattctcttcaatgcgggttgccaaggtggtgcaggcgattcccagcaactgcaggttcctagagccctttacatatccacgtgtcaagaagcggtccatcagccctatccccatgaacacggtctctggctgcagcttcatcgcttgtgaatgctagcgatgcatagagaacaagtcattctttgcaagttatgtatgaactctatgtaagaacaaacatattctccacaaatgacagtacattattttcagaaaaatcaaattacaagtataaatgatcatatcacttaagtacttatcgctgagttgcccaaaaaaacttcaaacaaaaaacacacagcgatttcattttcaaaggctacctgaagtttcaatgcaaatataaactgatggaactagagttagaaaagattaaattcagatgatggtggatacacaaaaaaagggaatacactggcaatatgtttttctaacacttattgcatatataggtttagaagtaaaaagtgatgcagacatttctggaggccatatgccaatgcccaatgccatgggatttcagatggcaaatgactacagagcaactttcaggtgcgaaaataaacacctagaaaaatcctatgtatctcttttcttttcatacaagcatgccattacatccaaaaaaaatatgcaagcatgccaaaataagcacctagaaaatctttatcactgctctatagaacttgaatgcgatgacataaaagttaatgactagagttacattgaaatcactaggattaccaccacactgctggcagactaacacggggaatgctgcaaaatgtacaggcagctaactgtgtgataaacgaatcagcaaatgcaatgcgtatattggtatcagatagcttcccctacacaaaatatgcaagatcacaaccggatctgctacctcagcactcccacccagcacagcatttacactgcagagtagcatgttagtgcaaaatgcaagcaactactgttcttgcagaacacatcagtcagacagataagctgatagaatctagatcagtacagcactccgaaagtatacatgtgcattatcagcacaatacccgtgcaacaaacatctgcagctaccacacaacaaattgcgctcgagctagatgaattattggaccaaggcaaagtcatggtcgcagcatacgtgtacaatgcagagcatactgacctccatgatccagttcaccatgacaacgcgctgctccacgacggcgcggccgtagctgccgagcatggaggagtacacctcaatgtagtcgcgggctaccacccctcgccgctcgcgccgccggaaccgctcgtagctcacctcattgtccaagtcctcaaatctcttcccctgatacaataattcccatctgattacatcaaatgtcgcactgattcgggagagagcagccaaactccaacaaatttgagagaagctgtgtggaacctgcttacctctcccgcttgtagagcgacatccgtggcggtgggcgttttgggatgcgtgaaggggacgaactgctccgccaaggcgaggaacagggagaaggtgggggagggcacggcgttgtcgtcgtcggacgacgaggacgactcatgaagggggctaaacgagcaatcggtgcagatgcagggaccactgcgcacctcctcctcctcctcctcctcctcggtctccgacagcgtgaggtcctcgcgggctgaggagtaggcggtcgtctcggcgtcgttggcgagctgctcggggcaggcgaggtaggactcgaggacggaggcgaggcacgacgactcggagacctcgacctcggcggcgcgcggcctcgcgccaccgatgatctcggagcactcggaggcggcgggctgctcctcgtccacatcctggtaccgaggccgcttctccgggcgctgagctgcggcgagggaggtggggcaggtggtggaggtggcggagatgacctcgctgtggaagcaggaggaggccgaggtggacgactccgcgggtcgcttggctgccgccgccgccgccgccgcgatctgatcagggagcagaggaggagccgccgccgccgcgcctcgccgccggcggaagggatgggagcgcggcctcgtcggcaccgatgcaagcatggtaggaggcattggcgtgcggcgctgtgtgctttgtgtgtgaattgtgaatttgtgatgctacgggcctacggctatgttcgtttggcttgctagttatatagccgtgacttgaggcgtggagaggaagggggagaggagtgttcagcaaccttcggctgttcgccgcatcgcctgatcggtgaagtgttttttgaacttccaaaaatcctcaagccacgactgtgctgcgacgatgcacatgcgccgctcgcgctccattggatggcctgtgtactccagtccgtgtagattcgccggcgtatccctgtgggtcccagatgcatctggtgcacgagcgatccgccggaataacggccttgcctcccgtgtcccagcctcccaggcaaatcgaggcgtttgcttccagtggggaatgtcgggctggggccagcgcatatgcgggattggcggacggcggccaggttgtcaaaatgctatcctgaccctgattaattccttacccgaacaatctcgatcgaacgatccggttaacccagttgggatcggggaagaattacccaatcccaaccaggttgtctccaattgggtcactgcatactcggatcactacgtttttaaggaagtacagttgaagctcgattgtttgaatctgctggtattccggtggtatttcaagttacacatagctcctttgatttgtaggaaaaatgaaggaattttggaggatttcaatcctatgaaaaaaaaatcctatgaaggcatttgaaacaaaggattgaatcttatccaatcctttaaaattcctatggaatggataatcctatgcacattttggaggaaagttagcaataggtctatcctcttggaacatttcctctgagtctatctctctcatctgattcctgtgtttttcctgtgatccaatcaaatggccattcctgtgttttgcaatcctctattttacaattgtattcctgtcagaatcctgtgtttttcctattcctctgttttttcattcctacgattcaaagggcccttgaaacggcttggataaggtttggagcaaatagctcggtaaagaggaaatgaaagaaaaggaaagtgtatgcatgtagatgggaccctgatggactgattgatagtctgatacacacttctgaagaccgtcatttgccgcagacttcagaaacgtctcctctgaatctgaattctgaacagagtaccgaaaaccttggttcccttgtgcatcaccctggggaaacacaagagttcccgtaaaacaacattcactactaaagtcagtgaactaaaacacttgcatcaaaggatgcaagttggaacattctagctgtaaatcggtaacctgatcttgattagagttggccgctatacaacggaggtcgaagaactactacaagttacagtgtcagcatatgtgttctttaaaaatgtaaaacatttgattgatcaccacttaaacaaacatatctgtttgggagcatactaatgaggaacctgagaattccatcgcaatcatagttcacatgtcctgaagcatcccttggactggaggatctgaacagagttcagaaaaactacaggaaatgggcaagtaaatgaagtaactcatccacattttgctcacacaaatcactctgtgctgcaccctatccccaccaatctatttcagcgtaacaaaccctcaaagccttttcttgctgtaatcatgcagcacggaagcatttttcttgatttgaaatcaaccaagcatgatacttgtaggagggttcggatcacacattggttaatgtgacagcacttcagagcacctcctcagttctgatatttttggtgctagctcctcatcaccatattgctttagcaaatccatcaaacgatcagcacaagaagcctctatgagaatccccctctcagcaaccttcttagccaacgccaaggcctcaccaacatgcccttccacacacagcctaagcaacaaaccattgtagacatcagtgtcacagagcaccccgttctcttccatgactcctatccagtagcaagcatccaatagcctattcctattgcaaagctctctgaccataacactggccgcaagagggctcagccgcacccctttcttcatcatcctctgcacaagcccttcagcttcaccatccatcccaaccctccacaggcaaataagcagcacattgtagcattggtcgctcgacacactcccatcgctgaccacacgctccactacagcataagcgtctgcgaccatctcctctgaacagaatccgccgacgagcgttcgcacgaacacccggttgggcatcacccctcttcctgtcatcctatccagcaagctcagcgcctcccccatcctctttttcccacacaggcatttcaccaaacacgtatacgacaccacgttgggcacgcaccctgcacccaagctccaaccctccatctcttccaccagcctcagcgctgcatccacctccccgaaactgcacatcccgtcgagcaacgcggtgtacacggccacattggtcacgcacccaaactccggcattttctcgatcagctggcgggcaccgacgaagtcccccgcggttgccagcttatgcaccgaggtcacaaccagtgggacgctcggcgagacaccgcacgccgacatgataccgagaacggcacagacatcgccgggagagccggccgagcggagggcggagcggaagcaagcagcatcgggggcgaggccgaaggagcgcatgtgccgcaggagagcgagggaggcggggaatagtccagcgtgtgcggagatgcccaggaggagggcgtagtgcctgagcgggagaggttgcggcgacgaggagaggaggaggggcacggcggacgggagatcggggagcgaggcggcgagcgaggagagggcgtacaaggacgggagcggcgagaaggggggaaggcgccacaggaggaaccggagggagaggagtggggaggggaggagcgggaggagggaggggagcttgccgagggggaaggagtcggatggggacgggaaggcactggagagtgcgcgcgggagcgacgtggaggatgctggcggcgagcggaggaccgagaggagggcggcgaggtcgccgtcccggcaggtggagaggcggcgggtgaggggcgccaggcgcggccgccgctgaggcatcccgtgccggtttggggtgggggatcgcgctcctctgcggaaaggcaaaggcacacggtcacggacgacgggactagtcgacgaggtggatgggtgaatccagtactccagggagaatttactttcgagttgtttttttgaaactcaaaattgattcacctttcttaaaagttaaaatcaatttcagaaatgaactgataaggctgggaagaatttgagcgagatcaaaggcggacaatagttgaaataaaaaaaacaagaaagcttcagaacacaatattcattggaattttggaacaagaaactcacccataaatattgtgttttctattggtttacttttgtgtcggtataattcgtaggaacaatggtttaagtttttaaactgatttttttttacagtttagtttataagtcggtggttttttatgcctcaagtttaatggtgggtcctattaaaagtctcttcttattcatagctccacaatttttcttttccgcgaacgcctagctccacaattttcatggttcatgtattaattctctttatttaagccactctttgcatgcataatgtcacttctctgttagtagaaaaggagaacgaacatgagtgaaccagtttttgataatctttgatcatttcatgggaagtgaaaaaactacatttctattgtaaagccaccatattgcaaggctaattcgcaaacatttgcatggctaactcacgtgagcacccacgctttaatatttctacaaccatatatttccttttttttaaagtctatacaccgagaatttatatataaaaataagtatgttctattcggaatcgaacatttatacaccgaaaaattatatgtccgattccgattcggaatcaaagtttcttatataccgtatgctggagagattctcggttggtgtgtccattgttccagtgaaaaaaatggaaacgtgaatatatatatcgcgatgctctcaaaaatgcatatgaaatggttttcctttttagaatgggtatgaaacggcatctttagaacgtgtatgcatttaccccttgacatatagttggatagatttaatgcgaacgttaaaactctgtgggatccagttgtcatacagagggcaaatgtagagtgaaaaatgtccgctgtttagtttaacgtgttgcgtttctttccttctacagccaagtgccacctttgcctctagcttcataaaaacccagtcctctttggcacagtactatttgctcatgttcgtgaaaatcattgagctctgcaaggtgcaagctttctgctctcagccatcatgtttccctttggctccaaacccatcccgtcaagcaacaaggtaaggaaagagctaggatacgataaattcaatggagtacctccatttctttttgtttgacgttggttagttctttgactaatcaaggctgtaaaaaaaatagagggatcatatgctattttgtttcatagcacctttcttcaaaaaagatttcgtagtatatttgaaaacataatttcttcgtttttgcatatatcaatcttttgggattcttgtaatgttgtaaagcctggttttgaagaccatgaactcaactatagtgttttcagtcgttttttttaatttttgtagaaacggtatgcttaatttctaatatatgaacatgttgtttgaatgattggagattatgttcaatccgtttggattggcacgagaattacagatctctggatatccaagaaaattggatctactgtctttttatttagtcaagccctgaatggatggcaaataaattataaaggggtaatggagggcaaaagccagctgttcacaggaaaccaaaaccgtttgaatttttggcagttctcaaaccttgtctgtcatatatttcttcttttagttccacatatatatcttaggtttaatgataatagcaataacaagatgaaattgcttgcgaagttaagaaaaaataacacttgtttgtgtacttgccggtcgatctgagtgtcttatgtaatttttcagttttctttgtgggggtatggcttgcctattttcctgtcaatgtttaacttttaaaactatccttccaatcttaatgaattttggttagtctaatcctttggctgatccggccaaaataaaaagtatagcctaagctcaattgcctatttattttggtgccaaggaccccatcatttcgcttattgacggaataagcgagaaatgacatatttgtaaacagaaaataatttataaataaaacttttatgtatgtgttcttagtgatctaaaagcaaatactgaaaaataaactacgatgataaaaccccaaaattaacttaaaattttaggttgaaaattcaattttttacctataagcataagcataagccaaaagatattttttatgaaatcaaactatctggcactggcatacctgtcagtgtttcatgtcgagaaaataaaaatgacaacatagttgcagcagagttcatgatcctattatttgacactctatattctacttagtgttaacaaactatttgccgttatcttccccaaaggggggaaaaatccaatctatccaaatacaaactgactaatcaatcagcccatcagtttgtggtgcagcttaagggtaaggagaccagggcggagccggaggtttccagcgtcagcaaggcctcggggggcagcagcgagcacatcaacaagctgccaccgccggtgccggtgcaggaggaggaggaggcgccggaatggctggacgtgctgctgcggacgaaattctgggggcagtgcaagcagcactgggacgcgagccgcgcggaggtttgcatcttctgcctccgctgccgccaggtgctctgcccgcgctgcagccatgacgagcccggccaccggctgctcaaggtccgccgctacatgtaccgctccgtcgttctcgccagggacttgcagggcctcaacgttgacgtgtccagggtacaggtaagtaattaagcgcgtgttggccgtgttttcttcctgtctagtcttcatcaagccaaactccattttaaaacatgtaacattgaaagtactcctaaacatcttatatttaaaaggaaaaaaaaagtacaaattaccccacaaacccgaaatccatatatttttcactctcaactttcgttaccatatgaccccccagcagctttgcaaagcggttttggtctacgtggcagtccaatcagcaaattttttattaaaaaacgatggggcccacctgtcagatctttccagtctatctctttccctctcacacacctctctctctcaaatgtcggcggctgcgacttaagcactgacggcagcggacgacccctccgtcgcctcgacgagctgcgtggcggtggctgcaggcgcttcctccgccgtccgagctccgcccgccgccatcctcggctcgcttccgccgccccctcctcctgccgccccgagctccgtcgccctttcctcccgccaccccttcggccccgagcttcgcccgccatcatcccgagtgcccccttcgccactcctcctcacgccgccatcccgagctccgcccgccgccgtccccttttccgcccactccacccgtcgtcgttccgacctcttcccatcgccgtcccaagcttcgtggccccttcgtcgccccgagctccgcctgccgtcctcgaggtgagggagggagaagagagtggattttggagagagatagagaggtaagggaaaaagagagggtgggagactgacaggaggggcccgctaatttttaaaaaaatgaattcatgtctggactttcacgtagaccaaaaccgtttgcaaagctgctcgggggttttttcatccggtattgatagttgagggttagttgagggtgaaaaacatccttgtttcgtgtttagggggtaattcatactcacccaatattttagggggtaatttgtactttttcatatttaaaacgacgtgactaaacaacgtatagtcgctgtattgtctaaacgcagcccactttttttcctaaatccgtacatatacggatgtgcgtctctttccgaaaacggcactctgctcctttttatgctgggctatctcacaactcaaacgacagatagtcattaccatgtctccaacaattaatgcttaaatatacggctaattcttttagtggtagatgatataccgtcgacagcgaaacgtctatgttacttgataaatcttaagatatattagcctgatctttgaaggtattcataggggatggcatgtatgtattcatggggataaatatgcatcaagttttgaaaaaaaaaaaaaagctcccgtgattgttgaaagcctgaagtactgaaactcaatatgctcacaaattttactcgtgattgcagacatacattgtcaatggccaaaagggcgtgcacctgaggcccatgaggaggtccccgcaattcaagcctcacgtagagacacctcgctgcttatcttgcttctgctggctccgcagtgctcccaacatattttgttctctcagctgcaaggttacattctcttaactattgttctcaattacccccctttctaattgtttgcaaattaaaagcatcgaaattaaaagggtttaaaatctgatttttttttctctttcttaattaccaggttggtgtagatatatctcaggatgatttctcaggacctgaagctgagcgtaggcataagcagactctgggaattgtggtggagtcatctcctcaacagagcatcccacaaccatttgatgcctcacctgtgagaaatgaagatgccaccatggttgaagctgagtgtggtcaagttcagacgaatgcgacggagtcggagtcgtcagcggtaggagatgcagatgaggttatacctaaagttactaagttcaatgttgatatccactctttgaggaggcgagttcgcaagcaggcggcaccacagagggcccccttcttctgaatttttgatatctcgaggaaggttgtgccatggttaagttcgaaagtagtaataaaatctactagctatgacagctaggtgagacatttctgctgcgacatgtttttttcagggtgaacctgctttgctgcacgctgtgatttttttttcattagctactggtttgaatgatgtttttgtagtacccatttggaggtgctaagctctgtaataatactgtaggatcgaatcacaagaactaagccaaccagagaagggtgaatggttggtatacccaaaaaccaaaaacttttagcggaaataaaagttaccctcgaaatcgacggagattggtctgaccgaagttgccttgccggtctgaccgctcagatgccgtcggtctgaccggtatagattaaccggtctgaccgccgaagctgctcgccgcgcctgttgccgccaccggtctgaccaccgtgctcccgccggtctgactgccgtagtgccgccggtctgaccgccggtgagttgccggttagaccgccaaaacccggtgaaacacaaatcgaagaactcttaaagtagatgacgtctttattacttctctctgtgtttacaaagtgcaccaacagcactccttacaaaaatttcgattaaactcgaaaccctaactcaaaactcaactcaattgctctctaaagcgataccgggaagcctcacgctccccctctatttatacatgaggtaggcagcctaaagccacgaaccaaactcatacgaggagtcctaaacaccttaggaaaccctctagtacaagaaagaaactttacataaccaatcgtaccaaatttggactccttccaaatttgactccacatcccatacgcacacaatacctccatcgtatgccatatggaatctccatcaaccacgtgcatcaattctagcctaagtatcccgcatgatctctgaccaccacggacgtcgtcttatccccaagtcgactcccggtccatcaccgcaaatactctcccgaaacatcgagtcacctacacatggaacaaacaaagaaaccatattccgagaccaagctatctccaacttgactcattagcagcaaacaatagtattacatacgtatatagtatccatctggaagttataatcatgaaataaactcggatatccaaataaacaacccgaaaccgaaaccgacacagtgtcggccggtcagaccgcgggctggccggtccgaccgctcgatcaccgccggtctgaccggcaacacctgcccagtctgaccggtccacataaaatgataacctgtagattcacctgtgaaatccaatcatctccaaaaccacttcatgaataaattccaaataacaaaaccaatcatctccgatgcataattgttcatcacagaataataataaaaacacttttgattttacaaatactagcatctcagcgatacctgggactgctttaatttgcactctgctgtagacgtttcttatttctcggtattttctaaaagtttcctatttatcattcttccatttcactaaaatatgaaaattcttctttgtttatcactcctcgtgccactgggatgtgggtctcaataccacgtgtcaatgaggcaatgagcataaaccaggaactggaaacttttacagtgccgaacaaggaaatgctattgctagagtgagatgtgttttgcttttgctaagcgagaggttaggagtcatttttggagctactaactgctacagcttataaaaaaattattttagttacagctgttagaaactctcaaacaatatatatttactctttcatgggtagaatgtactggcggttcttaaacttgtacaggtgtgtcatttaggtccataaactctcaaaatgcatattcaagtctaagaactcatcatagtgtgttatctaggtctcaaatcgccacaaccccttcaggatcctacgtggcgttgatgtaatatgccatacatacatgacgtggcattattttaactgacaaataggacacatttaaatttttttcctttttttcttctcttttttcccctttcttctcctttctctcacccgtgcagaagaaaggaaacaaaagaagaatgagaagaaaacgaaaaagaaaaagaaaagaagaaaaaaaaagaaaatgacatgtcacgtccatatggcattgccacatcagcgccacataggatcgcagaggggatgtgtcaatttgggacctaaatgatacactttgacaagttctgggacctgaatatgtattttgagagtttaggggcttatatgacacaattctataagtttaaggaccgccaatgcactttactctattttgatttagattatgacaatatgtagttgtagcatcgaaaaatgaagtaagttagaagctggaaaatttaatattttcatattagttttatatgaaaactttcgcctgagttagttcaaagtaaaactttgaaaaaaaagcttagcccaaagtatacattactctttgattaatcatacaattcgttgcgttttctgcgccggaatacaacaccttcgaactaagtactaaggccctatttagttccagaggtaaaaagttttgacgtgtcacatcggatataaggacacacatttaaagtattaaatatagactaataacaaaacaaattatagattgcgcctgtaactgcgagacgaacttattaagcctaattattccgtcattagcaaatgtttattgtagcacattatcaaatcatagagcaattaggcttaaaagattcgtctcgcaatatgtgtaattagtactccatacatgtgtccaaacattcgatattacagagccaaaagtttttacgtgggatctaaacatggcctagtacttggaaatgaacatttcaaaacgggaagtcgctccaaatgatattcccgtaatattaaccgccaggaggggccaaagcgcaaaaactgagaactggggagctcaaaacactcctaaaaccctagcctaccggagcgagcgccgacgccgagacgccgagagcccaaggccggctagtcggagagtgcggccgcgtgcgggtggctgctgcgctgcgcgaactcccccgccgccaaagatgttctccccggcgatcaagaagccccacctgctccaccgcagggacaaggaggaggcgtccccctcaccccctcccgctcccgcgcacacgcccgcgcctcgtggatttgccgtccacgaccgccccgccaccggcaccccggcgccgtggacctcctcctccctgctcgccaggttccgtttattccccatttttctttgattttatcagaatcaccgcatttcatcgtattttcgtccccagttgaggcgccggaagcgagcgattcaaatgagctcgtttgccctttttgcagtagtctagtgcgttaactacaggtcattgtgctgcgatagttttataaactttttattttgaaactttttgcaaactagcaggatttcaacatcaacacgaacagacaggacaggggattctggccagatccaaccggtgcatgtatccgaatttccccaaatagttcgaaatgctcaagccaaccttctgcaaaagagtttttccggtaactattcctgtttgatggtcctgtgctagtttttcctggttattagtttgcttgtaccatactgaacagtagatgcttgttaaatacatccttgtaggcaagaacatgcttgctggtggcattgataaagaaacatcccttgcatggatgttatgtggaaatgagctttttatctggagttacctggcttctgttgcaaaagactgtcttgtacttgaggtcccttcttctcttatggggaacaaagaagaaaaatctctatgtggtaatcagtgggcagtttgcatagtgagatggggtagtagtggtgcatcaacacggagcagtggagatatattgcatcgaagaagttcgactggttttatcctgtgcaacaaaagaacacaagctatagcttattggtctgatatctatgctgaaagcagtaagagttcagttcttgatttaattggatatggtgatacatcttcaggtgatggcacatctggaaactgcaggattaattctcttattgcagtggcagttccaggaggtattaatgaatgcattgtgattgcttctcagccaacaggcacattatggatgttctggtgttcaccagctgcagttcgtcgaagagaaattcataagggtacattaggagtttataatgctgatcattctcagaaaaatagtggtggaaggtccttggcttggctaccaagtaaagcatcatctaaggctgctgaacggacgttctttttattgactagtcatgagctgcaatgctggagcatctcattcgggcatgatatcaactgcaaaaaaatagggtctcaggaaattgttggtagtgatggtgatatgggaataaagaaagacatagctggacagaaaaacatatggcttttggacatgcagatagatgatcatgggaaagaaattatcattcttgttgctaccttctgcaaagatcgggtgagtgggtcgaactacactcagtattctcttctgacgatgctgtacagacctaaccaaaagttttcatctgaagataatgtgattaaaactgaaaggtttttggagaaaaaagctccttctcaggtgataatccctaaggctagagtagaggatgaagagttcttgttttctatgaggctaaaaactggtggtaagccttctggttctgtaatcatactgtcaggtgatggaacagcaacaatagccatatactggagaggttcaacccgtctctatcaatttgatctgccttgggatgctggaaaggttctcgatgcttcagttatcccatcttccgaggacagagatgaaggagcttgggttgttcttacagaaaaggcaggagtgtgggcaattcctgagaaagctgtgttagttggtggggttgagccaccagagcggagcttgtcaagaaaaggaagttgcaatgaagcagttgctgaagagaaaagaagaaatcaggcattcaatgctagtgttgtacccagaagagctagttctgaggcttggagtgctggagagaggcaaagaccagcattaactggtatagctcagcaggctgtggttgatgaggagtctgaaatgttattaaaccggttatttcatgattttgttttgtccggtacagttcatgaagcacttcaaaagcttagagcagcaggcgcatttgacaaagagggtgagatgaacatatttgttcgaataagcaaatccatcgtaaacactctatctaagcattggacaacaactagagaagctgaatttcttgcttcaacaattgtttcatccctaactgagaagcagcaaaaacacaagaaattccttcagtttcttgtcttgtctaagtgccatgaggaactctcttcaaagcaaagtatggattttcttttgtgtcattatttatattcattgatttattattttaggcatatatcatcctagctatgatattaatcgaacacattggttctttgttattcaaaatagcataatgaatgctgatgacaattttgatggtattaaaactataggagctgtctggtaaaaaagaagaagaaaatctagatatgctgctgtaaatcatgaaaaatacaaacttcttagctgattttaaagccgtatacagttgtagaactcttcttaccttcatttctgtatacatgattgttgaaactggtgactgagcatgtaactctattggaatctttacctagcgttatatagggatgctaattttggcatgcctgatgggacacggacatatattatgcactcttagaacagcttgcacctttatttctgctaaaagatggtactgttactaacagtacagtatgagctgtaatattgacaaataaccatacaggttagccacaatttttttcaaaaaataactgccagtgcatcattttgcgtgacaacttctgttggaaaagaagtaatttgattgtcttgtaggaactgcgatgctaactgtcatggagcatggagaaaagctctctggaatgatccagctcagagaattacaaaatgctcttagccatcaacgctcaagcatacatttatcacctcagtcaaaaaaccaaacaactggtgcattgtggaaccttattcaattggttggtgagcaatctcgaagaaacactgttctcttaatggaccgtgataatgctgaagtgttctacagcagagtttcagatatagaagatctatttaattgcatatctcatcagcttcaatacattataaccggagaagaaaacccttctgttcagatgcaacgtgcacttgagttatcaaatgcttgcatgaccctagttcaggcagcattgcgctacagagaggagcacaaggactggtatccttctcctgaaggactgataacatggaacagccagcctgttgtacgatctggaatctggcgagtagcatcctttgccatggagcttttgagagaaccaggggctgcggacatgtcaatgaagtcaaacctatggtctcagttggaacgactcacagatatcctactggatgcatatattgggttgttaactgctaaattcgagcgtggggatgagcatggtgtgctaatccaagaatactgtgacagaagagatgaacttcttgggtccctctatgacctcgcaaaacaaattgtagatgcaaaatatcaggtttggtttaaattaaaatcattgtttgctcaatacttttccttactacagtaaggcgctttaccttttgcaatttcacattgtccagctttttacccgttctgtcatatcaatgtagtatcattcattatattgcccatcattccttgagattttgtggttacatagtaaggcatagtttatttcagcaatcatgtgctgttctacccaaattagtggattgctttatgtcagacacatatgcaattatgtatgcaacagtaaccaaggaacccttttttgtcattattttggtagtcacccattcagtaccgaatctgtgttctccaattccatcctctctctctctctctctctttttctttcttttttttttcatttgttgcttggttggttctctttggttgcttccttatagtgacttagttcactgtatggggtatttactacagtctatatggttattgactttagttattctccgatcttagcacaaatattattgggcagctgccataaatgtatgttcgtggcattttagcatttacatacttgaaacaatactgatgttctagctttggttggatggtgtttagccggagttgtggcttagagtgcctgttttatgctgtaaagtaatgttcatcgttgtaacaatagcggttgtacagctcttagcctccatggtagctgtatttgttgttctagtttgaacctcttctcaatcttaataaacttcggccgcgtatcttacgctggcccggcgaaaagtttctgtaagggtgatctcaaaattcaaattataaggtaacattaaaaagttatttttggatgactggcaattttttaattaaggaggcatattttctggattgtccactggtcaagtattctactgttttcagttcttgacatcatatttacatgaaggcatgtagctgtgtagcactgctgttgaatttgatactgttattttttgtactctttatcttaatgtggaacaactaatatttgtattatgcatatattttaggagacgacagaagtcactgacaatctggaactgaaagaatctatattcagagaagtcacttctccaattttggcaacagctaaacggcatgaagggtaccaaacattgtggcagatttgctatgatctcagtgatacaggccttcttcgcagtcttatggtataatcacaataccatatccgcaatttatcccatttaatctttctagggggtacagtgttgactatgttctgcaggcgataacatgccatgtgttattgcaatcaaattgttctttctaccaagttttattaagggacatggttctaatgttgaacttgtgttgcagcatgatagtgtaggacctcacgggggattcagtttctttgttttcaaacaactagtcaacaggcgtcaacatgctaagctattaagattaggtgaagaattcccggaagagctagccaattttctgaaagagcgggatgatcttctgtggcttcatgagatatgcttaaatcggttctcttctgcttcgaagactcttcatactctcgtgagtcctgaggaagatgctaaccttacaagcaacaggaaatcactgtcctttgttgaaagaagacgctttctctatctctccaaaattgcagcagcagcaggttagctgtttcttctcttttacttcatggtatacctgaacctgattaccttacgctgtgcactgccctgaaacaacaatttgttgaggttgcactgtgttaactgttgtggttgataaggaagttgtcattctccatatatcatgctggctctgtgcaaaattggctccaaacaattttttgaaagaaaattctgactatttgatgatggataacttgtatcgaatgctgcgtagcttgattttaaatcagttcatatgagctgtgaacataagctatagttcactttgcagttctttttctgtgcaaaaggacaggcaaacaatgctacttgccatgcttctcgccaagaggctcagtctttttcatggttcaaagaattaattatcctttgaattgctgttggcagtgcatatgtctcaaagtcatgaacattcaatttgatgggggcacctacacctaggtcctgaaatcccgaattccggaacatagttcctgcaccattcttttgcactaattcttgtttactttaacatagttattgtttttttcttatttcttcccttggataaatgcattcctgatatattgcaattttaacaagcaggtaaggatgttgattatgaagtgaaggttgcccatatagatgcagatatccgaattctaaatctgcaggtttgtcatatttcatgttgtacatttatttttctagtcatgatatttgctttcaaacttttagtgtgatgttatgttctttcatatttgccttcacatgtgcatcactttggtagggcaagtgaacccaaatctacgtatcgatgatgaaatctacatttgtgttctctcatgacttcatatgttccataagaccctgttcttttgtacattcatccatcattccattccttgaaaaagacattatcaaaaccagcacactagataggtgtttaactgtccaatgtaacagcctgaccatatttacaacttttacataattgtataattctgtcttatttagctttacgaaagtgttcaagcagtaaaaagaaggaaaataacccatgcaagatttgcatttaaagatgcattgtcttttagtatcaaataagtaggaatgaacagctaaataaactaagttctacctttttctctttcttctctttacaggaagagattgttcagcatgacccagagtatgcaccagataaatatactaccaagccatttcgtccattggaactgatcgagatgtgcctgaagggagatcgagagctctctcttaaagcttttgaagtatttgcttggacgagggcctcgttccggagctccaacaaaggccttctagaggcttgctggatgaatgcagccgaccaggacgactgggttagccttcaagaggaatcttcaggaggttggagcgatgaagtcatccaagaatctcttcagggcactgtcctgttcaatgcctccaggctgtgttatagcccagacgccgtggtgtatgacggttcgtttgaggacgtgctgcctgtgaagaaagaagacgtgcatctgagaggcttggagggcagatgtctctcagtggaggaagtgctgatgcagcacaaggatttccctgatgcgggtaaattgatgatgaccgcggtgataatgggcaaggagctaccttatactgtttccacagctgaacctgttgacatggactcttgatactgtcacattctgtcagggagaaagacctgcaggttgggacctccaaatctgaaatcagagtcaattttcttttctttgcagcacggaatgtgtgcagttccagatgtattcatattgcgggcgaaactatttgtagagactgcaagattttgtcagttcgtgcccttttttagcatgagctgtggcttgaaacgagtttttctcccccgatggaacaaagcaagctgatgctgtatcttaaaattttcttattagtaggaaatgcaaaatgcattcttttcttagtaatcaaggtttttcgtttttggtggaggaaatcaaacttttgatagtgaagagtttaggggacgagaggcccccatcgtctgctccatatagaatcagccgttaccaaaatttaaatttttaaatttgattatttgaaactttaaacttgattttgaagtttttttaatcaaagtttactcagaattggcatttaaatcctaagagcacacatataaaagttttatttataaattattacttttttaatacattgtacggcgtattatcagcgtatggctaaaaacggggaccagagattcgtagtttagtggaggagagtttaggacgagcgaaattgtcggcttgatgatgaaatagtgcacatgcgcatccttgtttgggcttccgtggccttcaattcaagtgcgggccatgtatttttgtgggctttcaagttgggccagccttgcagccaacacagctacacggcacggccagccggcacgcgacccgcgacccactcccctctcaccgagatctcagacgagcaaccactcctggcggagggaggaggaaagggggaggagatcgccgactcgacggcgttgagcgcggtgggcgcggcggcgcggagggcatcaggatggcggcggcgctcgctccgggggtgtcccggaagctgaagaaggtgctggagacgcggacggacaacccggatctgctcgcctcgctgggcgcgctctccaccttctacgtgcagaacaccccgcaggcgcgccgcaacctcaagtcctccgtcgagcagcgcggcctcaccatcaaccgccatttcctcgacgcctccctccctgcccacaaggtttgcgctcgctacgctactggcgcgttgctacccaccgcatcgtgagccagtcgtttttggtttgtgagtgattgtaaatttgtaatttctagtcgttttggtttgtgagtgattgcaatttctgtttcaggcgttggatcgcgtcgagggggaggtgcacgcgctcaacgattcctggaagaagtgagtgtaccatccattccgcgctttcattttgttcctttttcctgtttgcctgtgtggaattgtactataatctcagtccaagactttagattcggctaagctttccccgtaaaaagaagtcaaagcttaattgtatgtagatgtaggaacggttggtgtttggatgtaaaatctggtattagcatcttgttatggatcctaaacaatatttgactcgcatgggtgctgaaatgtatttgcagaaggtttttactttctaccatgagccaagctgttaggttggtttagtttggatgatactattataaccagctgctctactacgtggaatttacattttttgttaacatagtttgacacttgctgcctacttgcctagtactcaaaacaattcaagtgtctagccactaggacatcttcaaaaaagaaactgcaaaatctcttacataattggttatattgttacccaaagttggtcctaaagtagttgtgttttcctcttattatgcgcaatgctcgacatggttactttttctactagtgctgattttattctctttcattgtgttaggattgaggaagcattgggcagttgtagtgcaagtacgggggatatcatcagtacaacggagaggctgcaacaagaacttgaggttatcactcagcgccaggaaattgtgtcatgcttcctgagggattaccaactttcaaatgaagaggtaataccccctaatacaatagaatcaatcaaacaaatgaatcaatgatttggttgccaaactgtgatgtcttattcattttttagtgcatgcaacctcgacttttatgtccatcatatttatctattgttcttctattaatagatacatgcactccgggacgaagaaatagatgagaaattcttcaaggcattgttgcatgtccaagaaatacattcaaactgcaaggttctgctgcgaacacaccaccaggtacaggtgctttatccttgaattttgtaaacttaggtaacagatcataaaaactttgttgtttatcttactatgtacattcctgtaacttaggtaacagatcataacattttagtgcatgttatatcctcagaccttcaacccaagcaggaaagttggattttcagctgccagtaaaaacattcatgagtataccaagattatggaatgtttcccctaaaaaaaagattatggaatgttccacaactattttagttgataggatatttcagttacatttttttttttagcttggaatgttccacaattatggatttatattaacccagtttattgataagaattgagcatgctcaaactatgtgagatcaccctaaactataccaagaaagtagtgtttttttttggctacgattataccaaaaaaataaagccaccatccttatatttcatctctgcccagataaagatgctttggcatgcaacgtgttgcttgtactattaatggctgattttaagcaagagaaagtagtgtttacttcgatatcttgttttctctatatttgttcagcgtgctggtttggaacttatggatatgatgtctgtttaccaagaaggagcttacgaaaggttatgcaggtattggctgtccttctatagtaatcttctctccctctccctccctcccctcgcctctctctctctctctctctctctctctctctctctctcgtgtcatttcttttacttaccttgtatctcagtgttcattccacaatactccctccattcctaaatgatcgtcgcattaccaaaaataaaagaaattcaatttgatcgtcctatttcgttaggaagcagcagaaatcacgggcagacgataacggtgcttcgtattacacagcactgcatgcatgcattggctctgcgagagttaagttgggagctgctgcatgcgtggaattaatgcgttacagctgattggctggttcatgcggcatgcaaaattgatggagcgacatgcatggatacgaagcgtttgtatgttgatcgatgcggatagtaactgctccttggtcttgctgcttaggtgaaatacgacgatcaaattggaacggggggagtagcatttagaatttctattcactagcttttattgccgatgcctctattggctagttcattagtttttgatctattctcttaattatgtaccaaagcatgaatgtctaatttagttttcatgaagttcaaccactccttattttgttactaggtacaactgaggaattaggctgtgttcggatatggggagttgggaactaaactccccgcacggaaaatggagcggtccattatcgcgtgattaattaagtatttgctttttttttttcaaaaatggatcaatatgatttttttaagcaagttttgtatagaaactttttgcaaaaaacacatcgtttagtagtttgaaaaacgtgcgcgcggaaaaagagaggggtgagttgggaactctgggttccgaacacacccttagttatcttgataagaactatagaaccttcagattgactaatctgttatttcattttgctctttataacatgttcgcttgacatttgatgttcaagtggtgtaattcatcttgctttcttttcaggtgggttcaagttgaatgtaaaagattaggtgatactgacaaccctgaagtaagtgaacttctaaagaaggctgttcgatgcctgaaggaaagacctgttttatttaagtactgcgcagaagaggtatgctatattgtaccctttttgaatactaagtttaccttgaagatagtaaagttgccacaatttacatgttatgatgagtgatctgcatcgacaggttgccaatatgagacataatgccttgttcagacggtttataagtgctcttactagaggtggaccgggagggctcccaagaccaatagaagtgcatgctcatgatcctcttcgttatgttggcgatatgctggggtggctacatcaggtattttcttttgtccatccttggtcctagtgtaggaactagtaaaggatgagtgacttcggttctctttttgcccttccaaatcgtgtgcatttacaatacaccttgcatctgtgcctttatgatattgctttggacgtactaaattttcattctctaatttctgaaggcactggcatctgagggctctatagttctattgcttaatccatctgatataactgacatgaatagttatttttctcccaaataacaagcatatacatcatgcatgtgtttctataagacatttctttaccatcccttaattttaaatccttcatttgtgtaggctctggcatctgaaagagagcttatagttgttttgcttgatccggatgcgatgactgacagtggtccaactactcgtcgttattctgtccgagaaggtgatccctccaaaggagagcatgatataacttttgttcttgatagaatttttgaaggggcttgtcgaccatttaaagttcgagttgaacaagttctgcagtcacaaccaagcctgataatttcttacaaacttagcaataccttggaattctatggttacacagtaagtctgacatactattttttgccatttagaatatccatgagctgttctgtttacaaataatgtttttctgttctagatatcagatctgttgggtggagacgctgcactgtgcaatacaatatggtcacttagagatgcaacgcagcagacattctttaatatccttaagagccgaggagaaaagttattgcgatatcctccacttgttgctgttgacctctctccccctccagcagtgagagaaggaatttcattgttgcttgaactcataaatacctacaatagcatgatggttcctgcctctggaaaaaggccaaatttcgatcctgtcatttctgccatactggatcctataattcaggtgagtttttgtgtatttgatttgctttgtagtctgtgtagatatctgaaagttttggttggcatgcgacttagcttgcccacagtgcaaatttgcatagttatcccagctagtatcgatcatctgctaatcacgctgcaatttcttttccaatgaaagggattgcatgctatttttagttttgtgtgtgtagatgtataatattaagtaaatgttaaactaataaacatatatagtatcatgtttgtactcctacacatttggcattgccatatatgatctctcacaattagctccaatgtggtaaactcttgagcttctccaattcttttatgcggttttgtgggacgtgtgttactatgtccaatgattataggagttccatacttgcatcgttaggccattgactaaaaaccgatgtgctcttgtgctattatgtctggtgcaaccagttactagtttactgcagctggtgcaaattttatattttacctagagacagctcttttcttttactttttggatatgttaataattattcttcttgtcttggaatattgggatgttatctacagtatgactttgttgcgatatactgttactgatattcccgacttgctgtacagatgtgtgagcaagctgcagaggcacaaaagtcaaaagggacaattgcacggcgtggtagaactagttctgatcccactggaaataatagagattcaatctcagttgatgctattttatctaagaattcatcaacatcctttctggttagtagcatataattcttttgtttccgctgtatagaatacctggagtatatggaatagtactcacctaattcactggctactgagcacatgttgtaggtaattttaagtttgtaattgtaaaatgtggataatttggaccaagaaaatgtggctcatgtgggactacttaaaaaaggtcaatgtggtttgggattgagatagtaaaactgacaaccttttttctcacctcatttctaatttctaattctgaactaggaacttgctattattgtcgatttctaattcatattttgatgtcattattagatatgggaaacactcatggtttgttattatataaattgctcttacacatgccaaattacatgcaatctgaatttttattatctaacgctggctttatggagggaattgcatgtacataatttaacgattggcatcaccgtctttgagtctcaaccttttgtatttgaaatctgattgatgaaagcatgatttctgatggtggtctaaaacccatttgctttcgaacatttcagctggatagactttgcttctgctgtgccgatcgtttttggacatttgcttatcattttcctcatatatgtcataacatgtgcagagtggtgaatcttcatccaaaatctacctcatcaactgtttgtcagctattcaggaaccattgatgggccaagatgttgctacaagttatattaacaacctgcggtctatgattgaaacacatttgcacaccctagtagataaagaagctgatagcattcttaggaaatgtggactatcaaacaagatgccatacataaaggactatagctctactggcagcaaggatgacgcacgacctttggctgatattgtggagacatcaccgcaaatgttggtggaatgcttgaaggcattctatggtctagtgactggaacagaaggttccttgcctgaatttgagcagctgcaggtaccaaggttgcgttctgatgcatgctatggtttggctagagctctggcggaagcttatgaactgatctataaggcagtggtggatccaaagaattgctaccctgacccaaggtctttagtaaaacactcgcctgagcagataaggactatactagaaatctgaggtctattcacaatctcttcatacatgttaatgagagaacccttttatagagtcaatgtcaatgtggggtatatttgctacgaaaaggtgtgatttcaaattcttttactgaagttgtttacaccttcactgaactcttgtatcatagcgtttctcttgtattaatgttttttctatctttgtaaaagtaaaactgcttgaatcgtagtgtttctcctgtatgtctttgcaccttttgcaagtggatatttagttataaatccaccttttttaatgcatgagtaccctcttaaaaaatggatgcatatgatttgctttttctagaaaactacatccaacgtgccaaccaataaagtcaaactggcagttcggttgctcatatgcagattggtaagtttctgtcttttctcgatccatttgcataaccttctctctttttaagttgcagagcatccaaattaactgtatcctctgtattttcagtactagtgcacacttataattgatcttgtttcagctttccttgtggccccttatagttctatccaagctcctttttgcgctgatttggcgcatggaccagctggagtggttgactgcagcaaggaaagaaaatctgaagtttggcaggttggaaataagtgctgctaatcaggggcaacctgacaagttacacaggtttggttgaatattaggccccgtttagttcgcgaaatgaaaatttttgggtgtcacatcggacgtttgaccggatgtcggaaggggttttcggacacgaatgaaaaaactaatttcataactcgcatggaaaccgcgagacgaatcttttgagcctaattaatccgtcattagcacatgtgggttactatagcatttatggctaatcatggactaattaggctcaagcaattagtttttgtttttatctatatttaatgcttcatgcatatgtttaaagatttgatgtgatgtttttgggaaaaactttttggaaactaaacagggccttactccattcatttttatgacaatcattttggtgtccttaatttccacgagcacgtcttgtttgtcctgttatgacattttctcctttcagaaatcagaactgaaattgggttaggcatgtctcctaattttaactgactggatactttgcggtacatcaacagcaacttcgttgaaaggattcagtaaaccttcaagtttcctctagtacaagttaattccacatcttccctatgaacaaaaacgtattaagtagagacctacaaaaagttggtttgctccattgtcttgatggaatagttaatgtaatgccggtgtcctttactgtgctagcgtactactaactactaatactagtacaactaaattagtttcatctaatctttaaacgttggtctggttgagtccttaattcaccatttcacctattaactccgtatcgacattatatgtgcatggacctcgaacttgaacaaattattctacgccgtatttaccaagaagaaaaccgtccaaccgctccatgttcgtttgtgtcctccgtttggtcagaccgtaggtttgtcgttcagatttggattagttcgagggtttcgtgcgctggcaggcggaccgggcaagtggcgcaacgtgttttaagggtggaactggaacgggtgtgaggcgaggcgagagtcgccggtccacggccacggcggcagggaagaccggaagaacgctgagccgtgacagcgacgggagggaagtgggaacgggtgtccatgagccggcagaagacaacggccccgcattccttgccgtgacgtgacatggccacggccaaagagtaacaggatgaagcgatggataatttagtgatcggtttccatggcagcgttgcacggttgtaccgtggcgttactccgcggggcccaccgatgagctgcctgtgcagtacaggatgggggtaagaagcggaggagatgcaggagtaggttggtcgttggtccgacttggcctggttttaatgcggaattctgcgccaaagaatccaaaacaaagacatcatcgcatcagccgcggcggcaaagcccaccaggccacccacccgtccaattccaagcgcgcgcccggcgcctcgtcgcgcatcgcttgctcagtagctcggctcggatgagacgcctcgcgcggacgcggtagccggtttccgtgggagatgcggggcgcggcgcggctactcctgccactggtggtgctgctgctgcacgcagcacgcggatcagcgggatcgacgggcggcggaggcaacggcagctgcacgcagagctgcggccgcatgagggtgccgtacccgttcggcttctccagaggctgcacggttcagctcggctgcgacgacgcctccggcaccgcgtggctcggcgggacgcgcgggctgggcctgctcgtgagcaacgtgacgccgcgcgccatcgtcctcaccctgccccccaactgctcccgcccgctcaacgagtccctggatgcgctcttcaccgacaactacgcgcccaccgcgcagaacgccctggtcgtgagctcgtgcgacccgcaggccgccgcccgcctcagcaactgcagcatcccacccgaggcctacctcgagaagagctgcaattccatccgctgcgtcttaccttctaccaaagccaacgtcgacgggacaaacgtcacagaccctttcttgaatagaagcgagatgcggcggctcggctcggactgccgcgggctcgtgtcggcgtcgatctattcgaacacggcggggccggcgctgcagctgaccgcgctggagctggattggtgggtgcaggggcggtgcggctgctcgagccacgccatctgcgacgggttcaccccgccgtctacgcagaaggaggcgttccggtgcgagtgccaggaggggttcgagggcgacggctacaccgccggcgccggttgccggagaggtcagtactcagtacattggctggatagtatccactgattagcttcattgctctacttttttcgtccattgatttggtcagtcaaatcctgcgagctaactactctagccactcgaccataaccattaatcgtccggagtagacagtacacagtagagtaagcatatcttgtgcttcgttgactatacacctagctaaccagcagcgcaagaccaaggattggaccaatgaccaatcagcgttaaagatgaacgattaacttgatcatcacttgattgaacagcgaaaggctctgcttaccggcctttcaaaggaaaaaaaaaaagcctctgttactggtaggtgcgagagcgttcgctataacattccttgcacaactgcaagtgctgtcaactgggttctcataccgtcacacatgtaaagcgactggcagttcaagctaattatttttgggtggttcgctgatgtcaaaccgtaatgtactacttgcgcaagtgacataagagtatattcggttatttattagaggatatgtaatcgatttaagtactatcagaacttttgttttctacgacaagttgcttgaaatgtagtgccattgatatattagatattttgaagctctcgaagaaatatttttctgacatgttggctttgatgcttgcctgcctgcctgcctatgtgctgaggaatatttgtttctttcttttgcctgacatcctatatagatggtattgagtcccataattattcataaaaacaagaaccagttgctaagaaaaatacagatcaaccaagtggggtgtagttccacccatagttttttaggtgctgccatgcttaccttctctgtatggcttcatccctggaagaagaattttccaaatcactgcataaattatgttgatttttctcaatgtatgaagtcaactttgatataataaagttcctcgtttgttcccttcttccctttgaatctcacactaatgtttgttttttttcagttccaaagtgtaatccttcaaaatacctatcaggatcatgtggcaagttggttcagatcggccttcttgtggcaggtaattgcttataaatctcgtctgattgtcagagaaaacaatatctacttttggccaaaagaggttggaatttgattttagtaaaaatgcgttgcagtttgctcatcgatcttacaagtagcattcagaaattaaagacagagtatttatgtaggtttgagcttcatccatagagaaacagctcgtcatacgtatggctacatgactgatatttaggaggatatggtgctaatattatttagtattttgttctaagaaaaagtcccctgaattcctacaaaaatctaaaaaccgtcctaaatatctaaaccagacaccattcaagccgaacatttcaagactttcgagaggacccatgtagcaagttcctacaaatatttgtatggaaccaattagtttgaggcagcaatacatgtgtcgaaatagaagaattccaatgtttcaaaatccaaactactctcccatattcagatgataaaatgtattgattttttttctaaaccaaaccttttcaaatttgactaagttcatagaaaaacagagtaacatttctaacacaaaattgtagatttcatttaaactaatttggtgtcatagatgttggtgtgtttttatataaattttattgaacttgaaatagtttgacttgtaacaaagttaaaatgtcttataatttattaaaattgagggagtagcaacgaatgggccttgaactcagacagagttaaggcccagattagagaaagtttaaattgtttgggtagtagagttgaggcgatttcaaattgggctggtatccggactagaaaaatggccttagtcccttatcttttatttagtctagcaggccagatttttggctatttttcacttcctaacgatctcccggcctatttgctcgaagctaagcaaccacaccaaccaaagccactaggctttaaccgcaattgtaattggattgcatgatggattctttgcgctcacacaatgcaggagtcttttttggagccatggtgatgggcatcacctgcttggtgtaccacctgctgcggcgccggtcggcggccctccggagccagaagagcacgaagcggctgctgtcggaggcgtcctgcacggtgcccttctacacgtaccgcgagatcgatcgcgccaccaacggcttcgccgaggaccagcgccttggcacgggcgcgtacggcacggtgtacgcggggcggctgagcaacaaccgcctcgtggccgtgaagcggatcaagcagcgcgacaacgccgggctggaccgcgtgatgaacgaggtgaagctcgtgtcgtcggtgagccaccgcaacctcgtccgcctcctcggctgctgcatcgagcacgggcagcagatcctcgtctacgagttcatgcccaacggcacgctggcgcagcacctgcagcgggagcgcggcccggccgtgccgtggacggtccgcctccgcatcgccgtcgagacggccaaggccatcgcgtacctgcactcggaggtgcacccgcccatctaccaccgcgacatcaagtccagcaacatcctgctcgaccacgagtacaactccaaggtcgccgacttcgggctgtcgcggatgggcatgacgtccgtcgactcgtcgcacatctccaccgcgccgcagggcacgccggggtacgtcgaccctcagtaccaccagaacttccacctctcggacaagagcgacgtgtacagcttcggcgtcgtgctcgtcgagatcatcacggccatgaaggccgtcgacttcagccgggttggcagcgaggtcaacctggcgcagctggccgtcgacaggatcgggaaaggcagcctcgacgacatcgtcgacccctacctagacccgcacagggacgcctggactctcacgtccatccacaaggtggccgagctggcgtttcggtgcctggcgttccacagcgagatgagaccttccatggctgaggtcgccgacgagctggaacagattcaggtcagcgggtgggcgccgtccacggatgacgccacattcatgtcaacgacgtcctcgctttgctcgtcggctccatcacgttgcacggacaagtcttgggggaccgctaagagcaagaggcaggccgcggcaaacgcagtggtaaagcaagagacgacgaagtgtgcagtcgccgactcccccgtgtccgtgcaggagagatggttcagcgataggagctccccttcctcaaatagcctgctgaggaatagctccctgaactaactcaatcaatgtccttgtcatggcattttaggtgtaagtagcattagaacgatctgtaattgatgcaatgatcccttgtgcatcgattgtcgatgtttatatctgcaatattgaatatggggttatacgtcgtggttaaagctacacacagtgacatatatagatggccatatggcctaaggcccgatggcccgacccaagacatggtgatttggcctggccaatgcacggcacgccctgacttgggtcatgcctatgccggaccagcccaacagtcgtgccgtgcctggggtgctacttcggtacgctgcgctggcacgacctggcacgaagttcagagatgcgaaacagacttattgtcaatcacatgtaaggcacgtataaatatagatagccataaggcccgcccggcaaggcccggcccaggcacggcccgatcgacacttcgtgccgggctgagccggcccatgggctgcacctccggcccagacacgacccaccagcagtcgggccgtgccatgctggcccaaaggaacgcgtggcccatcgtgcctttttaaaataagtctattttcctccctcttctttgggctgtgatatatatatatatatatatatatatatatatatatatatatatatatatatatatatatatagctaaaataaatctattttacctccctcctctttggtctgacatatatatatagctaaaataagtctaattttcatccttattctttggacagtggcatataatgtctttttgtactccctattctttatgtgccggcccggcacgaacgtactagtggggaggcccaggcatggcccagcggtcgggccgggctggcacgagcccgactcccgtcgggccgtgctgtgcttgggccgggtcgtcgggcctcgggccttttggccatctatatgcacaaagaataggaaggaaaaatagacgtattatatggcacggcccaaagactaaggacatgaaatagacttattagctatatatatgccagatcccaagaagggaggggaaatatacttattttaaagaaggctcgatgggccacccgtgccttcgagctggcacgacccgactactggtgggccatgcctaggcctgaggtgcagcccgtgggctggcacgacacggcccgaagtgccgaccatgccgtgccggcccgatcgcctcgggccgtgccgagcgggccttatggccatctattgtaaatctctgtaaattttgctaattccttctatactcctgaattttgcttacttccttgtaagcccccaaaatttgattgtgatcccttccatatccctcctgtcatttgaccgtctaatttctgtaaaaatgaccattttaccctttgtatgaacatagaaatttacattattaaaaatgtaaaagtttgtcatatgagactactatagttatgagtttgttgtgtgatgcattattgatgaaaaaaatttatttttagataatggagtaaaaaaatatgtatttattttattttttaaaaaaagtcataaaataaggagcatttatacaaagatagtactaccaatgcacatgatattttttttatgaatgctcctgataaaaaagaatccattgtcctataaaaatttcaaatcaaaattttaatttattacatttgttttattttcaaaatttatgtcaaaaatttctgcgctaattatttagtctcgttagtttcataaaatgcacatattgtgcactcaaacaaaattttcaatcatttttcaaggttatattcaaatctaaatcatcaagggcataaaagacattgcaatagtgaaataaaggaaagtgtaacgacaaggtcatggaagggattaagttgaaatttcaggggtataaatgggatcgagtaaatttaaggagtatgaaaggtattgagtgagttttgaaggatatacagggaatctattctatagatttaggccctcgataagaggatggtcctatttgaccagaggtcggtgtagtattactaagatttgtgccgactagaaaaaaatgtctgtgttgcaacggataaatagtttttctagtgatacaacaactattaagacctaagcaataaattgattcattgaaatcgctatacattgtaattaaaaaagttaatgaaattttttccttggttttggtccgaaagctcattccttttttccttttcagtcccagcctagtctgctaccttgctccactcagcctgcctctcttcgcaccagccaacaagtagactcgtaggcccagctcacacaatgccatcttcaacctccgaaaggtggtcccatacccgtacaatgccggagccgatactccctatcatagttatggatatcacatacctaatagtagttgactaaactcggcagagcccaccacataccaagtcttatacggaatcatatctcgtatatagaaggagttccggataaggaaggacaaatataattctatacggaaacgacaaggactacccggattgtatccatactggtctccctagttctacttgaacaagtggacatctatgggtataaatacaagaccccatagggagagagggaacaacaaaaacaaaaatagatagacacacaatacacaagccaacacacgccaagacaagctgacgaatatcgacatcagagataagcctagacaaacccaatatggtgtctgcggaggccaacaagaggaatctagcgttatcgccgatctcgccgagttcatactcaaggaggaagactaccctgtcgtcaactacgtgttggttatccatactgccaaatagacgacagctagataagttatcccaattattgtacttgtgtgattcagatgaataaagggcaacacctgcttcggtcaacaggagtagggctattacctgtcaaataaggggcttgaacctatataaaaatcattgtctccatctcttttactttaatatcacatataccctgtactaacgatccccatatatactatgcaaaataccgtagtcacgatctcaaacgtcgacactccccatcaaattcggctgaatctttctcgatctctcaaaattggttgagggcttttgatccactcaatctcttctttccattttttccaaaatcggagcgaatcaagctcgtgaactagccatcatcagcgacttttaaatagagattaaattcaatgaattaaagttgaatttttaatgctactcaattcatttcatactacaaattgtattggctttttttagtagtcaaacttctttaggtctgaccaaatttatataaaattttagtaatatttataacacctacttaattccattaaatctaacattgaatatatatatatatatatatatatatatatatatatatatatatatatataggaaaattatatactactaccgggagtagctactccctccctgtccgccaccaattcaattcgtttgcccagataatggtaatgactattaacgggtttattgaatcgaatacttttacccgttttcttttacccgtattttttttccctcggggtcaacaagattgtttctgttctgtagcagattcgaaaattgaatcaagattcctgagtttgttgtagatagaattttgttcggagacagctgaccagatatatttcagggtggttttttcgctcttcagtttgcttatccaaagcgagaaagcaggatgattatcccgtcgagcagaacattatcgatctaaaaccgttctttgcgttttgagagttcttaacccatctaaactcagattagtagcctcgccggcggctgcgttgcagataacgttgaaaggtctagcatggagaactccagttccaaggtttgttgccatattcatctgttattttgcagtgaatgtggtgccggccatggcgacaatgaacagcaccaacccgacattggtacggtatagcagtgtcaggctgcaggctgccggagaggagcgccccaatgtgccgcgtgcacgccgagcgccccaacgccggcgccgtcgaagctcgcggcagccattgatggattttttttcctaatctttgagtctttttttgatcgtatctcttactaatttgttttgtttatgtttttgcatttgcagcacctttgcagtcctgcagcaggtgcgaatgtttcaggtggtggtggctctagttctgttttcactagagcccttcatgctgctcaagcaagaaagatgcatcagcggaagcagctacctggttctgcagtatcaaattccaaaaaaacaagtggcatcaagggtaaaaaggtagtacaagaaaaaatttacaccaggtgcactcctgctattctctcagatctattctcaggttttggtgattagcaaaaagagctagtgaaacagatggagttttatgggttgctttccatgaggctgactaaactgaacaagcaattcggagcatggattctgtgcaagctagacccnnnnnnnnnnnnnnnnnnnnnnngatctagacatgaaatttgtttgacatgtgaggatgtcagcctacttttgggaatcccttgtggacggaaggagattttgcctgcaataaaaaacgaggtaaaagatgttaaggcttatatgtgttaaatctttgagaaagattcctttgatggacttaccattgtaacaattcagaggatattggagaaaaaatttaacaggacgatgactgttcacgaacagattgtattcaagactgcttttataatcttcgttgtaaccaaattcttggctcctcaatctgttaacaatcacatatctataaggtatatgaaggctttggttgatgtagaaaatattcacaagtacaactgggcggaatttgttttgcatgacatcaaagatgcagcagcaacattgcaacacaaaatacgccatcgaaaaagcattggttacatcaatggctgcattatactacctcaggtgagattatcctattattcgttcgaattatttgccttttactttctaatatactcgcaacatcttttcacatgctataatttatactgctcagcttttttatctggacaatctggatttcgggacggacactcccgagcaggaaaacattccaaggattggcgtgtacaatgactccatgatagcagaattcattgagagggatgtaattctcaagaaccggaatcctttccccgcgtatggaaagatgaaggtaaaatcaactctcctgccggtagagtattcttgttgaaatttcccttgtgcagaaacttcagactactgacattttttttgggtttcagctgcgaaacaaacatgatgaaaaatacaatcttggccatcatacgggtgcaatagaggtgcaatctcatgtagtttgtcaatctattcaatataaaaagaatccatttttccataagaattgttgatatatctgtacacaggctatccatgtggatcgtacctacgatgccaggtctgacatcgagcccccaagctttaatctaggaataacacaagatatcgaagaagcaaacatggtggcatgtaccccaggtcatgacatctccaatgtggctgaagactctgacaaagaacaagaactcaactttttagcacgtaccccagatcagccaatctcaaagtcagtagatgcctctgacaaatccggagaaggtaatgcaatgcacaaaactccctcttcgcatggaggtaatgatacccacaagcctatatcagtttttcattttcattcataaccaaccacatgcacataatatgtctcactcttactgttctgtctcataataggttaccaacaaactaaacttagtagtttctctccgtactctatgttgaaagagacgagtggggcaaggattttcatgcgtgaggagtacgcatgtacaaagctcccacctaaatccaagaggagaattatcggcggtccttctgatatcctattcgatcggccaaagaggtcgattaaaccaagccattcggtgaaatcaccatttctgagcaagcaacactctttcgtcaggcatgaccagaaggcacttgatgatttatacacatatgcaatttcaatcactgatgcagaagctcttaagtaagccacctatctgaaacacttgatgatttatacacatatacaacttcaatcgctcatgcagaagctctaatgtaagccacctacctgaaatgttcctttctttcaccactaattgtaaagatatcacatttaacaggaaaatctgggttcacatctcccaacctgtccctatgtcattaagcctacatgacatacaacaggctattcggctagacactcaaatgcaagaagaaacattcaatgttgcagttcaagtattagcagcggatgagatacagagatttggaggaactgattttgtaggctggagacatttcttaaatcaagattttgcagtaagtgcttccaattactctagactattttaattcttaaatatggtgtgttttaacacaatatggcgctgtagatgtttgcaacagctggtgatgaccagtggaacccagaggatcatctcccctcattcaaagatgactccctgataccatatgacgtacctagttgccacctggtttgataattaacagcatcttgaaaaattcagtacatcaagtgcaaatgttcaggccactaacttttgcaatgtcaatattaatttgcagatatttattccactacttcaaccactgcactattctctatacgcatttgatatggagaaaaaaaaattatgcattcttgacccactgagagacgcctcgaaaagatcagaggatacagcagaaagacacttaaaaacaaaatttcacatttcatctgctctgaaggagtgcatg

SEQ ID NO: 10198 - DNA, 11673 bp, Oryza sativa
cgaactttccgctacctactcacctcaacaaaatggtgtagtggagatgaaaaatcgtacattgattgagatggcaaggactatgcttgatgaatatggtgtttccgactccttttgggcggaagccataaacaccgcttgccatgcaacccataggctttatttgcatcgtctcttgagaaagacttcctatgagctaattgttgggaggaagcctaatgttgcctattttcgagtttttggttgcaagtgttatatttaccgaaagggtgttagactaaccaaatttgaaagtcggtgtgatgaagggtttcttctaggttatgcctcaaatagcaaggcataccgggtctacaacaagaacaaaggtattgtggaagaaaccgccgatgttcaatttgatgagactaatggctcccaagaggggcatgagaatttggatgatgtaggtgatgaaggcttgatgagagctatgaagaacatgtcaattggagatgtcaagcctattgaagtggaagacaagccatccacctccactcaagatgagccatctacttccgctacgccaagtcaagctcaagttgaagtggaggaggagaaggcacaagatctacctatgccaccaaggatacacaccgctctttccaaggatcacccaattgaccaagtgttgggtgacattagtaagggtgttcaaactcgatctcgtgtcgcttcgatctgtgaacattactcgtttgtttcttgtcttgagccaaaacatgtagatgaagctctttgtgatccggattggataaatgctatgcataaagagctcaacaactttgcaagaaataaggtgtggactttggttgaaagacttagagaccacaatgtcatagggacaaagtgggtctttagaaacaaacaagatgagaacgggttggtggtgagaaacaaggcaagatttgtggcgcaaggtttcacacaagttgaaggtttggactttggtgaaacttttgcccccgtgacaagacttgaggctatttgcatccttcttgcatttgcatcatgctttaatataaaactatttcaaatggatgtgaaaagtgcttttctaaatggtgaaattgccgaacttgtctttgttgaacaacctcccggttttgaagatcctaaatatcctaaccatgtttataaactctcaaaagctctttatggtttaaaacaagctcctagagcttggtatgaaaggttgagagattttcttttgtcaaaggatttcaaaattggaaaagttgacaccacccttttcacaaaaatcattggtgatgatttctttgtgtgtcaaatttatgttgatgacatcatattcggttgtactaatgaggtattttgcaaggaatttggtgatatgatgtctagggaatttgagatgtccatgattggagagttgagcttcttccatggacttcaaatcaagcaactcaaggatgggacgtttggcttggaggatgcgaagcccatcaagacacctatggcaaccaacgggcatctcgaccttgatgagggaggtaaaccggtagatttaaaactttatcgttccatgattggtagcttgctttaccttactgcatctaggccggatatcatgtttagtgtttgcatgtgtgcacggtttcaagccgctcctaaggagtgtcacttagtggccgtgaaaaggattctaagatatttaaagcattcctcaactattggcttgtggtacccaaaaggtgctaaatttaagcttgttggctattccgattcggattatgccggttgcaaagtggatagaaagagcacatccggtagttgccaaatgcttggtagatcccttgtgtcatggtcatccaagaaacaaaacttcgtagccctctttatcgccgaggcggaatatgtttcggcgggtagttgttgtgcccaattgctttggatgaaacaaatcttgttggactatggcatatccttcactaaaaccccactcctatgtgaaaatgatagtgccataaagatagccaacaacccggtccaacattctagaaccaagcatattgacattcgccatcacttcctaagagaccatgttgccaagtgtgacatagtcattagccacataagaaccgaggaccaactagccgacatctttaccaagcctcttgatgaaacccgcttttgcaagttgaggaatgagttaaatgtcatatatttctctaatgtggcttgagatggtgcaccatggttgcttcctttgcatattgtatatttgctcctatttgctcttatgctttggatttattgccatttggttcttcattgcgaaaatggagcatatcacattaagggggagttttgcactcttgcatgtgctctacttccttttatatgtaagcaaatcaactagtggtgctagtagtattttcaaaatgcccaagtcaacataagtcaaaacttttgcaaaatcaatgtaatttgaaaactatctcttggaaaatgtttcacaaggttccctatatgttttccaactctcactttgtaagaaaaatgatttttgaatgaaaatgccattttggccttcttttgaagaatctagaatcttgtttttggtcaaaatgagattaaaccccaaaatgagattgagaaggaatttgagaaaagtttcaaaacaaagttggtagtgaagaagatttgaaatgtttttggtattcaaatcatattcaaaaaccaaatatttcaaaagttgtttgaaaatcaaattcgcccaaaaacccctatagaccataaatggtcacctcctagcactcaagtgagttttgttgcaaatcttcataaatttcaaatattatgaatggttggcaatatttcaactcacacatttcaaaattgctccaaaaattaaatttttgttgaattttattgtgtgggggtagccgaactgtgcaagggctgtgcacagttggctgggggccaggcggtctgaccggcgctatatgcgcggtctgaccggtctggtggcgacggtggcccggtcagaccggccgcaccccggcagtctgaccggccgtgtatagccggtctgaccggccggggatggtgggcccgggaatcttcccttttcttctctcttcttcccctacccgactccatctcctcccattcatccttcttctccaactcgaaatttcttctcatatctcctctcccaaaccctagtcacctccctccaccaaatccatccggttcaaccgtcaaaatcactccgattacaccgtaagtgattctcctccgcttcctctctctattccatggattgatttgagtttttattgagtttgtgatccatggcatggaaccctaggtgaaggaagaggtgttcttcaatttgcaccaatagagggtagtttcttggtgtgattcaactccttcaaccggtaaatcactctctctctcttgtgcattgctctcaaatcggtctattttaatctctagggttaagggtagtttcccccattgcttcaatctctatgaaatagacctacaccttgatgttcatgttccaatcttgtgcaactttgtcctagcaatttttagaatcatttgtgtggattgtggaatgattcggttgtgctactgtcagcggcggtctgaccggccgtgagacgccggtctgaccggcccatggccgtcggtctgaccggctttggctctcggtctgaccgcccctgacaggcagcacccccattccttactcttcactatgtggcttctaaaattgttgcttatccatcctttgctccttgtttttcagctatgcctccccgcactcgccatggtcatcgtgagcccacgcccaatcccatcagtgagaatgaggaataaagcggagatgagtatgttcaaagtgaagatgaaaatatggaaaatgttcagggtgatgagatggaaggaagtgatgatggtgatgacaatgggagtggcaatggtgaagatgatgaggcaagtgatgatgggagtcctctcgattccaccatccaatttgtgcttaatttgaggaatgctcaaaaatacactatcctccgtcatcatcatcaattctagaggcctaacgattgtaatgatccaagatttcatacacggttccaaaagtccgtgtatgaacaagtgtatgccaacaaagccttcgccgaacacaagtggatttcttggaggcacattggtgagacaccggagtttgaagatttgcaagagatgttccggaccgttgggattgatagaattgtcaccatgaagcaaccttttgatgaagatctcatccggcaattctatgccaccgtatgagtgtccggcgattgtgatgcaatgaagtggatgtcggggacccttcgatgctctatcaaccgccgtgaattcaaggagctcttgcacatccgcttcaacaacggggatgaccttcatgatgagcacacccacaaccccttctccattgatcacttttctcagttttatgaagaagggggaaggcacacatatggaaaggtggcgggtttgagggctctcccaagtgtgatcaaccgtatagtaagggccaccatcctcccaagatgcggcaacaatgatgacatacgcggagttgcttggcatgtcattgatgccattttggatggtcgtcggtttgatgttatcaaccttataatgaaggagattgccatctcaaaggggactattgaacaaggaatctattatgctccctacataatgaggttgattcaaagcaagttgggacaaattggtcacaatttaaaagaacataaggagtacaagcctcgtctccaactctccactcctagagctccttgtgtgcgccaaccaacttttgatcaaggtgcaagctcaagtgcagcccctcctcctcctcatgggtatgatccaagtgattttttccatccacaatatgcttattttggaatgcaacccaacgagtacttcaacccggtacttggggctattaataccctgagtgaaagcattcaacgcttgtctaccgggcatgaagctttgcatgaggatgttcgtggcttgcgcaccgatgttggcaacttgaatacttcggtgggaagattgcatactagggtgggtgtcttggattctcgagtccaaactttgaagagtacccaagcatttgtgtatcatcgtcgtcgtgatgctcatcatccttccacttcggcgcgtcctccttctccaccacaagaatgaagacctttttggtacttgatgccaaaaggggggaaaaagtgtgttcctatgtctcgtgggttgggactagtagtagtgaggttagtcacctcatatctaataggttaaggaggtttgggctatattatgtatgggtatgggctattactctatattgtgtgttccttttcgttttgttgatctctatgtcatttggacccttcgtggtcttgtaatagcctatatttatttgtgagccctttatgtggtcttaatgtgaacttgtgctatgatggatggttggtgtgacattgatatacttgtgaccatcttatgcattcggttgattcatatgtgaagttcacattataatttgtctatgtgttgtgctatgttgatttgtgaaattgaattgtgcattggctccatatttgctatttgtgattgttatgcacatgtttagggggagcttttgcttgtcaatgcaatatatgtccatgtgctctatgtttgattatatatatttgtggtgtttatcatcaattaccaaaaatggggagattgaagcatctaggcccccggtgttaattttggtaattaatgacaagcgctaattgtggactaaccattgtctttgagctatacattttaagttaggtccacgtcatatgtgcgcatggatgattatcgatggattaaaattgacggcgcaaagcaaagggaaagaaaacggtaaaactagcgctttaatttagaattgatcgaggtgtagggcgatcaaatttgctagtttatttttagtttcgccgtactattaaaaggggtaatgacctagcaaagagatgattttaattgccacattaggtcattatacatttagacttgtgctcacatttcacacacacacacttcactaggttcggcttgaccaggggtggtcagaccggccacatagtggcgatctgactggcgtgccctggccggtctgaccggccgcaagaaggcggtctgaccaacgcataaggccggtctgaccggcggcacatgcgcggtcagaccggccccctggaggccgggatggtgctgctcgggatggccgatacagagccgacggagccgtattcggtcagaccgagccgatggcggtttgaccggccaccccatgtcggtctgaccgaccaggctgatggggccctctgacagggctacaacggctagttttctagccgttgcagagtagcacggtctgaccggccacatacctccggtcagaccggcagagcacagagttgggggatttcgctcccaacggctagttttggtgggtgggagtataaatactcccccaccagcagcaagggggctctcttggcacccaattcaattgcatacaccccttgcatctctctcacactcacttgagctttgtgttcatccatctagtgtgttagagggttgtttagccaagagtcaagtgcatttgcttccattgtagagctagtgtggcatttgatcatctccacgccgggtcattgcttgttactcttgaggattgccacctcctagacggcttgtggaggagttgcccggtgacctctccgagaagattgtgaaggaggcccggcgccggtttgtgagtggtttgggttcaccaccttcggagtgaaggaagaactaccctggtgatcgaggcttgggtagtcctctccgtgggccggctcccgccttgcccaccccttgacgaagggggcgtgcggtggcttcgtggttgagcggtggagttgggctcgcctcaacggggagtaggaaaccggcgagtttccgaacctcggtgaaaaatctcttgtctccttgtctcatttgattgtcgcatttacatttgtgcaatttacatttctagagacatactttgacataggagtgtgatttactttcctagagatataattgagccactatcaccctaggtttgcaaaacataacttagttgcttagttagagttcaccctcaccaagcctagcaacttaggttagttttgattaggtgttatttagttttaaatcgcctattcaccccccctctagtcgacatctcgatcctacaggtggtagtaattaagatagaaaattaaacgatgcatgcaacccaattatcatgggagtacctctcaaaaaaaaactcatgggagttaattggtttggggccggcctcctcgctgggctagactcacttgataggttgtggtctgcagaccgaagctacatctagactaatcacagccttgaaaataaaatctaacgggggtaaacaattctggtgacgtggatgcaccacaaagtagaaaaatggtattaattatagttagcggggatcaactttaaaggaatataggataaatggatggagcaccataaaacattattggttgtgtagacttgacggtgccactagctctgtcactgccatgacctattgaatcctactacctaggtttttatattttgggacagagatagtataaagcagataaaaccttataattgctcaaaacaataatatggatgtctcacacaaaaatacaaaaacacaacattccaattgattaatgtatggctgataacctatagataaataaaagaagagacaacaataatttataggtacaatttttatatatgtattatttgtgattgaaaccaatgttgaaaatagactacgagaaactccctttcctctcctcgtccacacaaaattaactttaaaatcaagtttaacattaaaacttagttgtggttgataaacatggttaaatgatgttacgacgagagaggaagattatacgtatcaaaagttttttttcataaaatattaggttatacctaatgccagatttcttcaaaatatgaagagttttcttttctattctataaaaatctctttaaaacaatatatactacagacaaacaaatgacttagttattttttttgaattgattttgtaattttttttcctccaaaacccttctaatcgcatttcactatagaatcgaactcaggcggaagtcctggagggcggagaaaatcctgagcatcacaagtcgcgacctcacagggaggggcggcggcgctcgccgtgaggcgcgggagggggcgcgctcgcggtggtccacggtgaagtgcggcttgctcgccgtggggagtgcggtgaagagtggctcctcctcatctagcagtctctgctccagtcgtctggttccccccgccagccgccactcgcgcatttcgtcgaacgccttcgcctccatcccctcccaccaatcaatccacgtgctccagaaccctaaccctcgtgggggcgacgggggagaggttggcatctggcgatggcgtgttgctgcctccgtgccagcacggcgccccgcttcctcctcttccgcgccgccgcgcggcgagccccattgccggtcgcggtttccaggaaggtacatgctatagcgcccccttctcttccttctgatcccttttccttggggagtgcacgaatcgaaaacaatcagcatattagctagacgcaatgaggtttggggcagcgcacagccattccaccaatgcttcaatgacattgccaatgtttgttgttcatcgggccactgttgtaatgttatgctgcaaattagactatccaaacatttttttctcttattatagatgatagttattcaagggttatatacggtcacactgtcattcaatccaatgatttgaatgtaagataattaatgttactgaaattttctatgtaatatcagggtttctcggaacagtccgtattgccaatcacagacatgatcgagaattttcaaggaccatccatggagaacattccacgaattccattatatgatgatagcttgccctcaagcttgttgacaacttctccgaatcctagtgatagtgtagctcatgctgacccttcaaagagtagaataatgcttgttgatggaacctcagtaatgtacagatcctactacaagatattgggtaaatgtttcctgattctctttgttacatctgtattggtatattatgtttggcttctcctccttatcaaggtaaatgcatgtttagaaaataagtgttttgatatttatatttaaactaaattccactggcatgattaatacatgggaactgaacatttttattcttcctataatgtgaaggcacaacagaatgttgcaatatgtcctagatacacacagacacatgcacaaagggcaaaagaagttgtacatgtgcccacacttgatgttttatttcatgacatgaaaacattttctcaatttattctcataatttgggcatgatcttttgataaaaaaaatatgggcatggttttttgtggtttaacttctctgctgctttcctaccctgagaacacccatccattatctcagtatatatctgtcttgttgaactgtgctatgctgtcatagcatcttataagcagcagaaagtttcattattggtttccggtagtatgttcctttctaattcctttaggataatcatgtcaaaggcactcaaacaaaatcatgttttgcaaaactaccatagtatttttctgcacaaaactggttcagctgctcacattaaagagcactaaaatccagggttaatttggagttaggtgcccaattgcattaattgttggattcaacagctttattttttttcctcatgtatgcagcacagctgcagcatggtcaattggagcatgctgatggaaatggagactgggttttaactatatttaaagctctgtcactggtaagtatatttttttatagatttttttgtggcatacttgttaataagcttaaatttattcatagttcgttttccgggtccctttaatgatagtccttttttttggttgcttcacctaatgttcgtctgaaacgcatcttctaggcttctagcacaatggtcttcatctgtgtttctagttaaggttgactatggtacatgtgtttgtattttgttctcattacaaatctatcatcgtacaagtaggaagtgcaacattgttgaagtggagaaatattaagcaacgtcttttgtagataagcaaggttttcaaactgctatgttgcaaaacgtggattgggtagtgaaattttgacacacatgctgtctttaagtggcattgtttaatgaaccagcatgagataagacttacttgcgatgaataagtgtgatgacagaagatacacttttttctttagtatgcttgagatgaactgttggtatttggagttgttggaaactgatgatttactaaaaacatcgcctgtttgaaaaaaaaaggagtatatgttagcctcataagtttatccccggttgacatctgtcctttgtggatcgttatagatttttatcatgtggcggtgttacaattcaacatgttaaccttctgcctctacacagaatcttcttttctcgttgtaatattttatgacatgcgttcctttgttgtgattccacttgattttgtttataacatgtgtgatccctattataactacattgctttttatatctccaggttctagatatgctggagttcattccatctcatgcagcggtacgctcatcttttttgtagcctaaaattatatggtcttgttcatatctgtcatttttctcatggaacttttgttaaaataaagtgttttagaacattgttggatgaatcatagagaatttttaaaacccttatatataactaagatcacagacaccccttgcaattccaatcatatttcttgctaacaaaatgtgaaagtttcatgtctatccttaggaactggggagcattaacacatggtgctaaaccatggtaatgagaagtgcatataagcaacttaaattgtatgtttagcccataattaaggattcaagggccaatgcgccaaaggagtatttattttaccattatactggaacataatacttaatatttccagaatatttagaggttactggcttactgctaggaaaccaataaccaggtgcagtgtaagcatcatttgtagaaaccacagtttgtttctgtatgtggttttatgttttatgcctcttagcattccttttccttatggtactttgaacacatatgcaggtggtgtttgaccatgatggtgagctttttcaattggataattctcatattcactgagtaaactttcactttattattttagtattttgctgtgattgtttgttgattgctctctgcagcaaacacttggtaaatttttctctgtaagctttgagcatacgtagcatgagatcttgtcctgtctgcaacttgttaaatggcaacggatggtggcagtggtcagcagtgcctgtaatgg

SEQ ID NO: 10199 - DNA, 6287 bp, Oryza sativa
cctaatccaacaaatgtagcttaaatatttgccttgcagtgtttttttacaatgatcagttaacttactttcagaattatttttaaaacaaaaaaaaagagtcaagggtgacagggttatctcataccatattaaactacaagaaaaatacaaggataagtaatacacctgtgctgactgagcgtgagatttctcagcccatttaaattgatttttttctaactcgtagaatatctttgacaccaccaattctccctcatctttctctgtgctttcgatatgatattgatgtaatctccagtcagtgatctgaggattgttaccatctgtctcgtaggcatacaatacaaatacttccttgcaaccttgaagattcccatccaaagttattgatataggatttccacttttttgccatctgatacatttactgttctcattggcgcactccttgaagtttttgtgaaagaaatatgatgcacatccatcctgcctaatacctaaaatatcaatcaaaatgtagcatgtgacagtaaatcataaaaggaacagacatgagagatatttacattgaataatagtgaactacctggtatatcttgagggtgagtataaccaaatcctatggtttcatcaacagatttaataaactcgttgataaaaggatgacgacgagcctgaccatttccaacttctgcagccagatgccagagtagatcgctatcggtaggattaaactctacacctctgggaagacctggccaaccctgcagcaatacaataagcacaacatttaagtaaagaagcaatttaacatgatgcaagcatttgtacggaagatcttggaattgctcttggcgcatttggagattttttaggagcgcagttttaaaagaaacacatggaagaggtttccatacaaacattaacagaaacagttgataccagcaagatggcaatccacataagactccctcctaaagaattaattttactcgtttcaaaggaaaaagaaatgtcctttgtagctgctattagatgtagataaaagtaatgttcaacaatggtggagggtgagaaaaattgaggagcggtgatgactgattacaaatttacaatagctgttcaattatttctcataaaggtatattccgtcatgttcagctctgaccaaaaccgcacgtccacaaaagcaaaagaacggtaacacaagaaatgcggttttcattcgaatgccggacgacaagagcaggaaaagatttacaactttacaccgtctaaccgtctaataaccacacgcaaaaatcaaaagaaacccacctgctgcgccgctccgccggaatcctccgccgccgccgccgcggcgctagcctcccgcctgcgccggaacaacacaaagatgaggactccaaaaaagaaacatctgcaggacagaacaaggagaaaagggaggcgcggcacctctccggagcgggaggctttgactccgccggcgggcggagcagccgccgccgtcgctcggcgagcgggaggtcctcgtggtcggagtcgacgcaggggggaggaggcgggccgacctccttgtccttggccatcaccgcattagggtttgagcgggaggaagcgggggtacggaggattaaggtgagatttaggcgagatgacggcggatttgatcgccggtgagaacgtgggtttggggatggttcacggtgagaaagtgaggctaatgccgatcaggttctcgggcgagctcgcaattttggcccagagcgcgaacgtccaaaatgtagcgatctggcccatgtatcattgaaaatctgctcggtttcgatggcggatctcggcctttacccaacagttctatgggccttgggatgctcgagtaggtccgagtcgtgttaattgacggcctttttgcacacttgggcagatcatgttcgaatacatgacactgcgcgcgttgttgtggaaactgatgactacaataggataatgaatgttgagttatctggaaattaaatatagatagtagctacatatagttaatatgtattggatggttacgattaagtatgtgaattatctaatggctcttactttgtatgagtggtatggcttaatgtatatttagctcttagttctagctatatataatttttgtagatagcgactacaacatcagaagttgcaacctattatcaccatcagatcaatggagccaatggccaaaattgacactgcaggtctgcagcactgtcccacttcgtatgctacagtacccataccgggatccgctacagtagtcccctgaacagcatctgctggcgatataagctgttgatccggtggcaaaagattgctgatgttgctgtagcaccacggttgctctggagtattggatcttgtttatagacttgcttggaactcattcggattacctgtttggaaactcgagatgcatcagtctctaccttggatatgctcgttcaaggttcgaggttatttcgaggttatgtcttgatcaaacatgaggtacgtcgtctggtctctgctacaaattaaaacatatgctataaatatttatggctaggaactattgttctactaataacaaagcaaatatttacttgcaccgtctcaagaaaaaaacaattcccgactagtacgaactaagacataactatatccaaattcacacctacgaagtagttccttatagaatggtgggttctatgttatacaattgaagttaccaaataattggtaccgacaagttgacctcaatacaaacaagccatcaatcttttttaaacaacttagaagtgcatattttagaaatgcatgttgacgtgcgaaacactatatgcagtgatgttgattgtgttcggatgtttgctaaacttaaccatatcaaaattttggcactgacaaagtttagtcatttgtgagaaaattaataaagttgctcatttggtttgttggcaaatctcttgaaatgtgtgtgttgctggttttcggttaccaaaattttagcaataaaccaaatgaggtatcatctcctcgccacaagctaggcattttttattacaaaaccctactctatgtggtatgttgtatcatatcattcatattttgctcctctccttcccttcattgtctccgtccatattcatgcgattccttgatcctgtttgctaagcgtgaattattggtgcgaacttggcccacctccgctctatctactgtcgacaacaaacaagccattgcacctcaatgtagaggcaagtggcctatctcgacaacacaaacattcatgtcaacctaagccagttcaacggtgaagcgcaccggaccggagagaataccgttatcattgtggaaacggttgaaagtccttctgaaaacgccaaacatgagttgaaaggtcaaatgggaggagagaaatgtgaacatgggtgagatgatacaaacatgctccaaaagagcagggttttgggataaatgtttttatcacatggatctgtgatagatgtgttctaaaatatggggtttcgtgatatctactcttatttgtttggtatggttagatcagttagagcaagtttaataactactggctccaaatcatttatagtcaatctaataactcattcatacaataattacttataaacatatactacatcattaacatatggtccacctcttatacacatataacattttggaattcgtattgcagctggatataaatttatagcccgattttcttctctcttctctcctctctcttttacatgtgcttatagctgacttgtagcctgctattgtactcgctcttaggccctatttagttcccaaataaaaacttttcaccccgtcacatcgaacgtttggacatatgcatggaatattaataaaaaaaactaattaaacagattgcgtgcaaattgcgagacgaatcttttaagcctaattgcgccatgatttgacaatgtggtgctacagtaaatgtttgctaatgatgaattaattaggcttaatgaattcctctagtagtttacaaacggaatctgtaacttgttttattattagattacgtttaatacttcaaatgtatgtccgtatattcgatcgtgacatgcaaaaacttctaaacatggccttaggtcttgttcgtttctccaacaagtcggagatgaaattttggatactcgtggcacgcttttcaaactactaaatggtgtatttcgtgcgaaaactttatatatgaaagttgctctaaaatatcatattaatccatttttcaagtttataataattaaaactcaattaatttttatattcatcttaatcttcaggagattcaaacaccacctcggtgattcagtgaatcaaacgagtccgttgtgttggtaaataaaaagcgttggtcgcttcgttggacagtaaaacgaagtcatgcgcagccagccagtccaggccgatcaaatatcatcgttggagtaccaatcaagtgctgtcgcccaggcagaaagcagagcaaaaaaaagcgctgcatcccatcccagtagtcgtttgtactcgccgaggccggcctgcgaagacgaccgttggggctgatgccgaaagccgcgcgaagccatcgtgccgtgcgtgcgggcggcgtgcccagtttttgccacgagcgccgcgcccgcgcacggcgcaccacacccaatccaccccgagccacgccctactctcctctccacaacacgaccaaaccattctctcgcctgctcgccgctgcttccgccggtcgcctctggtcgtggtgcccgcgaaatttgaccgttgctgcgccacgtcacgctccgggccccgcatccccctcctcgtttcgcgtgcccactgtccaccagtctgagagccactgtccccatcatcccatggtcccacgcccgacgctgtagctgacaggtgggtccacaccatatcggccccacatgtcggtgggaggagggctcgctttattggagtttgttcgtttctttcccgttgtcctatgcccactgccagccgcggcccaccagagacgctgacatgcgggcccggatttccccgaggtccacgaagcgatccacgtagtactactcgaaacagcacggcctcgtcgccgctccgcgagatcgcctcgcagccgttggatgcctgacatgcgccacgtgatgcgtgccactaaaccatcggctggccagagcgcggcgtacgaagagagcttttacaccgacatgtgggtcgcaccaacgcgttgggcccagctgcagtgggagtagggggcttgggaggagtactcgggcgcgtagctgatgcggttttgacaccgtgatgggcacctccctaccattgggcccttgccccttacttttgtacaaaagcccctccttttctgtattctcatatttatatcccatcaacttgcaactcttcattccagttcgcttcctccctcccacctcttctccacttcttcttcctcctcccctttcacactccacttctttggtctgctcttcttggtatccttctcctacgcatagttaagctccgagctcaggaggtaggttggtaggtttctattgcttcttctcagctgggagagtgaaaataccgaggagaaaaggcacatcaagattgtttctttcggtttcttgggcttctcttgcggcaacatgaagaagctcttcttcttcctcttcctgctgatactggccgcctcggttgttcacggcgaggacggtgagatttcccttctttctttttctcttgtgttgcttgatctcatattgacccttttgacactgactctgctatcccattcttggatgtggttgcatggctcgatctcgccatctttgctattacatcatcgataatatctttgtttattaggctagttttcttgctgcaatcctggagaccttgaatgatagcgactgtgattgggactggtcgagtgagcgatgtccctttctacccggatttctgcttgtcgtattgtggtctctggtgttattggagttgtcctgtaccccttgatggttaaagttcaccgttggtagtagctttctcttgacaatagattaacacaaatcacaaaacatggctaatcttagttaatgagttattactcctagctagagtggtctgtaatggagtacttgtagtagctacccagtcagtagtagcttttggggtttggatttgactactcatcctgctcacccttattctctgcttgt

SEQ ID NO: 10200 - DNA, 17644 bp, Oryza sativa
gcccaggagttgatgggcctcaaatgcatcctggaagctcagcctcagcatagcccatgggctatataaactctctttgcaggctttcaacaataggcgaacctgatacagagtgtcagagtcacaggaagcacaaactgaagatcacgctcagaaagaatccagtgaggtactgatcgcttaaatgcccatttgttccctcataaataagaggctgaagctaggagcaacatgaactcatcccaatcatatcggtttcatgattcaatattcaaatgaacccctcgagcagcaaatgtaaactaaatcatttttcttagtgttgacaagaaacatcacagatcacaccacaatagaagattgcaggatgttaaccaaacccaggaggcacatcaggatcctcctcatcatcatccccagggcagctaacggcgttgggctcaccttcatttggtttcacttggttatgattctcagtatttgacgactgctgctgctgagttgccatgatgttgctgcgctgatgatcactgaaaccaaatcctggtggttcctctggatcatcatcttccagctggactgcaacagaagttgatgcttttgctggggacacttgctcctctttggcattcctcttcagtttctttgaaggagggtcctgctgctgctcagggttcatcattctattgtagacagtttcagaagttcctcggatatcaatttcatttgataggatgacaccccatatctcgtctgagatttgacccattattttgctcctggttcgaaagcacatcacaataacatatcacattattgatatctagtccggtgtagtaaaaaacaacaataaagaaaaactaaaatgtagttgttcagcttacccgatatcttggtaaatcgcatcagaaagatctttcagctttaacttttcagagccatcttcatttattaccactgactgcttcacctctgcaattatgttgctgcgtagcacctcctgcatgaaaataaattgcagccaacttatacaactacacagcattaaggtcttatctggtcttcagatgtgtgcttctgctaggccagcagtaaatcagagtgaaacatgctaagcttgattaaccatgtatgctggatgtacatataatacacataaacttatagaaacacagcatttaaaacttatctggctcacagtatgtgtgctgctaggccacagtatgcaaatcagagtgaggcacactaaggccctctttgtttaggcttaggcttattggcctagacttttaagtcagcttattggcttatatgatttataagccggtggatttaatgtcctaggtttagtggttgagtcatacatctacctcacataaactaaaaaagcttctccaacctagtttttggcttaatagtgttagagtggcttatggcttcaaaaaagctaaacggaaaagctgcttgtttgtttaggcttagacttttcgacttataagttggcttataagcctaaacaaagagggcctaagcttggttaaccatgtatgctggctgtacatataatacacacaaacttatggaactacacaacattaggacttatctggctcatacctgtatgctattgggccatagtatgtaaatcagagtgatacgtactaaactttcagccttgtttgcaggcaaatcagtatgaagccaagactattataaaaaacaaattctatactctaggatacaactcttttttgcagtcatgggatgcatttacaagtttacagttgtgggatattagtatatatcatgggaacacgtttacagtcacagcggtggggtgctacaaacgtcttgggtactagttacctcttccacataaataacaatgaaggcatgccaaatttatggcataaaatgagactatcttcaaccttcaatggggttatggggcgcttgattcttcaatccattcactgtatccctttcgacacagctctacagcacatttatcttttatttatctataataatccttactatctatataagtacaatccactaattgcagttaacttaggccattcccaacccaatgactaggatgttgtccatagcattaaataagctaccacctaggatgaaagatgatgtgccaagtgaataaatgaggaaagagaagaaaaccaggtcttgcatgagacatggtttctacacaacatccaagatatcatgtgagataagtagcattaaatttaagtatgaaaaagtggtgtttgcattgaaatctagtactagtttcttgatgatgtagagtttatgaaaactatgactagtgtcttgggttggaaatggccttatggctatgaagaagccctcacgttgagccaggtcatcataattgtttcagccattagatgtctgacagcccaacggccacaccatctttaaccaatacttgcaaatttccttgtttttttacacaattagtcggttcaaattcctgcagcaacgccttggttaacccaccagtataatagaaagatatgtcaacaatgtgtaattgtgtatgcttcccaattcccaacaccaaaactagaaaacacaatgctactacaagaaaatttccaactttactactcacatggacaaagtaaaatgactattgaggacgcaatggtttcattggacaatgtaagaatatatggacctgaaacacaatttccgatgatatgaataagctggtaatcaatatgactcatttatgacgaacaaaggcgcaaccctactcacattcatatgtcaatagatgactgtataagatatgcaaggttaccaaacaatgtagtaatgaagtaaagcacacaaacagaagctgcaaaattttcttacgttccaaatttcctccgaatatattatcaagttctaaatgcgttgctacagcaacatacgattggttacattcctgataaaacttgaatcacgtagttctggtaattcatgagaacagacctgctcagagcatatacattcacacccaatgtctaaaacttaacacaagaaggcacattgcagttcgcctgaagttgagataatgcaggatgatctatgctaaatccactgtccccatggatgacttcaggaaaatcgaacccacccaatcgcggctatactgtcagtgaccccataccaaacgcaggatcaacgcaattctcagcgagggtttcaatctagagcgaccccttacagcaaatcctgcggtatacgagggggaaagtggggagcgtatgatgggagcttacgttgtccttgaccttgcggatgatggcgcggcggagcgcgtcgaagtccccgtcgtccttggcacgccccaccacctcagccctcgacggctcccgccgcatgccgagttcgcggagatcgctcatgggagcgcgggggtggagcacggctccgccgcgggaacctgattcaccggcgtacgccgccgccgccgcccttcgagttcgttgcagattggggagggaggggactccgtgcgccgccgcttgcttccctcagaaaattttggggtttcgtcggagagagcgagaggcgagaggacgagaaaaaaaagaaaagaaaagaggaaaatactcacgcggtacgtactcaagcctagtccctcggtcacatcaaaacccaacctaatcaaaatttacagtagaataatatgttatattcaatactaaattggttatttaaggtacagaggcagtacgactcaattcgtcccggtgataaaattgtctacctcgtcctggtgataaaactgtctagcgaaacaacccgtagaatttttcagtttcattggttgacaacattccctaataaatcaaaacagtttattaggaaataaaaaaaattatagataaaacttttatatgtttattcgtagtgacttaaaagccaacgctaaagagaaatggcgttgaaaacatcttaaaatcaactttaaaaattcaaattttgacttttattttggtttattaagtcaaccaatggagctctgagaacaaaagacaatggtggtgtttgaatctcttgaaaatgaagataaagataaagataaagtgtttcacgtaaaacgaggtagtaataacatgtgattaattaagttttaattattacgaacttgaaaaatggattaatctaatattttagaataaatttcatatataaagtttttgcatgaaacagaccgtttagcagtttgaaatgcgtgtcaccaaaatcttcatcttcatcttcatccaacacttgttggagaaacgataaatgcatcagacatcgaattcagaagaaaacacaacgccttcgcaattttccaagaacaacattctatcaaaaacagcacagatatcatcagccgaaggagaaacaggctagtatgatttttcttgtctaggagacacgatgcctcaactggcaatcggcaagcaaaccagatagtactgaagaattcacgtttcaggtcacatattcaatttcatgcgggatacacagagatattcacgatggctacaagctctcatattcatgtcaaatggtagatgctcgcgacttgagagaatcgcaacgcgactggagaaaaatgcaatctgatttcttctgctcacgcattcaaagtttctgtccataacatgagtgaagctctcacggctcaacggctgaaacgctctgaaatcgacttcggtatgaggctggttgtgtttgactgtttctccagcctgcgtcaagaaacgaatactgttaggattacatgtaaacatgcacgcaacatgtgcaaggggaaggcagcaggaagtaagaaccttgcaatctcttcgacagatctcattatttgctctgaacttgtttcaatcacttgtcccccaagtatcatttcatctaaaattgtatgcagctgcatttgatatttcaattagcctaataaaaatagtgattacctttaagcagtaacaatcatcactatgacacttccgttaaaaaaaacaatcatcactatgacacgagcaaagacagttgagatgaattgttgtaatgtttggtattgacgactgagggcagcattaccaaaggtgtgggcttagcccctagctctctctctctctctccgcaacaaaatttccagtgttactttttttttaccatttgtgtactaacaaaacaaactaacttactagcaaaacaatattggtcctctcttgtaaaggaccataagcatgctttatgaacttgacccttttatattcttcaagcccagcctcaatggagcatattcaaagtaaaaggatcaaaacatgagaatcactttaccttgttgaagttaaatacgatgtcaagctcacacacattcttgaagcatctgtccaatgtttcaacaaaaactgtgcacaagataaagttttctacagattaattgatctgctgcaatcatggctgataaaacggggagttaaagtgaacttaacagaagtgaaaagagctgagtagttcagcagctacccagcattggacgaacaaacagtgcatgtttggggttgggatttgaggagtagcaaaccatcaattattgagagaatgctaaatactagtaaatagtaatgtatgaacactgaaactgaaataagtgccacagtcatcagctatgagtttgaatctaaaagaggaattgatataaagaagcgcaagtgacattacaataaacatgtaaaataaggcaggtcaaacaactgaacaagcatgtagtaagatcgaacatgaacataacaattatttttggcatgggagcgtaaaccatgactgtatggttgttgccttgttggcatgtcacatgagtcaaacaattgcagtaactaataaacagtttcatcaataaggcactagattaccttgtacaagatcaagcaccgcaagttcattttcagagctatcaaagacaaaaacaaagtacaatgtggccaaatgtttgtagaccaatttcgctccctgaaagtgcaaaagaaaaggttgaccatcatgctatcatatacaaatcgctaaaaaagttgtttgtttccttgctacagtttgactgacatatagaagagaaacagacaaacagtaaatttcatgaggaagcatgaacttgtacagacgtcagttttttttcctttacttttttttttttgaagaaagtgtttgcaattgcatacagattgactaaaagtctaagatagtggcaggttacataacaaacgagagaaatcaactgacattagagcaaggagctttcaaaaattcctatgtcagttccagcatatgcttgtattttagcaagatttattacaagatcagtcttggagagggttcattaccggtccaaagattgcatcaaccttgacgaaattgctgacactgtccggccttgcagacaacactgcaaaacgtgcttcacaaatcaagcatactacgtataatcgtatacaaaaggtgaagagcaggaaagtagactgtgggtgatacatacactggaagacgccgcggacgaggtcctgatgcttctcggggggctgcatccaataaccaatccatgaagcagagaatagatagaaggggagagcaaagtggtcaaaagcatttcgtcaatcacgtaagctgctattggtcttgggtggggaaattgacccagcacttgtcgggtgggcgaagattggaggggtgggtgaacggggtagaatcgaaacctggtagctgtagaacttgaggaggcgcggcttgccctgcgtgctcatcaccatcacggcctggatcatggctgatggggatgaggaagaggcgagcgaaatcagtcgggtggtgtttggttagagtctgtaaacgcaaatggtaactgaatcaaataaaactgttaatggaatcagattcaagcaatcctaaactttgtttggcttgatggtgtaatgaaagccatttcctttattgtgttttgaatgaatacatttaacggtagtaagattgcatagcatacaaaatcttcctacaaagttttttttttttttgatctcaggcaaatttcattacccggctttagagaaaagcccaaaacagacagagtcttcctacaaagtttgggtatcaagattatgtgcatgtacatttttagatttgagcgaatacaaatgtgagatttatctacaatgatgtacagaatacaaatatgtagatacgcaagaacagaaaacatgaaaaacatcaacagataaagagaagaaattacaccagcaaaccaaacaaagtcagtaaaacagacggtttttagtcagtaaacctgcgtgatccagtcgtcaggcaggaactccgcggaggcggcggcggacggcccacctcacccccccccccctccccccggctcgccgaaaccctagcggaagctccggcgatggacgagtgcggcggaggcggcgctgctgcaaatgtggtgcccggcggctgtgcagcacaacagccgcagcacgcgctccgccacgaggacaatcttccgcgcgcgggggtggggggagcggcgccggcgaagcggagagcttctctttagatcgtaacagctcgccgctcgcgtcgcgtgtgtacaaggaaggggaaattgtgggggcaatgataggttaacgcgttcatttaaaatttgtttcaacgctcaaacactgagcgcctgtagctcagtggatagagcgtctgtttcctaagcagaacgtcgtaggttcgacccctacctggcgcgtattgtttcgttaaccaattttattttttttattgttttgtaatatatgcgcgtattgtttcgttaaccaattttttttattgttttgtaatatatgccaaagactaccttcgatgttaaataattttagtttgtattttcctagtacaagatttcatctattttgatttggtccaacacattgaacaatgtacagaacatggccatctaggtgttagcaatttcatcatttgttgattacgagtcatggcgcttattaggaaaaaaaatgtgtaaaacttttatattttttttacttaaaaactacttggaaaataaactgagataaaaagaattatcattttttttgcgagggagaattatcaaaattaattgtagtgtaagttttaaagtttaactagctgggtgacccgcgcaattgcgcggctagcacacatacaaaatttatatatttttaatctgattttacttcaaatttattaaatagctatctcattgtcttaagattttaaaaaaccaaaccttatcatccccgtgttttctaattttatagttctaaaagtcacaccagttgttatcccttacttatgtcatctcattttttatttgcttgctcgatctaccacggtttctattcattttccttggaatctataaaagttggattgtatagtttttagagtttattatctcgttgggttttatttttataatttctagaagtctcgttaaacgccgctattatacttctctacggtccgtccacttcctcttctctttattgtcattgagattttaaaaatcgaacataattatcgtttgtgttcagtttttttactttctagaagtcttgccaaaccatcagcggctttgccactgcactcctctacggctcgcccgctgcatgcactcctcaacggatcgcctgctgcatcccttctttattgtcattgagattttaaaattgaacatgattatcattggggtttactcaccttgtagttttaagagtttattgtctcgctgggtttcatttttctctaatttttagaagtctgatcaaacgttgacactatactcctctaaggttcgtccaacaccaactctttattatcattgggattctaaaaattcaaacataactatcgttaaaattcattttttactttctaaaagtcccgccaaccgtcgacggctctgccactgtactcatgtacgactcgtccgctacctgtcctttttattgtcattgagattttaaaaatagaatatgattatcattggagtttattttttttactttctagaagtcccgccaaccgccttgatcggttgcttcacggcctgcccgtcgttaatccttttaatcgtcattaggattctatttggtgttttattaatagttttagatgtcccatcaaatgccaccactctactcctttatagatctgttacttaattaatctcgttatatgttttagatgatcttttttttcaatagtctttattttttatcaccaattttagttatttataagttgtcttatttttctttttctaatttcagaatttattttatttgtatatcgaattttaattaatattgtattgtgttcttttaatatttttatttttattttcaaatcaagttgtttcaaaattgtattcgtacttgaactttctttttaatttgtctaattttggattttttttattttatacttaattcaattaatctcgtattagattcttatatggactcttctttcaatatactttatttttaatttcgaatttaagttaattttaaattatatttctacttaaactcttattttcttttcttttttctaatttccaattttaatttactttttattcctaattttaattaatctcttattgggtttttatatcgactcttctttcaatattgtttaattttaattctgaatttcaattatttttaatttttttttctacttgaactcttcttttcttttttgctaattttggattttattttattttttattttgaatattaattaatctcgtatcgagttattatatggactcttctttcaatagtgcttatttttaatcccgaatttcagttatttttaaattgtatttctacttagactctcattttgtttttcttcgattaatgtgggaatttctagtccccacaacgaacatggtgtctcctttgaaagagataataaaatatgaatagtattttatgtttgacttatttttttaatattttttgaaaactcatgtttgcgcttaaaataggatgatcaaagttggacaccaaaactcatgtttacgcttaaaataggatggagggagtaaggactaaatatggccctgtttacattccaacttttttcttcaaacttccaacttttctgtcacattaaacttttctacacacacaaacttccaacttttccatcacatcaaactttcctacatacacaaacttccaacttttccgtcacatcgttccaattttttcaaactttacacaacatatattgaagaataattgtattggtagtctagatgtggtgtttttttttccatctgcggccagttttatggtatgctagcttctggattttatttggctgcaagtctgaatgcatcaattaaattgggtttgcagtggacagatctagtgatagttcaattcctttttcacttcaaaatccaaatctacgtatgtattgaagccatccgtttgatttatttttttctatttggaatccatatggtattcaatttttttctttcccccaatcggacaacatcctagccaaatacaataaggaatcagacatgcatgcatgcatatttgtgatgtacctcaaagatcagagttactttcctatttgtatcgaatagagtttgattcatactgagagaacttttttctgataaatctacaccctttaatttaatccattacaatctaatggtatagattttttctctttttctccgattaatatgggaatttttagcccccacggcgaatgtggtgccttcttttcgagctgtcttaataatataatagatagatttttagttatggatgataaactaaggagcagaccgatgcatgtttacagtctcattttgcttattggagaatcagaagcagtaatagattttttgtttcccgagatatggcggagatcttacatatcactatcaacaaaattgttatatgtggcaggaaacagttgatggagactagtaagactaccattaccaagttcaagatcttaaacactaggctatacttcgtttgttaccagccacctaaattcatgtctttgtagtttgtaacatgaatgctactggatacattttcagccactttgcaaaaatgatatcgacatgtcagaaacacaaaccacaaaaaaacagagaaacaacaaaatacacaagtggtttcatgtcctttgtgtgtgcataggtggctgtaaacgaaatacgtatgtgaagctaaataatagctgagatgttggattcgatgttttgccactatttagattgggcaattgaacgcacgttaaaaggccccaatcagttacatatgggcatctgttcacagttacacattgagaaattaaataaaaaattgccatcaaaagcaatttccattttccttcatggacaactatatattttattatttccttttactttttcgaatggcaactttatatttttttttcttctgggctgccaaaagtaccaaacggaattatgcagtcatgcatgaagaggtgttttttggactttcgtgtgcaatgtgtgaggtgtcagttgagggatttacggggctcaattccttggagaaataaattcgtataattgagaggaaagcctcttttcaggactactagtccactgttcgtctcttccttagcatactgtgtgcataagtgaagaggggaagggggagccaggcatcttcgagcctaggagctcaatctggtaaggaattatgtccttgcttagctctgtgctcttcgatactgttcatggaaacactacgcaggattccttgtttgggagatgcttcaggtgttcagtgttaagtcagaaactggaaatcaaatttcttgttctctgattccccaaaatcttatactctgtgcaagtggggatcatgattatgattacattatgattttatcatcctcttcttccccgttccatcttatgcaggagtatgaaagaactatcaaattattcagcagtacttcatccttagtttagaaaatcaaaggggatttctaaaaggaaccttaacactgcatcctaataagttcttgagttgtttgcgagtttgatttgcttttgttaaataatttctagttatgattcttatcattggggaaaaaaattcttccatttatgtcctgtatgcagaattcatcgtagttcttgagaagtatccggtatctgtatgtatttcatattcagaatttagcaaggtgttcgtccaagaatctatcttctgctcctatgttttgtatgaataggtcataggttttcattttcatccgtcatgtcctatgtagaattcataatacatgagcagtatcagtgtcaatgacttgcacagttgtgctcggctgaaaaatttgtcatatggtgcagttcatcacagatgcctaaaatccttccattttaacaccttttctttagtttttgattgttgcagatggaatacccaaggacactcacttcctgaccgctcaaatatcccatccattccatgctctgatgtgagcaactcggttccaagaatcttggaaacatggggaaaattcccggatcagcagtcgccatggccacgccgccggagccgtcgtcttggctgagcctcaaggtgttcttcctgagggtgagcaggtgcgaggtgaacgagtccatgctggattctgtgaccgtcacccacgccccgctcaccccggacaccgtgctcgaggtgagcggcggcagcgtcgccagcaacggccacgtgtcgctccgcctggaccgcgccggcggcgtcggcgccgccgccacggagggcggcgactcctgcaccttcgtcagcacggcggacgtcagggtgtccgggagcgcgcggttcgacgtccagtgcagaggcgagcggctcgtcgtcgggatcctggacacgcgcgacgccggcgctggcggcggcggctgggtgatgaagtgccaggtcgcggcgcagcgcgggtcgggcctcgtgaggcgcggtagcaaggaggcgaagccgccggtggtggaggtgtacgtcgccggcctggcccgcggcgcgccggtcgtcttcacgagggcgatgcagctgcggttcaggaggcggcgccacgtcaaggccttcatggagcccatcccggagcacggcgagccggcggaggactccaaagaaacgctgcctccgaagcatgaaaccgaggtaaaaaaatcccagcattttctttctctccgatgaatctccgtttattttatcatcgtcgatttcttgaactgaaatgcttgagctgcaccgtcaatgtaggtgtcggagtacaggtgctacaagccggagcaggacgccggcgacgccgactacgacggcttctacgtgaagcctgcaggcgaggaagacgacgacggcgatttctcgtggttcaccgccggcgtcagagtcggcgtcggcatcagcgtaggcatctgcctcggcatcggcatcggcgccggcctcctggcccgttcgtaccactctacgtcgaggagcctgagaagccggctgatctcgagtctgttctgaacatcaacattgcatcaagatcactgtccatctcaaaattcagatatccctctgttggagatggactagtccagtgtgtgtgtatatatccttgttagtatagttgttactaccgtcgtagatagatgagatgtgctatctttggcactgttggttcactggtttatacttatatgatcaggcattgtcaaattgagaccctttcatatctacccagatcgatcaatcgatgtcattgatcactagtgcatctagtctagagccctatgttgttagactaatttcatttgaagattgcacaagtctattccgcacggttattacttgatgcggctattcttgaagattgtggcgggcatcgccggccggcggccatggcggtctgatagtcacatcgctggggagggacccaacaggaatagcgggaaactcaaggggctccaccggaaaactcatccgaattggtaatttggtatggatcgggcgatgccgtcgctagcaatggtagcgacccaacacggatgggacaagacacggcccatcgttgtttgcggacggcaaggggggaggcgcgccatgttattgggctcgtattcggacactaatacgaaggaaaagtacaccgaaggtccctcaacttgttgtcgagttacaaaatcatcccccaaccgcaaaaccagatatccgacgtcccttaactaatcaaaaccggtgacaataagtctttcagtagttttaaccccggttttatcccacatgtcggaatgccacgtcatctctctcccctgttctcttcctctctctccgcctgttgagcgcgagcgtgaggctctccagtactgagctgcaggcgagcaaaagtgggggaagacgtcggcgccgcgggggaagcaaccgctcctggagcaccttgagggaggatggtagctcgacggcctcaagctcaccggcagagtcggaggagagcggcacctccgtactccgatggcggcgcggccgccttcgaggaaactgccacataagcgccacgtagtatgccacataattgaggagactgcacactgaaactagcccatacgactctttgtgggccgaaactgcccagttacgcagcccatgccgtcgagctgtcggcaaattgaaaacagttttgctagcattgaaaactataataaatttgtagtggcaaatttagacttttcctcagcggtcaagcgggcccacatgcagtgacggagagctcgtattagtggcctccctcaatctctgtgttcacgcatgacagccgcatcagttgccgcgctccaacgtatataaaaccatcacggatcgttcaagttgtacagcaccgtcatcgtggatggcaacgcgcgtcgaggacgaggaggaggcggcggcggaggagagagcgcccgccgcggcgttgctccgccggatcatggcgcccatcgcatggagggcggcgcccacggcggcgtcggcgtcgtcgtcgtcgtacctggtcgccgccgaggccggcggggtggagaagatatccatgctgtccggatacgagcgacttccgagcgtgtatggcacggcgttccacgacgacgacggcggcggcgcgtggtcgtcgtcgtcgtcgccgccggcgtgccctccccgcgcggccaggctgctctggggggcgctcacccgcgccgtccagaggcctgggaggtgcaggtgccccggagacgaggaggcgggggtgacgacgaccaaggagcggaggcggtcgtcgtcgtcgtcgtggcggccggaccccgacaggcggtggccggtgcagggctggagctagccgtatttgaatgtatttcttggggaaatttgaatgtattttctgttggtttgatgactgttcaacgaaattcagttgcaaatatgaacataaattacgtcgcaaccgagactgtggttagaccggaacagaggccgaatctacattctgttcgagcccatctcttccatttggaagcccatttcagaggattgatctgctcaagcaaattgcgcgggtagatttctgcagctcgatcagcgaaatgcttcccatctactcgtcccgtgaatcttaccacgcaagttggcatgtgtacatgtaaatgttcagatgctatgctttaccttgtgacaaagaccactgctactcctgcgcaatagcgcaagcttcgctttgaggcgtgagttacagacttacagtaatacagtgcacatcgagagcaagtgttgccatctcaaagagaaataaaaggaggtgtttacacttcacagtgtcaggtaaggtatatctcaatcagaacattgctatgcttttcattttcttagctacaatctccctgttcttttccgagtgttactacatgataagaatatgcagctaatagcaaagttacaaaaagaaagaaaagttacaagcttcaattttgtactacctacagtaagcagagacctgtacatcatgaattgattatatgagtgttagtactaatcaaatgacactgccaaaatgtactgacacccacagtcacaagcttcaatctgtgagttctgaaccctggtaaggaatatctgaaactgacctttcaacagcaatgggcttttgacctgtggatcccaggatttcctcccagcaactgccagtacaattgtgcagagagacgagctagcacacacgcaattaaatcgtggcagtacgattcaacgagcggttaagtgttcaatttacgcagctgttcctgtcctacgggtgagcatatataggtgtccgaggccaaggggattggagatgcccaataactttaggaatttttttcattgctcactgtccagatccaatcaaagcactgaaggctggggaacttgagacgtcaagctcaacattgattcggttcaagcccctcataatttgcagatatattgggggggtgggtatcgtgtcatctctcaaggaggttactcgttttgggagttcgttgggggtgtgtgcattcttgttggatatgcacagcatcccaaagacacggacaccaaccgatcgatgctgtgatggtttgaagctatggattattgaaaatttatagatttgccggcgtgtgcgtatttttaatcgcttcttcattcttctgtttttattcttgttcgggcaagattggtttgccgatgctgacggctgaccgccaaattaaacatgcatgataatgccaaaatctgatcgttttggatgcatcctgatccatgtctgcctgctcccagaacaaggccactgcaaaactgaagatgcccacaacgaatcaaagggtaaagaactaaagatgccaagaatctcttgcaggttgcagctgctgcctttaccctgaagctactacacagccaaggcagcaacaaagccaaaaccaaagcaagagaccctttcggtgcttatctactgactactgtgttgctgtgcaaaccttagctgaccaaacaggaagaaagaaatccggacgatcaaacaatctgacttgacaacagaacatccctgtgcgatgacaatgcacgtacaactacaacggtataattgtccttacttttctgcacatgatccgagctagtacgtacagtatgtactagctgggtacattgttcgatcgatcgatcgagcgatgagcaggcaggcacctcaccttggtgtaatttaattcgggggctgtacgtgttagctcccatttcgcatcacagcgagtagctgggctaaagtagtggtgacatgatctctccgccaacgaccagggatcagggatcagagatcagagaggcagaggccatgcatggccgcctctgcttaattgcgagtccacgcacggtcatttcagcccttatttggatagctgaaaattcaatgagattttacgagacaatgtgaatatgaaaaagcttatctattcagcttttggttagtttatttttacagttttataacttttgattcttccaatcttg

SEQ ID NO: 10201 - DNA, 34535 bp, Oryza sativa
accatccccgttgccgtctcggctcctcgtccgccgccctcacccgtctccgccccacccggctgccgtcgttggtccctcacccgccgcctgcagccgcctccgcgcctgcctgctgctggcctcggctcctcgcccgccgcccgagcccgcctccgcacccatccccggcgccgacctcggctcatcgcgtgccgccagcagcccgcgcccgctaccgcctcgcctcctttgccctcgccgccgcctccgctggcggcaacggctgcaggtagaacctctccttcactggagggcagtggtaggaggccaagcttgatgggcttggcggccttggtgagcgctgcctgcgcgagggcgccgccggtgatcccagtggcgacgaggccgagcatggcgcagcggctggtctggacgttagcggcggtgtcggccgtgacaggcgtggcctctgatggaacgctgatggagaagagagagagagagagattgggagagagagagactgacaggtggggcccacctatatttttataaatgaattgttgactggactgccacgtaggatcaaaaccaccgtggattaagccagaggggttatttgtccggtttgcaaagttgggggtgaagaatgtccggttttgtgattaaggggggtattttggtcgaccgcgatagttccgcggggggagggggtaattcgtactttttcctttttttatgattaattataataccacgtaaacgtaacgttagatgaagattaggtcacgtgccacgcatgcacttgtaggatgaaatcatagtctcaaccccttgtgagaccaagacgggtcggttttaataattgatggagcttctatgtcatgttttgtggttgaaggacgataatcatactgagatgatagagagagccatctttttttttctattttgcaatttgttggactggaagtccatcttttatgcggtgcagccgtgcaggttctgccatctgccgttcagggagagagagagagccttagggtccatagagcgttaagttacaaacaaagttcgtagaagtaactaagtatatgtcagatcatggattcgacaaatcttggctatacgaactgaattaaacatggcaaagtgtccctcacaaaaaatgacagtgaaagtttatcaaacagatgcattatcaaccgaaattcgccccaaaaactgttcggtgccttactataaagaggtggtggtttgatacaagttgatgcgaaacataaaaactagataggtatcccgcgtattgctgcgggagaattacgtgataatatagagatatgagttctaaaattttctttcttacctattatacgatttattttcatgtgtttatatattttttgtacctttatcaattatcctaaggatggttgtatggtgtttcttttggagggaagagatggaatttacacccctgatgaatcatccaaaggctaaaaacaattgagatgatgtggcttcatgagagaagagagaattagcattaactacatttagtggagataaactttatagatatataggatgtgataagataacaaggtgtagcatggtaattctctcagcagccaattcacaaaacaaaaacaacagaaactctcacatcatattaaaaacaacacaaactcttcaatgcacaaatcctccgggctaaacgccgcgcaactgctaaaatggaagatcaaagcttcctaatcctatgacaacaattttctttcttgtgctagtcatattccctttgctgatacatacatggaacggaatgcaaagtagtatatagctgtgtaaagttgcaaatgaaatcccctggaatgccagtgctgcatctgcatgtatataaattaaccgggtgttcttcacgagcgcacaccgttggggaaggacgcgtccagccatccacccttcttggcgcgctcgacgtagcagcataactgcttgccggcgtccggcacgtcgagcgcgaggtcgtcgacgcagccggccacccgctcgaagcccttggtcatctggttcggcgtgatgaggccgcggccgtagcactcggcgaggaggccccacagccgctcgtccttgccacgcttctccatgatcgccaccagcgccttcttcaccacctcgtggtggaagaatggcatcccgagctccttgatgcactggcacgcctcccggatgtcgccgccgcagtcgtactcctgcagcagcctgccgatcttgtccttcacgtcgtccagctcccacccggccttgccggtggcgccgccgccccagcaacgcagtatccgctccgcagagagcttcgcgccgagcagggcacgggcgttccggagcgccaataagccggtggaggatccccctggcttgccgcggccggcctcctcctccattttctctaggttcgatggcgcgatcacctcgtcgaccactgacctggcgaagaacatggtcaggtcctcgacgatggcggggttgtccagcgcggcgtcctcggcggactcgatcaggaggtggaaccccgacacgacgtcctccggcggcattccgagcgaggacagcagcacggacgccatctccttctcgcggctcttccggtccatcgcggaggtgatcagcttcttgacgaagatggcgttgtaggaggaggaacacgcgtagttctcggcctccaggctgctcatcacctcgatgatgtcccctgtcaagaagtactcctttatgatcgacaatgtcttcgccttgaactgccgcaccgcagcgtcgtcctcgacgacggccttcttcggctcggggcccagcggcttcagcgacgacgcgcagagccatccctccgacgaggccttcaggatcatcgatttcaggaggcgcctcgcgtttggcacgtcgagcgtcagatcgtcgacggaatcgatgaggcggttgaaccctttggtgatctggctctcgttgatgatgccttcgtcggacgccgacttgaggagatccaggatgtgcccctcggcgccgccgccgcgctccatggcgagggtgagggcgcgcttgacgatgtcgtggtggaagaaagagatcttgaggcccctgatgcaccggcaagcctctccgatgtcgccggcggcgaggtactcctcgaggatgtcagcgatcttggccttggcctcctccaccgtgatgctcttgctcccgccccacctctgcaggatgatctcgccgtggtgcggcacggacaggtagcttttctccgccctgtgaagaacctcggcgcccttgcatccctccggcaggcacgtcagctgcttggccaggaacgccggcgggagtatgtcgtcgatgatggcgcgggcgacgaacacggcgaggatgtcgacggcgtcgggcgtgtcgacggacaggtcgtcgcaggactcggcgagcttgccgaaccccttgtacacctgcggccggtcgatgacgtcgccgtacagcgaggacagcagcacggccgccatctccttctccctgtcgtggcggtccatggccaccgagaccagcttcttgacgaagtagtagtggtagcacggcacgcgcagctccctcagctcgttcgccgtcgccgcgacgtcgtccgtggagaagtactcctccaagatcgtcgtggctttcctcttgaactgcatgaactcctccgacgacaccgtcgggcttcgcagcaggctcgcgtcctgatgacaaattaaccacctcgccatgatagttaaaagaaaaaaaacgcagaggcaaaatcaacgcaaatacggatctacctcggcggcggcgcattggatcgccggcttgtgcatcgcgggaggaacaagatcatcaggacgggactccatgggggacatgctgcaactcgttcaaactcaaaccatccgagttccgcaagctgcagatgccccctgctgcatgcagggggagacacctgtaacctcggttattcttgacgtggcgtccaccaaatgcatgcaggcgccacgatcctcaacttgttacatgtacagaaacgatcggtgatgagaagaacaccagaattattccgccccgagttgtcgagatcgagaggctgccgtgttcatctggtattatttgcctttggcagggacagctctagctcagggagcgattgagagagagctgtgaggagcgagggcagcagaggccatggcttttatgtgttcggttcgagcctcccgagcaagcaggaggaagaatggccacaccatgcaaatctctggaccgagtcactgggaagtgggcccgggcgttccaggtacaggatgcaggcgtggacacggtgcatgccgattaccgagatgggaatttaggcagttggatccgatgaaccgggtcgtggcccccgcgggaaacggccgagcggttgaatcggtctctgcatccgtgcatatcaaccagatttggagttgcctattagccgcatacggcggatgcgcgtgaattttcgtgatgccggtgtcatgctggattccaactcgatcatatcctaagttcgaaccgagttctaattgaaaccagtgtgccaccctatatacgaaatttttatactcacgctctgaatactagaaaactctctgcactcgttcaatcgatcaagcaattcgcttccatggctgttttcacacgatcgtaccccatggacgtcgacgacgagttagccgatgatctcgaccggatcagtgccctccccgacgacttgctgcacgtcatcctctccatcctgggcgacgcgaccatggtcacgaggacggccgtgctctcgcggcgatggcgacgcgtgtggacccatgcccagaagctctcctttgtcgacacggatccgaaaatacgagccaagccaggccagttcggtggtttcgtggactgggcactcgcccaacgcggcgatgctaacatacaatctctcagtatctccatgcccaccagcgacagcgccacgccagagcagatcaatgactggctccgctacgccatgcaacacaccatcaagacattcaaactttgttcgccttatcattcaagctatgagacggatgatgatcacccgctgccaattctcgagttgcccagcaatgcgaggacgacgtccatcgagctaagactgtcctcttttcggctccgactccctgtatatgcatatacacgatcgaacaagcgttcgccatctcaggaaccttggcctacgcatgcgcggacagtactcgtgcaatactgactacggtttatggctcctcaagaactgtcctaacatcgagcatttagacatatatcttcgacacatgttctccatgaatgggctcattgacctgatggacaagggcgcacctcgtcttcacaaagttaggagcatggtagtgaaaacatcttacttgtggccggaacatcgttttgtgacatgtgtacggccgttgctcctgatgtgtcctggcctaagatcgttttgcgtcaagattagtggtagggataaggtgagttgatttcctgaaatatatatctagtactatgttgttctctatataattagctactatatatatgcaatatcgcatcctcaaaatacaggcggcttacattaatgcttttctgttttctttatccacagataccactatttgaggacccaaatacattggcgagccaacccaacattaccatggatttcctacatgaggcaagtataattggcttcacaggaacagatcaagagatgcacctcgtgagtttcttgtttgggtgctcaacttcaatcacgtgcatgactattctgccagaatgtgatgacaacgacgatccaaaccgtagccaactactagaaattccatttactgggcacggttgttggcattttcaaagagataaatatacgtggaagcgaacgcaatatgaaggtgcacaagggaagagttgtgcatattgagatttaaccatccctgtccctccaaccgagagaactggtagacacgagggctcgtttgttttgcgatgatgcatcaaacatttgggggaaatccaaatgttgtccatgaagacctatgaactaccatatcataaagaaatagacgtctgaaatttatccacatcactatgattaaaacttttattcacaaatttaatgatgagtaaaagttttacaaagagtaaaagtttaactcatggagatatggataaatctcaaatgtttacggtagtttatatgtttgcactatatatgtggtttgcatcatgtatttgcttcatttgtatcatatgcatcaagcggccctcgtgttgtgtttctagtatagtttgttttcgacataaaaaatatgtaaatatactcttgtcttgggagttcagcggacctttgactttttttttcttagcaaacgaaatacacatagttcaattggttaggtctctattggttaggtttctagtgatgaaactcgtccactagagtctctgatatttatctgccgcattgttcgactagtataaatggccaaatgagccacccagcccggcccaatctgagatcaattaggctggcacgacctaacctacacgtcgggtcaggttgggtccgcccatgggctacaccaatgacccagacatgacccaaaacatttgggccgggccgtcctaaaggcacaaaaactcgtgaaaacccattgtgcttctccttgcaataagtctattgtttctccctcatctctttgggccgtgtcttatatgactagaataagtctatttgcatccctcttctctctgggctagaccttatatggctgaaataagtctattttgtctcccttatcaattttgactccgtgatcattggaccatgccaggctagcccactgttccaaggcagagacccggacacgatccaacttttgggccaggccagacactagtcgtgtcgtgccgtgtcgtgcctaagccaagcctagggctaggccgtcggtactcgggtcttatagctatctataccgactgcttttactacgccgtggcccgtggatgcgtgagggggtgagatgggatgcggagaccggacggctgtgtcctgttcaattccgatctgcatgcccgattggatgctctagttgggaactcatccgattccccagttgtctctctacagtataaactcgttaatcgatcgatcaaatcttgattacgtaaactgtgcaggaatttcgctctcatggcaactttcgcacgtgctgataccatggatgaccacgacgatccagccgatgatctcgaccggatcagcgccctccccgacgacttgctacacatcatcctctccaatctgaacaacgcgactacggtgacgaggacggccgtgctctcgcgacgatggcggcgcgtgtggaccaatgcccaggcgctctactttgccgatatgaatcccaaacgacgacgggccatcaagccaggccagttcggtagtttcgtggactgggcgttcgctgaacgcggcgacgctgacatacaatctctcactatccacatgtcctaccgcaagagcgccacgcaggatcagatcaacgactggctccgctacgccatgcgacgcgccgtcaaagctttcaggttttattacttttcgaacgcacgtgatggtcaggacctgcagctgctgccaatcgtcgagttgcccagccatgcgaggacggcgtccatcgttctatttctgggttcttcccgtctccggctccctgcgtccccggcggcatgttacgaagcgctgacagagctgaaccttcgctgggcgtcgttcgacgaggaagagggcgccagcgccggcggccgcaccctcggcgacttcttgtcgacatgctgccctcgcttgcgtaagctggagatgtcgagcctgaagctgttgtctcggctagttctgcgcaccgagtcactcgaagagcttcgcatttcctacgcaaacgatctacaatcgctggacgtgacggcgcccaacctgcgcgtcttcacccacacattctgctggtacggtttaactctcgatgacatcaacgcgcggtcggtgatcaaaatcgtggcaccgaggctggaggagatcgccatggacaaccaagtgttcatgaacactccggatttacatatacatggcttgaaaagcgttcgccgtctttgtgaccttaacctaacggtgcatggacaatactgcagcaaccgtggctacggtttatggctcctcaagaactgccctaatgtcaaacacgtagaccttcttcttaaatccagcgtgttcaccacggacgaggagcttgctgatctgacggacgagagcgcaccccggcttcacaaagttaggagcatggtcttgaaaacatctaagttgccgcaccaccattttacggcaagtgtacggtcgtttcttctgatgtgccctggcctaagatcactctgcatcaacattactgaaaggggacaggtgagttaattttccagaaaatatttagcaccgtactactattctctatgagatttgctaccgtccagcagagggaggcggtaccaaatcctagccgtccgttgggacagatcaaacggttgagattgctcggtaccgtgcggtaccattagctcttatagtggtaccgtttctttaagagaagtggaagggtagtatagacttttcgcatgtaagggcgagacgccggcctccagggtgcgtggtggggtgttgatggcggcaccagactgtgggttccagacccgatgtcgattgcggcggtaggtagcgaggtgcgctgcggggccagcatcgatggacggcgaggtctggggccagcgttgatggcggcggcggcgagctgcggggttcaagggttcaaggtggcgtgcagcctgcgagatccagccccagcttcgacggcggtggcgagcatcagggtgtgtcacaaggctagcatcggcgacgacgtgctgcgagatccgatcccggcgtcgatggcagggctgcgagatccgcggccgtgtgcggcatgtgtggcctgcgactctgcgagatccagtctcggcgtcgatggccatggcgggcggctgcggtggcggtaggggcgctgccggccgcgacagcgaggtggccgtggagaggtcagactaggtgccacggcagcggcgggggtgttggcggccgaggcagcgaattggtcgtggagttgtcggattaagcatcacgccagcagcggcgagtcgtcggaccaggcggcggcactggcggcaaggaagaactgcaaagacgcgcatatgagggaggaaataatggacgcaagcatgcagcggggtccaagaatgagaatttttcttttttgacgaagaactcaggaacgagattaattgactcaatattgggagagatttttactcattcccaatcctacccctaaacattggatagccagatttgtttcagtacctagtggtactggtaccttgggtaccaagtgctggacagtagcaaatctcattctctatacgtagtactagctgtgcacaaaattctctctcttaaactgcctacgtgtttttacgtttttcctacttttctttatgaacagatatcactatttaaggaccgagatacattggcgaatcatccgaagttaacgttggaattgcttcaggaggtaactataactggcttcacaaggacggatgaagagatagacctcgtgagtttgctgtttgggagctcaagttcaatcatgagcgtcaccatacatgccactgaaaaggaggatacagagaaagtctcgttgaaaaatattatggcagaagatgatgacaacgacgatgatacaacaactcatcagcaactactggaaattccatttactgatcacggctgttggcgttttcaaggagatgtatatagctggaagcgatacacaacagaggacgcactgagtgactcagtgacaagtggtgcctgctgaaatttaaccaactctctgtctcagatagagagaattaaacatcagagctatagcccactgttaactctaatttatctatagtcaatctaatagcaaattcatacaataattgcttgctatactattcatatatggtcccacttatcatacacacaccacgtcttgaagtccgtgctgtagttggctacaaatatgtagcccgctgctcttctatcttatcttttatctcattaaaatatgtttatagttagctaatagtctgctattgtatctgctctcaaaggctagctagctattcggttgtgttgcgaagtcgaatccaacatttgtactatgctgttggggcaccattgcgttcgatttctagtatagatcgatattctttttggcttaaagattatgtacaaatcttctcatattctgatctttgaatcttgaaattttctgtagcaaaactgaataaaaaccttaaactggcgtggtggtgttgtgttgatcactcgctcggccgtgtgcgctttatccgtgctgcccaggaaaactcttttaatcaccggggtttatacatggcctgacaagcgttcgccatctccgcgaccaaactccattgattcatggacaatactgctgcaacactgaccacgtcttatggctaataaagaactgtcaagagcatctttcctaggtaccacgaggtattatgaggtacgaggtaccctgagataccaatctaatctaaccattggtttagcatggatatgatcggcctaacaaaaataaggtctcctctcttccatctgctcgtatcaggttgtccgtgccggctgtctgcgccgcgccgccgtcgcatcgagcccaccgccgcctgctgccgtcgcgcgaatatgaggttgctgtcgtgcatcgagcccgccgtcgcgtgaagatgcttgagcagtaggaattctgaaggaagatgaaggttgtccaatcgaagatgcttgagcagtaggaattctgcaagagatggaagtttcttccaatttatacaacttcccaattcccaaatctaagctaataagatttttcacataggcttttgcaatccagtatgggattttagcaccagcataacctgaaatctttaggttcttcatattagaatttggctcaaggttaccaagaatgattgaacaatcttctctgctgttggtgccatcatcctctgaccattctagagataatgagccgagatgtcgtttttccttcagcttcacattcttggcttcgcattcgaaggtgctttaactttgccagtttgcccataaaatcagatgtgtggaacaataccgttttaaacagacgcaaagatcgtgcccttggccatatctgacaccctcgaccacgggggcggccggatctggtaacgaggtgacaggagtggaggcgctagggaaggggaggaggagggctccataggatgaggaggagcggaggagacggcagccgacgacatcggcgtccatgctcgaacgcgaacggaggagatggaagccggcaaccggcggcatctgttcaccgtcggtgggagagagaaggggaaagcgacgtaccgtacgggagaggcgggggagatcgctgggttgggtgttattgcgaaattaccatcttaccggctaggctggtcctagctgatccagcagcgtcttcggtcgctgggcctggaaacatgggccggaccacaacgggtaaaggaggaggaaaaagtacatggaaggtccctcaacttgtcatcgagttataaaatcgtccccaaccataaaaacagatatatgacatctcttaactaatgaaaaccggtcacaataggtccttcggtggttttgaccccggtttattctaggtgacggctgaatcagcgtgtgatccatgtgagccctacatataaggatgccatatcggcccacactctctctttcccctcttctctcccttcctctcatttttcccctgggcgtcgctggatgccgccgccgctccgctccactctaccggccgctcgactcgcgatcgtacgtctggccgtttgccacgacaacggggtcgcgcattagatcgagagagattgggcaccggaagtccgacggcggtgccggggctcgatttcttgtatcagcgacagcacgctcgccttcagcgcctgctccgcctccggtgccggcgagcaccgccggcactggcgcgacgcgagggcgaggacgtcgagcacgtcgtcggcgaggcccaggcgcccagctcgacgaccggcaagaggtcgagcagcgtggccaggtcgtggttgagctcccgtagctccgcctccatctcgtctgactccagcagcagccgcatccggcttcgcaccgagcaatcggcgacgatcgccttgaaccaggagcacctcccgcaggcacagcgacgccaaccgcggcaactccccggcggcgccgcacagcctcgatatctatatcagctccccggcggcgccacacactcataatgcaaatgaaaacattcagttcagatctatatcagctttatctgtcatgaattctcagaagcagaactggcatggtaagctgaaagtttgtttcatcattgccaaaccgccaaatctaacaaagtaaatctaatgaacgaaaacacgaatattttagaggaaatatgataactgaatgtatccattacgctgacacagaccaatcacgagctcgaagcatcatgacctgcaacactgaatggcatggtggatctagcacagtcattggggattcattcttcaaaggattccagtccgacaagcccggggttagcactgtgcatgaacagaacagatataaacagagaagagtgagatttttctaaaacagggtacaagaaaagaaactagtctgcatcaagaaaaaattgtacgcaagcaacaatcgtattgcctactggagccatggcaacagaaatgatttcttgacgcgtcgatctatccccttcttgcaaagatggtgacaccacagagatattggttccccaaccttaacaggagcaagagaggacgattcaaaacacacaggaaaaaaaccatataccatcgatccatgaaaaaaaaaatcaaattgaacatgtagaaggcaacatgaaaacacagaccagaaagaaaagataaaccgcggcgccccgcaggtcatccaacgcggccgccagtagcttagaccgcctcgagatggacgcgaacgaggcgcgcaggaatggcgcgggtgtgtcgacggcggacaggtcgcgtgccaggcggtgcagcgaccggagcagctccctgtaggacggccgctcgcacgcctgccgccgccgcccgcccgctcgctgcagagctcgtccgctgcgcgctcgcggccgctgccgctctgctcgctagcccgccgctgccgctccgctcgctcgcccgccactgccgctctgctcagcccgccgcgcactcgctcgctgccgctcccctcccctccgtcggccgccgcgtgctcatccgcctcctcgggtcgtctccatcgacctcctacgtcatgtcccggcgcaggcggaggcagcgccgccatcaccgccgccgcgtcgcccgtcgccggccgccgacgccctcctctcccgccggcgtcctccccacccgctgaccagcttgcgcagagtggtgagagagagaaggaagggagagaagaggggtgctgacgtggacaccctgacatgcggggccatatgagttccacgctgactaaataaccacgtcggataaaaccagtgttaaaaccacctaaaatgtaaaataaacggttttgtaagctgagagatgttggttttgtgggttgagggatgattttataactctcgcggcgatggcggcgcgtctggattcatgcccagaaactctgcttcgacgacgatcggcaatcgagatggaggaggttagccaacttcggtggtttcgtggactgggcgttcgcacaacgcggcgatgccgacatacaatccgtcatcatcttcatgtcccgcctcgacagcgcgaggccggagcaggtcaacgagtggctccgctacgccgtgcggcgcgtcgtcaaaactttctggttcaatgcctgcgattcgacgccgatcggtgcgtggtgggcaccgccaccgcgtgaccatggccaccagctgccaaccgtcgagttgcccagctatgggaggacggcgtccatcaacctcaacctgtcgtcctaccccttccggctcaaactcccggcgtccccagcggcaaggtacgaagcgctgacagatctgagcctcagctcggcgtggttcggcgaggacgaggccgtcgccggccgccgcaccctcggcgacttcatctcgtcctgctgccctcgcctgcgtaagctggagatcatcgatccgatgcggttgccccagctggtgcttcgtgccgaggcgctcgaggagcttatcgttgcatccacgcgagatacgcagacgatggacgtgacggcgcccaacctgcgcatcttcgaactccactacttcaacagcatgacatcagtgacgagctatggggaaagcatcgacttggtggtcagaatcacggcaccgagactggaggaaatcgccataaacaactccaccctggagatcgaggacaacctggacctgcggatacatggcctggcaagcgttcgccgtctcaaaaacctcactctagcgatgcatgggcataactgctgcaacaccgactacggttgagacttcgatacgagatgctcgccactcatgaggtcgatgatctgacggacaatggagcacctcgactttacaaagctaggagcatggtcatcgacgcatgtggattggatcaatatttggtcacaagtgtgtggtcgttgctactgatgtgccctgatctaatatcacttcgcatctgtttgagagggtgggggtgagctcatttcacttctagtaatttatttaattagcacaatataacagctctatatatgcaaactgcacccctcaaacacaccggtaaggcgtcgatctgttctgacgttttctttacttgtatttactctccatctacagagatcgatcatccaaggaccaagatacacggacggacaatcgtaatatatcgttggaatttctggaagaggtaagattaactagcttcacaggaacagatgaggaaatggacctcgtgagattgttgttcggaagctcgagttcaatcaagagcatgactataagtacccctgaaaaggaggtagctgataactgttcgggagactttttgctagattctgacgacgactatccttattatcaccgactgctgaaaattgctccactaagtcacctcagtcgttggcattacaagagatttgaatatacttggacgcgatatgcaacagaggacgcacgagcggtggacgctgaagccaattctcccagtccaagaacagtgagggctgtgaatattggaaaaggaaagaaaaatcaaagctagctagggtcattcttctgattttgattgtttaagtttgaatccaaaatgaatatttaggacattcaaaatattaaataaaatttgagttttcaaattgtcagggttacggataaggtataccctctacccttagatgtatgctatacggcaatacggtatatcggtgcatatacggacgttctctgaacacgctaaggaaatccatcacgaagtctaccaatggaaaggttcctacccgtataggactgggtcgttactatatcgtgcaggctccaatgtctccgagtcctacttggggaccgcctgacctgcgatataaaagggaccccccgggagacctaaggcatcgaatctcatagccgacacaacgaccacagcctacgaagccggagactacaggagccaagtcgccgagtgatctagtcgaatcaactcgactacgatctcgtcggtactaccgagttctacttttccctttgtaatatatggttctttccatataatcccatatcaactggattagggctattacctgctaagaggtctgaaccagtataatctttgtctcttgtttccttaatgtcgtattacgtagatcctcgtaccagcgtaccccaataccctctatatccggtctacgggtacccaccgtcgacacaaatattccttatgtcttcacggtgtatttctttagtgctatagatgttggttcatttttttctaggaatttggttaaagttaaaaaaagtttgatttagcataaaactaaaatgacttgtacaatatgaaacgagagtatccaacaaagaatgaaataaaacacaccatatgaccgcaaaatacccagtaaacaaaaaaagttcactgcttggctattagctgagatttcaaattctccctacttaattatctagttgatattcaggaaattcctttttttaagtggaagtgtggagtatgcatttcatgtgagatagcagtccacggaaataaatgggtcttccaatgcgaagtactaggtactaggttttgtttggtggattggcccatgaaactctcctccctcgcatttcgccatttctcgcatcaacaatctgagggtcacgccgtcgccctgcccgcctcattatcctgtcttttcccaaaaccctcgcatccgtcggtctagcaaaccttagctagaatgaagctcgttgcttgttacccacaagaggagccaatagaagatgggtgccgaaaacactagttcacgaatgtgcgtgaactagacatctcgcgatcagttttccaaccatgtagtgacgagagctggggtagggttaggttttcggggatggggagggggaggggggaggtggtgctgggggagggtaaagtaggggatcggatttaaagggatcgcctgagaggtggtgcactggtggtgggttgtcacaccccaatctggcaccgccgtacaacggcaactgacaggagcgtatcgtaggaataacggcgcgaaccgcttcctacgaaaccgcaatctcagtactagtcccaggacatagtgctggtacccatggtgacaaatatgaatcattgcaaatccttaaaataaatagaggatttatttaccttaacttaggttgcagctcagaaaagcccgagaatgcaaccgacgacacggacgaggaaacaccaacaacagcagcagcagcggaaccaacggactaacacccatctccacaggcgacggctgggagccaggacgaaaccctaatcttcacttcacttcatcttctcttcagggcggaggaactatatatatttatttatatagagcaagggtgagtactttcgtactcagcaagtcacgggaatttaggtgtttaatgcaagcttggaagagaggcgaggttgttttacaattcctttgtttgaaatcatttttgaaatcactaagtgctttatttctttttaactttgggtcgaaaggagacttgcgtctcgattcgacttaagagatgcttttcaacaactcaaatggtaatgtaccgacctcccgggtcagatcattacttctcaactcccggagccatttcacttgattaaccggctcccatagcctttttcattttctcggactcccagagtctagttgcccagcagcacaacaatccgcttccactcgggaagcctagtctatgatgtccgcagacatcccgaatcacacatattcgtttctgaccactcaggtcatccatctgccacataggctgattctggttacgattcccacaccacaacaacttttcacaaagcacaggcaaacaaatctacgcaacgggaaccacctcacatccgcccatgaccgtgggcgcggctgttcgaccagttagttaacctctacagaggggtacattttacccacaagatacgaacttattccgaacacccgtcggtatcggaggttcgcaacaaagcctttcccaagccgacccatggatacctcatgccacatagaaggatcaaatcctcacataagtataggccattttagttttcacaaatcaaattccaaccacctcgatcggtaattcagcaagcttctcttccttgcttaccaggaacctggtttggctccaaccgaccctgttcccaactattggcatgcgaggtttccctgaaccgactagttacttagccagggtgtcccattccaccttgtggttgcactttgattatgctcgataagtttcccacaggaatcggtccttatatgcgaatacgggacagcgccacgtaggcacaacccccgcatcgcgagttttcacaattcattttattttcaaacacaccgacaccacatgtcgggttttcaaggcttctcaaactcatttcccaaattatcgacaatcgatggtgtctgtggagtagttggtatacgtgctcagagagcacggataccgaagtaccacaagggtggagcgacaaggaataagggtagtacaacctacaggaattagtgtgactaatgggtaggtccgtcggtttggcacgcaaaccgaggccaagcaagttaagtgtgtgattctaatgctgcaggttgcacacaaaataataatgattttccaattataggagcaattggtcaaagggtgacttgccttgctcaaggtgaagatgaagcttcacgattcttcgagaaaacccgtgatcgacgaaaatccggtaaccgcgactatacgtaaacaatcgaaaacctaaacaaaagaccaaaagaaacaccctatttagactaattaatagtgccattagatagatctcaattttacggaattattggaagtggaacggagtcaatcggagttacggatcgagagatatgaattttggaagtttaattggaatatctggaataggagaaatggtttatggattttatagaaataatattctcaataatattattggtagtcattgatatgtgggaccaaaggaaatgattcatggaataaagaattgatttatggaacgagggaaaaggatttaataatccctttggaaaagaaaaggaaggagggatgataatcagacttccttgggcggctcgcggcgcggcccgaggggcttgcgcagctcggccgagcctaatgggccggcacggccgcgaggagggcggcccaatggggcgcgggagggggaggagaccgaccgggtggaccgcggtccaccacgcggggtcccgggatggggcccacatgtcggcggcttggctcacggtgggggaggcgcatgcgggtagcggcgctagggttcggtggggttggtttggggttggtgcaccgggtggacggagaggaggtgggcccacgtgctgccgcacgccttgtcgtggaccgcgagcacggaagggaaaacggagggaggggccgaccggatcggcgtgaccgggtcaagccgacgtggctgccacgttggcaagcgggaggaagacgaaggctgtgcccgagatggacggcggcggcattcaccggagcaaggcgcgacctcaacggaaaaaggaagcacaccgggaggagggatgggacgagaggaagcgattcaacggctcggatgcgacggaggaggtccgacggcggcggattgcggcggcgaccgtcggcggcggaaaaagaggggaatcgccggtggtcaacgagggttcgattagaggcggcgggagcatctccggggctcggggagctcattcctggggtcggatgggacggaggagtcccgagtgaggccggcgacgagcggcggctccccggaacgggcggcaatcgcgacgagaccatgccgggcggcggcggggcttggggcttcgtctacgcgcgttcgggagggctaccgagctaccgcgcgagccaaaagagggagagggcgagcgagaagggagaacggagagagacactaccgagtcgagacgggcgctgtgatgggcgaccgacggcgcggggcgagctctccggactcgggccggggaaggggaaggagagggtgcccgtagtcccgcgtcacgtgtcgtcgcacacaccagcttcaccagcacgtgcgacggcggagggaggcgaggtcggcgagcggcagagatggtccggcggcaatggcgcggtggaggttgggcaaggaaacgaggaggaaagggaggggctcgagttgggttttataggcggtggtgatgtcggtttggggaggaaaccgacctaggcggtcaaggagaggagctggcggtcacgggcggtgtcgggcaaagtggaaaaaggagggggaaaagggagcgcggttccttcccgatttgagcgagcagagggaggaggaaaacgcgcgtgagggagagagaggcgctgcctccgcgtcttggacgcgagcgcacggaggtggggcgagcggcagggcggcatgggcggctgcgcggcgcaggcggccagggttgacgcggcggcgaccgggcggtcggccacgcgcgagcgcgcgcgtgcgaacgcgagggcgcggccggatttcgaacggcggcggcggcaaagcggccccggggagagagagagagagagagagagagagagagagagagagagaatcgagcgagagaggaaggagacggcgacgctctctcctgctcctgaacacgcgcgacacacgtgcgagagagagacggaccgagagggagagatggaccggaaagagaaaaacggcccagttgaccaagagggaggcaaaatagacttttaccgagagaactgatttggagggtttggagcttggggtttgaatttcaaatggggatttggttatttttggagtcggggcaaatatttggcaaggattcaaaggtagttagatagatcaatagataaatagacagttggatacgtagatcgataggtagagggatagatggatagataggttagataagtggatagatcgatcaatggatagggagggattcaaggtgagggttcaatattttcttggaatcggtaaagtttttggcgagggttcaggggaatagattggatgtttgagtttgattttgggaacttaaatttggaagaggaattctgaggaggcgatttttttgacggcgacgagagggatcaaggacggatttgaattaagatccacggcacgacttagactctcacacagagaatggaattttcgcatataggatttttgccgaattagtttttaacgcctcacaaaaagcggagcgttacatgggtggcgaacaagggtggacgagaggcgacagcgaagccatgggacggtgggccagtattggtaacgggggtaaagcgagggaaagaggatagtgaggaggccgggtggcggcaccgtaagtggaaagaaatagcagcgtgcgcaggaagaatcaaatcttcaacttgcaatacacatgtgcgcgagctatcacctcatttcattttcttatatatacaattttacataccggttatagtgttacgtgtagttcaaactagctgggtggcccgcgcaattgtgcggctagcacccaaacaaaattatatattttttatgattttactaaaaaaattattaaatagctatctcattgtcttaagagtttgaaagaccaaaccttatcatccccatgtttctaattatatagttttttaaaagtcacaccagatactaccccttatgtcatctccttctttatttgcttgctcgatctaccactatttctattcattctccttagaacctttaaacattggatcttataggttttagagtttattttcacgttgagtttcgtttttataatttctagatgtcccgtcaaacgttgccattatactcctctatgacccgtttactgtctcttctctttattgtcattgagattttagaaatcgaacataattatcgtttgggttcatttttactttctagaagtcccgctaaaccgtcattgactttgccattgtacttctctatggctcgcccgctgcctcccttctttattgtcattgagattttaaaatcgaatatgactatcattgtttttttttactttttagaagttccgaaccttcaaaaattgaaccttgtagtttttagagtttattgtcttgttgggtttcgtttttttataatttttagaagtcttgtcaaacgatgctactatgctcctctacggcccgtccgccgcctactctttattgtcattgggattctaaaaatcgaacataactatcgttggaattcattttttattttctagaagtcccgtcaaccatcggcagctctgcaactatactcctatacaccccgctcgctgcttctcctttttattgtcattgagattttaaaaatcgaatatgattatcaatggggtttattttttttactttctagaagtcccggcaatcgccttgatcgtttgctttacggcctccctatcgcccctccttttaatcgtcattaggattctatttggtgtttcattaacaattttttttatgtcgtatcaaccaccaccactactcctttatatgcctgttacttaatttatctcgtcatgtgttttagatggtcttttctatcaatagtctttatttttatcacaaattttagttatttataaattgtattcctaattggaaccttatttttcttttttctaatttcagatttttttaaaaaaaattaattaatatcgaattgtgttcttttaatatttttattttttattttcaatttcagttgtttcaaaattgtattcctacttgaaatctcttttactttatctaattttggatattattttatttttattctgaattttaattaatctcgtatcgggttcttatatggattcttctttcaatattgcttatttttaattctgaatttcagctaattttaaattgtattcctacttgagctcttcttttattattttttttgctaatttcggattttatttttatttttattcccaattttagttaatctcgtattaggttcttatacggactcttcttttaatattccttatttttaattctgaatttcaactattttaaaattgtattcctacttggactatccttttttttttctaattttggattttattttatttttatttcgaattttgattaatctcgtattgggttcttatatgaaaacttttttcaatattccttatttttaattccgaatttcagctatttttaaattgtatttctacttggactctctttttttttctaattttggattttattttatttttatttcgaatattaattaatctcgtattgggttcttatatggaaacttccttcaatattgcttatttttaattctgaatttcagctatttttagattgtatttctacttggactcttcttttctttttttctttttctctgattaatgtgggaatttctagcccccacatcgaacgtggtgcctcctttcaaagctgttttaataatataatagatacaaatacaccataattacatttagaagtttttaactcagagcaattgtttaatttgatgtcaaaattaaccttaccaaaatttggtattgtcaaaagttggcgcatttttatagtaccaaatgttgatagcgttagaagcgtttagtttgtagccttatcaaaatttagtaatgctagtatgagagaacgtttatggaaataccaaattttagtaaggtgtcaataacaatagaatgttcggtttgttccttaattttaataatttgaccctttgagaaaacttatcaaaattttagtaaggtgtcaaaaaccaattttaaaaataggccggcaaacttgaacctttgcttagaggcttactggcacttgctccaagcaacgatgggccatccgtgccgagcccaacgagctggaccacaaagcccattgtcgtacggtcttttctccttttcggtaaggccggccgggctgcgacccatcgctaccagccacccgtgggcaccactggacagttggggtaaatgttcttattcttccctttttttctgaaccaaaggagcaaaaaaaatgtttcctgtaatcccgtgtactgcagcatggcacactccgtttgcatcgctgcatgcgggggcagaaacagccaagggcgattggatcttcacttgacgcgctgcatgatttgcgtcgtcgtttgcttcctggccattgcgatcaatgcctatctgtatctgaccatctgccattccgcgtagctttccgacttcagagcacccgctcttccatatatcgtggatactctcttcaacagagccatgatgttggtgcgtgcgagtggtacgtggaaaaacgggcgaaagaaacggagtatcagctgaggcggagtactacgtggatctcaaaatctccacatttcggtggcttcagaatccatatgatggtattaaaatattttcgatttgtttagatcgaattacaggtgcgagcgtcacgcgcgcctagcctttccactggccagcacgtgtgtaccattgcaaagcacgccaagacgcaagacgcaagacgcgtgccatgctggcggctggcttgctctatctcccatgccagtatcctgcaagagacgttgacatgtacgcagacacagtgcacactcaccctctcgagaaagcttgtaaaaatacaggcagtcgctctgcttgttcggatcgcgtattctggatttacggttgaaattgtgtgcgaagagtgctaaacgagtaatgggagccggggagaagtttctctgattcgcaccggcttgggaggatttggggactgtttggttggttgtccaacactacctaagccagccaaatatttgtggttaagttgttaaagctgtgatcaagaagccacaccttaacctttttaccatatattattatgtctatgatccaaatgtgggatcaagttcaaggaaagtttgatatgactaactcgtagttagaaccaaacactgcactaaactcagtaaaacatccttatcatacttgtggtaaattgaggcaaactttggtaagcaaccaaacaccctcttcatgctggattttccacaatttgaactttttgaaaaacttatttcgcaaatagacccttgaaaaaacttatcccgaaaatggtcattttggggcgtcaaagtagctggcgcagtcctcctaccaccgtggcggggcggcgctgaggtggcagggggagcgcgccaatgtagctggcgccccccttttttatttattatatatttttttcacacttaggagcacataagaaccaaccataaaaaaaataaactcaaatagacgaagtatgtgacctatagaatttttcaaagctctaccgaaaagcttctcgcctcgaaaacataatcttgcaagtggaatttggaggttttaatttcctcgaacccagcaaagcgggggagaatcggatgtaactttttttttaagatatccgtggatatattatttgcctgattccaagtccgtatgagaaagttacgactgtttcaagaaatgacacccgaatgtaacaaaaagaaacacgaaccctaactttttttattgtttataggatgtgaaaaatgtaaaaaagtctaagagtgttcgaaatttaatctactttctttggggactacaggaaaaaccaaaacaacgaaaagcagggagaacgcgggggagggggggtcttttcggtatagctttagaaaattttataagtcacatatttcatctatttgagtttaatttttgtatggttggttattgtgtgcttctaagtgtgaaaataataataataataagttgtacatatctctcctctacactagagagaggaaaaaatggggggagggaggggcgccaaccacattggcgcgctccccccacctcagcgctgccccgccacggtggcaggaggactggcgccgtcgtattctggcgtcttaaaaaggattatttttcggataagttttttcatgggtttatttatgaaataagattttttaaaaggactaaattgtgaaaaatccagctcttcatgcgtcgcacgcgccagatccgttagcagggcaatgtgagcattcaatccatcgtgcacacgccagtagtgcaaaaaataagcagtcctagtacaagagaagatcgcgtctagcactctccgatcacgatgtcacgcgaggtcacgttgctgtgtggcccgtggcatgttgcaaattgtcaaaactcaaaacctaaccaccaggagatagctagcactctctcgctggcttcagggatcacactctaatcacggtcattaatcccactcatttccatggtcataagatacgtgcagtactctgttgttgttgttcctaccaactgcagcactgaaagtagcttttcagacccttgcagcacacagttttacagccgcgccgattttgttcgttccgtttctaggagtagcatgactcagcgagcaatccgttgccttccacgtgttaacctatatttcggactctgtccagaactccagatgcgaaggcgaaggcggaggatttcggctagcttggtgatgctgccgttcgcgagcattttaaatacggtgtgggggcgttcctcctaatggcgaccctactacttattgcttgcctccccacccggcgcccccatctctctttgcgccaaaggtaatccatccatcgaatcctgcatcttttttgcttgtgccttgtgttgcaaagcagtcttggattccttctgttcgcattgccctgagagttctagttcgatccccaactaagagcgttttgttttcgtttttcttctgttcgttcgttctttcgatctgcagatcctacaaactcgccccccgaataaccatggcgtcgtcttcgtcgtcgtcgccgccgtcgtctgacccgtccttggagacggtagcgccgcacgcggctgttacgggggagcggaagctcaaccccaacctgcaggagcagcttcccaagccatgtaagcgattctatttctaccatgcagggatcgaaaaaaaaactgttctttctttctatctttctttttctttctcgatcgtctttgatgtctttggtcagtggtcactgaacactgataacctgataagagagtgagaggccggagttggctgcaaagcacgcggttgtgcgtgacggcagctcgacgtacatcagttgagacttgagagatcatatggtttaagtaccaacagaaagaatgtgtaattttaccatttaatttctctagatactacgtatttcgatgtactaaaatttttaagtattataaaatcttgatatctcaatgtactttgtcaagtaacgtaaaatttctgaaatttctcagaaagtatacatgagagcagtagcaccgctagtgctttactggtactgcatcatctgttacagtgcagaaaaattactaccgctccagtaactgatcctaaacctgatgtcgtaaccgtagccagctaactgctgctgtttttttttctttctgggttcgcgtgcgcgcagatctcgcgagggctctcgcggcggtggacccgagccacccgcaggggacccgtgggcgcgacgcccgcggcatgagcgtgctccagcagcacgccgcgttcttcgaccgcaacggcgacggcatcatctacccctgggagaccttccaaggtgagtgagtgagcgagcgagtgagtgatccgcccgtgtgtcttgctgtggatgaactctccacgtcgcgatcagtccatctctctctgctgctgctatatctgtgtcccgtttcggacaggcaaacagtttgccttctaaggttgtaattaagcttgacgcaacagaagagattaagagattttagggtcgcgtgttaagtcagaattatgcttccaaatcaacgattgcttgtgcagtgcagatgtagtatgagactttgagtatatggtatgttttgttttttgtttttcacagggctgagagcgataggttgcgggtatcccgtgtcgattgctggtgccatactcatcaacctcgtcctcagctatcctactcaaccggtaaagtttgccctctgtactccacgtgctccttattttcaatactttttaccaacatatatgccgtgccttttgctgtattgccaaactgtgtgatcatatctggactaatcttacgtcaaaaaaaaaatctggactaatcttctcgattatgatgtaaagaaattgtataatgttttttagggcgttctgaattttatatgttggtctgaatgttacaccaccttcttttgtaaatgtgaagaggtgtcactaggctagtgaaaattgaattgtagtgacttttgtaagtgggaagacatatctatcttcacttcaggctttggatttgatgtgtttttttatggaggggccaacatgtacagatgaacttatgtttactttctttcaaatgcaggggtggatgccttctcctctgttttccatccatataaagaacattcacaagggtaagcatgggagtgactctgaagcatatgatactgaagggaggtatgtaactttgtatacataattgttaagttcctctctttgcctagaaacgattacaatttctatctcgtttcaaatttctcactaatttatatgcttttactaggtttgatccatcgaaatttgatgctatattcagcaagtatggcagaactcatccaaatgctttgacaaaagatgagctgaactcgatgattaaagcaaaccgcaatatgtatgatttcattggctggtaagcggatggttgaattagcagtaccgttcgccatcatttttttttttcagttacaactttgctaattggttcttcctgcaaaccatcacaggattactagcgctggtgaatggatgctactgtacagcgtggccaaggataaagaagggctgttgcaacgagaaactgttagaggcgccttcgatggcagcctgtttgagcgacttcaggacagcaagaaatctgcttgaatatagcaatgagctgtgctgctcgaagaaagcgttgacagtaaagaatctaataagattagaaaaaaaaagggtctttgctttgtgtaattcaaatgaaaaatgttaattaccccatgacagtatttatgatgtttgcaatgatcaccacctcatgatatagtcttgttctttctttttgtatgtgcatgttccaaatttaccctcatttatttttaaaatcaaggtgaagttacgcttgttgattcgtgttgcgcttatttaagcgtcatattaacgtatttgttccggaagtttaaacatataattctccccccaaaaaattgagctatatctgataaactgagaagggaccataaaaaataatttataggttaaatttaaaataactccaaaataattttaaaatttttagtgttattagaggtttaaaagccaatgttaaaaaataaactacaataaaataattataaaacaagctgtataactaaaatttaaatttaaattttggttgtagttaataaatcaataaggagactatagatgatgatgggaggcatgcacaattgtttcaaaatagtaaactccaaattatgtattgtaatgcacataagcactcctcccatcccaagtctcaactatatagattttgctaaattgagttcgaatttgatgcgtccaaaatgtgttatccggcaactcatatttgagatttcttttgctgtataatatttttttattaagaaggaaaatccatcgaaggacttgttcaatttgttgcccaaataaagtataccaaattttggtaatgctaaatgacacattttagcattattaaatttggtaaattttaagagagagcttctgaaaatacctaaattcgattatggagggcatgctgtgtgttgtcgttaaatgaacagttatttttttagtttttgttttggtgtatcggagctttccagaattctagtcacgtgacatctctatattaatgaaaaatggaggggcgtcgcccttttgattaaagaaattctaaaatttgatactcccagtcaaactatgttaaatttaattaagttttaaaaaatacggtaattttcaacccaaaatagcatttatgtgataaatattgataaatttgtctttaaacttagtaaatctaaataagtttgacttagaaaaaaaatcaaaacaacttgtaacgtgagacggagaaagtactaggtagtaatggctaaagtaagtttagtttattatctaattttgataatattaaaattcggtaaagtcgaaagtgataacaaaagttgccgatcatccgagccgttgcgagcttcaactgaacggtcaagcgtgttcggttcgtctggtttagctcccctcactggaacacctctccgtcgtgaaaaccaactgccggcggcgtggaagtcgccggcgagttcatggccgccgcgctcatcgtccccgcaaacccaaaccctactccaaaccccacctcctccctccgtcccccatcgcgtgccgcctccagtgtgctccgcttcccccgccgcgaccgcgctcgaacccatctcactgccgcgtttgggaggggatcacccgcggcggcggccgagcgcggcgggaaggactactacgctacgctgaacctccgccgcgacgccaccctgcaggaggtcaagacggcctaccgtaccctagcgcgcaaggtgctgcacctgcactccccccccttcactctccgatgtcatgtcccctcgaagtgttagattgtgtgatactgctagttttagtgtatgcgcagttcaatttatctggaattgaaccggtagcgtgatatagttgcgattgagttgggccacttgcattatctgcttgttccaacctgggtaattatcgtcttctgcatcccctgcacaatcctggttacagtatatgttaaaatgagtaaaatgactatgtaattcttggtaatgtggatcatggaaatcgcacggtatcattgcaattttgagcattttcactgagatgatctacaaattgtgtactctgtctgacttggctatactacgtgtttactgtatgcaaaaaagatgaagaagttttggcgactacctggactgtattccacagcaaagctccatgaatccacgatatgttctgcttccccatttatttttttgctgttgtaccatattttaattcctccattttttaaaaaataaagaaaaggctgaagatagataatgatttttagctccatcactgagtttgcgtatttgggcctctgcgcgttggaagattattcttcaaataagcaatacatgattacacgggacccttctgtttatggagtaaaccacaaatgtatcagttttggatgttcagtgatatccaacttatactttatcatgtgctgtattactttgttaatatgcttcttaaattccaccgatgtttgcttcaagatggagctacaaatcttgaacatacttcattggttttctttcaattcagtaccatcctgatatgaacaaggaccctggggcagaagaaaagtttaaggagataagtgccgcatacgaggtatttactgatatagactggttgattttcgacgcatcttccttgtataacgtgcggttgacctaagttctggttctgctttatgtacctttatctgcaatagttgaaattccatgaaaatagggaatatgctacatttgatgttttacaatgtttacaatgtaatttctcatagattctatcagatgaagaaaaaagatctctgtatgaccgctttggagaagcagggctcactggagattatggaggtggagatattggctccaatggggtagtcattctgttcaatacctaagttacatttttttgcttctgatctgtccaaatttaggaactgaaatttcttgtctacctgatatttttctagttaattatattatccaacctttgacaattggtgtctaaatttcatatcgtgtttaccaatttttcttgtttcccatttcaccctcagcaaatgggttcatctcattttcccaactcctgactaagcctgtgatttccattgagttctgagaaacctgcagataactagaaaacatgctgcattatattggtatgccaattgccaaatattagaatccagagagaaaatttaatctgataaagttatttaaatttgttcttcaacagattgatccatatgaactcttcaatgcattctttggtggccctgataagctttttagagacagcatgggtgctgggagattccattatggtacaaaagtcacagacaacaggggacttgatattcggtaaacaattttaacctgacactgaagcaaggaactgatacttggatgtttgtttactattttaatctctcttttgtatataacagatatgatcttctcctttcttttgaagaatcaataattggaggcaaacgagaagtcagcatttttcgttatgaaacctgtggcacttgccatggaactggtgctaaatctagcaatgacataacagaatgtactcaatgcagaggtcaaggcaggttaatgaaaacacagaggacaccttttggtatagtatctcaggtgaactatttattgtaccgtatgtattcattctcagtatttgttcaccactacaaataatctgataatatcttgtggtttctttcttcttccctggatctactacaaaccagttagtagattaagtaaaagaaaaatttgctgatgaatgatgttgtgcaattataattttcttcttctgctgagtaaatagagtataagacggcttgtggagttttcatattcattgggacaggggatgaagattcattatgcaggaagccattgtatatgaaatattactagctaaatactcatgttttgctatggataaatatgagttatacgcataaatatgaattaattgtgaggtttttagaacaactcatccatgtagatgtctttgcataataaacttgtaatttagagatgaaataacaggcttgttcggctgagatttatgctgcagcaacagcaccaccacacaagagaaagcatgaccgctgcagcggctgcgctgtacagctatgcggaacaaggccaacatagatacaatatgtaccaggactattttgtaatgtgaaagtacaccaagaagtagtaggtaaaaaaaggagtaggttgggtatcggattcactgccaacaccattgtcttctttcaggagagtaaagtatatatatattctaaatgttctcacccttgacgtgcaaaagttcagctgtagtatattcagtggaatttcaatgtcatcattagctgcatatacctcataaagtaatctgttcttcaatgtttactatttgctcagggtctcctactctttgtttcatgaaccacaacataaacacgctttaggtaatatctgtgttgatatattctgcagatatctacttgcttaaattgtgatggcaaagggaaggtaattactgaaaattgcactagctgctgtgggtcaggcaaaatccaagttgaacgcaatatcagggtagacatacctggaggtattcatgatggttctgccattcgaattaccagaggaggtagcgttgataatcaaaggcaagcactgggaaaataatacataaccatgtaattcatgcaatctttgttgaattttgtatgtttgatttaatcatacagcattcaaaactatcctacatttttctttttgtttattgtcggagtgctcagaataaaaatgagtaaaactgcatgtgtagaaggtacttccatcccagtcagttaattcatcatagaacactaaatctcttataaacattcctctcaggaacttatatatttatgatgtattaaaatatattatttgatgttatccatttcatcttattgtgcaggcgcgcaactggtgacctatacatatttgttcatgttaataaaaaagaaggcatccacagagaaggcctcgatctgttctcagatgtcacaatagattatactgatgcaattttaggaaccacagtgaaggtgagctgttaaatgtggctccgttcatattatgcattacatagcaatgacatatatttatgtaatgctagcaggtagcagcagaactctggctccagctttacctagaaagagtgtttcttatttcaggttgaaacaatagagggattcaaggatctttatattcctcctggcactcagcctggggagcggctgaaatttgctcaactgggagctccagacattaagaatcctaccattagaggagatcataattttgtgataaatgtgaagatcccgaagagtatcaggtttgagttgcgagtattgttgtactttgtgat

SEQ ID NO: 10202 - DNA, 23811 bp, Oryza sativa
attcctgcagcccccctgtccatggcatcttcttcctgcaaatatttttatgggtcagaaactcagaatggcaacttttagcaccaataataaatgtcctaattaagtctagcctagttagatatagtccaccattagtggtaatcacgtacatcctcttcctcagcctcttcagcatgctcaaagaaacttctgatactttcaccctttgtaattgtcacaaaaccattccctaccaccagtctgtggtgtacgcacgattggccctttaaggcatgtgctttaacgcacagctctgtgtaggtcccatcaagcttccaagctctcaaagttatgaaatagtcttcaaactgatcaagattaataccatctctgtggacttgtacattcatcccaacatcttcaaagccgaaaacatcagattgcccttcatctgtcccaatggcccattcaaaatgatgataagatccatctgcctctgataaagtttggcgccaatcaattatgacagcatcctcaaacacctagaaaatagagaagccacatgtaacttgaatataactcagaagctattgaattgaagttagaatagtgaagtgggcatcgaggaggcaccctgacctcacactggaaatcagtgtctgcaacacagaaccaactggtgcagcgaggttcccttcgcatgcgtttcagttccttcagttccttgaattcacggataacattccttcggcaatctcgacagaatctcttgctctcaaacctattgacatttgtattaagaaaaaataaaatcaatcctacactgatcaattgtcagttgctggataaatacaaacaaatagatgcattattggcaaaaaaaaaaatccctacatatctaggtagatcatagatagctatcagtatatgaaaaagaaaatagcaggcccttattgtatttgcatcagatagctatgatcgttaatagaattcactgaatatctgcaagtcagttatgaactcactagttcaactatgttactaataatgtccatgagctgaatgcctattcaggtcaaaacaacttgttatcactaatttaaatttgcatgatatggaggtcaacttcattatgctcacctacgcataagtctttccatgaaatcctcctccttcatccgcagaagagataatctagtttcttcactcaatgctgaccagaaatccaccagtgtatcacatgaaaggcgagcagtatgcagagcacatgtttctcttgttccataccccctgctataactagctaggcgttggctaatccatcctctgccactgccaccacatgcatcaggataaagcatctctctttccctttctcttgcccgtgcattatcaaatacctgattaaaccaatgttgaatgcattaaggtataagctaatcaagtaaacctatcctgtactagcattgaaacttctaggttaacttaactccacaaacatgacttggaggttgcttaagaaaaagtaacagaagggatcaatataaaaatcagagcaaattagttattaattgtacaatcgccaatgaactacacaaaaagagacatgaatcccaagttgaaaacttacattctgaagcacccgcaatgattttgcatttacaaagcagtcaagaagcgtaaggatgccatcttttgttgctacaaggcctccccaaggatgaactgatgggtcttcttgttccccttgcctaatccttgtttctccagttgtgttcagacgattaatatccgaggcatcacgctgcagtgtcttcccatacatgactatttgcatgaaactttccagaagcaatccattgcaccttgaacaatacaaattcttgcgtgcttgctcaatgagggtttgcttatccaatttgagaagctcctgtcgcgcttgaggaggcaagccattccagaactgaaacaagtttaatccacaaccatgacatgctcagttccctttgcaacatggctatcacaaaaacctccataacactaagacacacttaaataagctatttggtttgctttccagcacaaagggaagtgctactttaaagtcataaaaacaataaaatccagtataatctactgttcaacgataaaatgagatagctctgcagtagtttaatgacagtatcaatcaaccacaactctaatcaagactattggagcatcacattttaagcatcagaggtggtgcatcattggagatgcttcaacagagctgcaaacaaaatatctgtgtgccaaaatggggaaagaagttcaaatatcgttatgtcttatttagcagttactcttcaatcaaattatatttacaactatactagtttatcagcttgctccaatggaagaaaataaataacaggatgagcaattgaacaaatatgcaaggcatgaaatttatgattgaagagtgtgtacaatatgcatagtttgttgataaggtcagaaactcgtaaaaacttaatagagttagaaagaaaaaaaacattctacacgagccaatggcttgctttcctaaaattattctgacagaattttattttcctaacaagaacattttcatacatcagatttcatcagcataacagcacttacaggctactcaaataatcatgaacgacctaaaaccagtccccaacttttttacttcatttcaaatcaagtgccccatgctcttgcaaaacgaggaatgactgattcaattccaaaattcatacaggaagtaatcggtaacactattttgccccccacgtttatataccaaaccaggcgtacaaatctacctgccaccatagcttagagcaatgtaccgccagaatcagctcaaagccagtacaatcgagcctatcagaagtcaaaattaggatatatgcccatgaccaagtgcaacccgattgaatctaagcatgaaaattcaccactcaaatggactcacaagcttagataaaacaaaaacagatcaaccaaacaacctagctttccccgacgccatttgcagacaactcttctgcgaattacgcacaaacaaaaaacgctaatccaacccacacgcaagcaactgtctcagtccgatcctcggataacaccaccatcgattcaccccgaattcccaccgctcacatcaaacccagccccccgaccagaccaaagtcgttgcccacgcgagcctaccttctggaggcgatccaacgtgatctcgtcccgccgccgcgaccagatccccgatcccgacgccgacgccaccgccgtctccgccgccacacccggcatcacgcccctcaagcctcccgcagacgccctcaacacaacgacgagctcgcccccgatccaccgcccatccaagtggccgccgccagcgacgacgcagccggaggtgacccgccgcttcgccgcagcttggccccgggtccgatcggccgccgccggtggctagccgagtgggttttggctcagacggcgagcgagatgggaggaggggagcggagcgccgaggcgagacgaggcgaggcgaggcgaggtgtgggggtaaaaggcgaggagaaggggaggagaaggggagggatgaaatgggggagggaacgcgacgacgccgtacgctttttaaccgccacggttaggccccgcggtgcgagctgcgatgtctggaacatgggtttctagctgtttcgggatttttagcgggattttccgctgtaaaaatcagtttaaccgaggcggcggttcgctaatttggtgtcaaatgctgtcgcgtgacgttttcctcgggtggctgtctttgttttcttctttttttttattttagttttatttatttccttttgtgggatgatttctttttggtatttggtatggtgtgtgcgagtagctagtactatcttgactatatatcggagctatttttcttgtatgtttttaattaaaccgtatggttggtatgtctagttggtctaatatataaatgagatgagttactatattgttttcatttctattttaagcatgtcgctttgaggatgagatggtgatgatgaaacaacactctattcaaattcggtcattcagagttgaatttaagattaaatcaccctttagttgccttctgcaaaataaacaattcactcccaaaatcctaaaactcattaaaaactaaacaacggtttttcgtctattcatggggaagacaccaactgaaaataaccagatttactgaaaagacaccaaccaaaatagccaagcagagcccaaaaactttctgctctggactttttcaggcaattacataaaaaagcagaaggatggaaaggactgagaaaagatccacgaaaaactcaaaagggaaagctaaggacagcagatcgatgccagagggcaagcaaaaggcgaagctttctggatcgcgtgctgccgatggggtgcgcaaagccccggcgctcactgccctcgggccccacctggcagttttctactactcgcgttggacggcgaaaatgaaaaattccaatcgggcacacagaactacagcaaaaacgtatggttgctaaaaatgcgatgaacttgcgagctgtacacacaaacgatcatcgatttgtcccttcctcggcatgtacgtacaagctaagcaattaaagtatacttttccacgattcgacactaactcacgaccacatccacatgccagatacattgggtccggaaaacagcagccctgagcaccgaaaacaaaagcagataagaagagagaaaaaaaaaaagaagaactgttccaagagacgcaagaaaatcgttgagccatcacccatcatgccacgggagcggtcgccgctcggtgcgcgcgatgcatcgcacctggcggaccagcgatgggccggtggatgcaccgtgggcgcatgccaccagcgcaccgtgcgcgtgcgcggaagctgtgcacgacggagaggggggcagtggatggggtggggtggggaatgccatcgtgtcgtcatcgcctcgccgtgggagggcgacgttatgtccccatgtgcgagatccggggaccgggggggacatatggagacgacgatgatgacaccgtttcataagcagcgcgacacgatgtgtgtgcagcgcagccggtgatggatggattgatggcctgatgctatactgtacgcctgtccggtcgtgcaagtgctgcttaatcggagaacaggaaaccagtgacgtacgtgggtaccgtatccactgttgctgcaaacccaaagaggatataattttgtcacgtgttgatctgaccttgtgaagatgataaatagggactactaagctgtgtttagtttcaaaatatttattcaaacttctatttttttcatcatatcaaaactttcctacgcacataaacttacaacttttccgtcacattgtcccaatttcaatcaatcttccaactttagcgtgatctaaacacagtctactccctccgtcgtgtccaactttgactgtccgtcttatatgaaatttttttataatttgtattttcattattgttagatgataaagcatgattaatattttatgcttgacttatctttttaattttttttcataatttttttaaacaagacggacggtcaaatattgaagacggaaactagggtttgtccttttttttacggtgtgagtagtcgttaatcttagaacttcctttgaaattattggccgttgatgtaaatccttaaagttacaccatgcagtttactggaaaactctagatttcattattcctactataaaactgtgaattgtgactcactgtgtttctatataactgtgaatttgtgactcgctaatgatgtaaaggagctttcatgtaaagccacaacagtacgaacatgtggcggttagttttgcgtctacgaaagtcaccacatatactttcgaagattgaaccaatatatcttagttttgataaaattgtcttgaagactggattagtatatcttaagagagattgacgatatcatcacaagtgcattcgaagactgttccgatatatcttgagattaacatagtaaccataaacatcccgctgtctatgccacctataaataaaaatataattagcattaactctgagcacttatgttaagttaagaactttcaaaatgacaggttacatcataaaaaatctaactgactaagctacgatgagtttgtacatgggtgtcagatttttcccaaactagctaaatacctgtgcttggctacaaataaaaatgaattatacatgtgctattgtttggaacaagttaattgtaaagtttatggaacaatttcgtccctgattcatgtagatgtctttccatgatgataattgataaactgaaattgtagagatgaaataaaatattaacaatatgtagaaggaccgttttgtaaaattaaaatactggaagatgttgtttgttatattgagttgggaactcacttcctccatacggaaaacggagcaacgcattttcttatgattaattaagtatttacttttttttggggaaaaattgattaatatgaatttttaaagcaactttcatatataaacctttttgcaaaaaaaacgtaccgtttagtagttcgaaaaatgtgcgcgcgagacagagggaagagaagttgggaattcagagcaaagaacacagccgtagtatacaacagagttagtgggtgatagattcactgtcaccactattaccttttttaaaggagtaaagatgttcttagatagtactagtaggagtgtagccccgtgctgctaggtgctaaacctattaaaccaggcccggtcctgtcaatttaatggcttggagcggtgctaaaaagataggcctttaatacaactctgataatataatgatgtttctaacaaatgtaatgtataaaaaaaaattcttatcaaacaagctatatatctttcctctcgtgggcttcctagatcttaagttcctatggcctataggctcctatttccatagcatatatatatatatatggggttgggtcctttgacttcgagggctcattacgatggcacagctcgacccccctaggccaggcctgattaagaccgtcccatgcttaactatttttttctacattagagtcagaactaactaatgtgattcttcggtattattgatttctactcctccgccaaaaaaatgaatttaggattggatatgacatattctagtacaacgaatctggatagaggtatgtccagattcatagtactaggatgtgtcacatccagtactagattggttttttataaacgaatgaatttctaaaacatttatcaataaaaaaatgtctaagaaatcaaatgtatcttgctactttttttttcaagtacatacttcctccgtttcataatgtaagttattctatcattgtccacattcatatagatgttaatgaatttagacacacatatatgtttagattcatcaatatctatatgaatatggacaatgctagaaagtcttacattataaaacggagggagtatttatttttttatgaataagctagtaaaaggtaaatatgtataaaaatgtgtttaatgagaatttcatacgtttgttttttcttgcgaaacaatgttgattatattatatatataagagacgattgttacataaacaaagacattaaaccaaaccaaacttctccacatcttaaaacgtcgcaactgatacgagcatacgatgtagaacatccatcgcgccaagccagcctcccgccgctggtcgtgcctcctcgcaccaagccggcctccaccgccacccggtcgcacctcctcgtgtcgtgccggcctccactgccactagacgtgcctctacgcgccgaacctcgacgctgcacaaaagcagcagaacactttttagctcacgtcgccctccccatgggcgacacgagaggtgatgccaccactgacttcctccttccctcctccttctctgcctcgccactgcctgagcgggtgccggcaaagccacgcggccgcaaggacgacgacggcagggctttgcccagcgtacgctcggacaacccggggagctggccgggctgcggcgttggcaatctgcgccgttccggctagatccggcgggacgacggttggcggcagggcagagtggtggcggcgccgtctagcgatgggtggtgaaggcgttcgttgttgacggcggaaacccctgcccagatccacgggttgagtgatcgtgatggcggcggcgggacctcctggcgcgtgcggccgggagcgggtacggagccgaaccggcgcggaggacgacgacgacgtcagcggcacgacgcgggccgccccccgcagcgagcccggcgcgttggcaggcggtggtgggtgtgggcgacggcagggaggccctcgcccggaagccggcgcagacgatggctgaaggccgtcgtggtgagcccaacaacggcagtggtccgccggtgagttgcacgacgcggtggtttgttggacggccacgggcggctagtcgggggggggggggcatggcagacggccacatttggctggtgcggcagcggggggaggagtgctcggaggccagcacgtcatttgtcatcgtccagatatcaagtggtaccaactttacgacgtaggtgaggcatgaagtggtactttcccttttactcacatgtatcatcagatacctacatgtatagcagcccccttcacttaaacatgtcatctttcatgtaattattaatggtgaagttgagggaatcgggccgaattctccgaaactttcatacatgtccggaacttcaatccatggtacatggagtatatcagagggtgtcaacgtcttcacggggaggtgagtagatcagattggattcgacgcactagcacacaaaatatcacctaacatggcattactccagacagatctgatcgactgaataataattatactaccaggtataggccagtgcgcgattccatctactaaaattcagcatttcagccaataatgcgtggcttacagacagtcccacggccgtactacggactgcaatggtacaaccactagtgacaaagggtacaactgcagaagaatcatcctacaatcctaatagaagtacttgcactgtgaagaaatttcaaaagaatttcaaattcaataaatgaaaatatccggtctatcgaagaggctttacgttgtaaatttttactgcttgttgtttgctggatgtttgccgggtgcattgctttgcatccagtttacacctactgggccagttctgttttcctttctcaatttggaaagagtgctgggcctgatgttgggctgaaaaaggcaaaaccacatttgttaaaatgagtttcttttagcacatacaccttgaccttcccagcaatgtagggcacttacacaccattgttaagcaaaccagacaatatttacaactgacctgaatttcagaacaaaaaaattgcttgagatcatccagaacgtgatttcccctttgtgctgaactttcctcacaacaaaactcttaaacagagggatgcacaagttcagtccacataatctctaatataggtacttaactaatacagtattctcttaggcctactttcagaaatgatggccagacaatctcatttgtcttcagccgtttcatatagcataatgcggcacgtactgtagcacatcctgcatggcaagcgaacaagccagctaattcgtttcacggtggaattcaagttggtggtcatggttggctgctaggcaacttgctgagaatgttgtgctctggcttgtggtcacactcgaaatcaaggtgaacaaatgcccgctcgacttctgggagctcctcgatctttatttgaagtgattctccaatagcatgtgcctccttaaggggcaattcctctggcagctcaatgtcaacctgccagtccgttgatcaaattagctgggaagagcatatatatttacctaaaagggaaaaaaacagcaaggcaacagaaaaactgaggtaccaacctcaacaaagtaaagaaccccaaaggtgtatgctcgaactgtatcgacacgcttgatttgaggatgatgtctgatggccaaatatgtcaacttctgcagcatttctggcggagctgattcacccactagtgacactgcatcaaggatagcaataagcatcattaattcagtatacgactatctgccagttaatctagtaagtaactttcagaacacataaggaattgtgcaggaattacacttatatggtgagtcaatttatatattttttttcggaaaaacatgttccctacaatcctgcttcttgcatgggtttagttcatcagatttccatgtccattaggcctatcaaagcaattgatcctaacaagagttctggtatgaaactttttactacgacaacagataatggatgtgggaggggggtaggccaattataaacgaatgcaacagatgctggagtactgcaaacctgcattttcccacaccgttccagaccagtttgtaattgtgtacactgcaagggcaattgcaccaactgggtcaatccaccagtagaacatatcaccaaggacagcagcagccaaacccacaacattcgtgacgacgtcaaaataatgatcctgtgaataccaacccaacaaactttgggaaactgcactcatttgcctttcaaagcatctattgaaattaaaacatggagaaagatctaaaccttagcataggcacggactatcttgttaccagatgttctgcagtagagccagagggctagcttaactactgttgcaaaaatcatgatagaatatagccatgtgagctgcactggagtcaatttatctggagtctcgttcactatcagcttttccacagcttgaacaaatacttggaatcctggaaatgcaaataaaaagcacattgctgtgttaatgcataattttggcacaaagaccatactaagttgagtaataaattttgtagtttgaagacaacaatactgttgcatatacaaagaaagcaagtaaagacatgaattgattgtccattcttgtcctggcaaagttgcaagcatacctaatgtagccattacagcagcaaagatgatgattccaacaggctgcaccctcagtttaccaataggatacttgtagacgttgatgctcttcatcgagagatgtgtgaaccaaaggataccaccagccatgagatcaagcagcgagtccaatgtcgaggcagctatagcaattgatccacttttaattgtagcatatatctaatgatggtgtggaagtataataaagtcagcctagatgaatgttaaaaaagggattaaaatgaatcgggaaagtacaaccttcaacgccaaaagaatcatgtttgcatagtttgatatcttcatggcaaactcactctgcttttgctccgcaatatcatcttcttcactcattacattggattcttctattgaatcaacttcctcaaaggatctcaaggtggcaaattgtttctcatagtattctttctctcctatattagcccaaaaggtaaccatatcacatgaaggaaagcagtgtcttttgagcatataaaaagagagaatttaattggtgttacccttcatatggatcatggggagtttgtccagggttatgaaatattaggaataagccgtataacacattgggcacaccttatcttaacagttatattaagagtttgtagtgaaaaaattattaataagaacaaactctaaaaaatgatgtgaatataggaacaataaaaactagtttattatagtccaggatttgcaaatcttatctctatacttaatgtcagtacaagaaagatatgtggtgattcatacaactgagaacttactgcataagaaatactaaagagtaaacaccacattatacttctatatttctctccctgatacaaagagtattacttatttcgtaatatttgcattaagtgttttcatcccaccatttttaacacagtttgtagtcgtttatgaaaagtaaaggtgtatgtttttccacttagcgacaattgacagtctcacaatcctgatacagctaggcagggttacatcaaatcgtggattaaaaataaataaaatacatcccacccacctcacttattttaaagaaagagacagggaacaaaatggcaatacaataattaaatgtacaaccaatgaaatctcgtaaccaaatttttagtacatgctattggtagagaagtcaaaaatttccactggtagatgcagaacatccttacaaatatattggtattaacagccaacgccggctggtttttgtataatctacatatcacctcggtttgacaaactgtaatttagtcttgacgtgttttagtatctaagctacaatttcaaaagacataaagaccaaagttggaaagggaagtatatagtgctaaaatgaattgaacggcaggcaggcagaattaaaaaaggcacagctaaaatttcaggtaaacaaaggccggtatacccatgttttgtattacgttgaccaggaccggagaaaaagtactgttctggtggaggaaatagactgtggaacagtggaagtcctggttctcctggacaaagaagaaatgcagaggagacagaaagatcaaacggagatgttctccttgatgtgtaattcctttaacttcgacaacagtttcctttctagcaatttagattttttttttaaaaaaaagaactctagatgggctgcgagatagccctccccctacccaagctaccgccttttctttatattggttgtatctcttgaactatgtactcttcttccccctttggctaaaaaaaaaagagcatgtccgttagagagagcatcagagcaagaaagaaataacattgtcctgaaagatttttcgtacacaattgatagctgcttagcattttttaaagaacatataacgaatgacctttgcctaggagcatgcatgaaaacattatagtcgggataaatcgccacctgttattctttagaaccagaaggagatctgcgtgtcattctattaggagtcattcaatatgttacaatcgctaaaaccatatgaaaagaccgtaaaaatgcgaaccaaaagatagtaaacccacgaacttgatccgtcaccgtcaaacggtataccaaaggacgacacacaactaccaagcacgcgcaagtggatggtgaatcaagaatagaaggcgatttccatccatacaacaacatcgaccgcgcgatcaccagcaagaacggcattatccaccgtaattctgaaaagctactacagccaaaccccaaagacaaactcaccaacacccaagtgatgactaacaaaaaggagagcctaaaaagaatcacaactttcatgcaacgttgccacagccaaacctaaaaggacaaaggacagatcgaaaacgggggaaagatcagaacgcgctttacaaagaagtaatgcggggagggctgtccagcgtggtaccttcgcggaggcccttggagcgggagaagtcgacgtgggacggcctctcggggtcgacggcgtcgagcaccttcttgggcagccgcgacacgaactccccgcgcatcgacccgaccgagttgcgccgccgctccgccaggagcggcgcccgcgcgtcattctcccccttcgcctccatcgaatcacctctctcctttctctccccctccctccctcccggccgcgagtggggagcagtcgagctcgagccggcgagccgcctctctcctccgctctctctctctctctctctctcttctctccctgtctcctctccctgcgattcgcgatcgggtcgtggtttgtttgttatttttggcgttcgggcggaaggccgggtgtcgcgctaccgtggcgtgctgcggacgtgcggactgcggtgcggctgggacgccctcttaaaagggattttgtaataataagataagaaaaaggggaaaatagaaggggactatttcgcatgtgagagtggtgtgcacagagggctagaccaccgatcatgagatgtgcggttcagatcatagtgctggcgcgagaactgagctttggtaagatgtggctgtgtaccccacccatcaaattggaattatcagctattgcctactcccccgcttcatgtcctaataagacgttttggttattgtcaaagtcaaactgttttaagtttgagtaaatttataaataaatatataatatttataatattaaattagtttcatcaaatcaataattaaatatattttcataataaatttgtcttggattaaaaatgttactacttttctttataaacttgatcaaagttaaaacaatttaattttaaccaaagtcaaaacgttttataacatgaaacagatagagtagtatacatggttagtaactaaggacttctttagaacgtaggattatacgtaagattttaaaaatatagaaatagaaaaaaaaagggtatgaatcatatgccgagtattgataaaccctacatagaaatccacaggaattagcaaaacaagttaattttttaaaagaatggtattttttttactcggtctatatatccaaccggatatgtgcagtctgcaaaacatgttgtttggtaacaccgtatgaaagaatgtaggaattctacgactcaaacaagagaaaccatcctccaacatttctatgaaatgatccatttcatagaattttcaaagaaatttgaaagagccattccttgatccaaagaaccatatgataattatttccaaggaattcgatcctccaaatttgctatactttttctttactccaaaggagaccaatcatgtacagtttgcctctcagcatatactcacccagttccaaattatagtacataggaagaaactttaacataataattatacccaatctatgctttttttcgtctagaatcttttgttgggatacgcgtagactacgatagcataaaacaaaattttctatcgcgtaaacgaggaaccatgcaagtattagattatagatcgttaccactcgacgcgctgtgcagcggaagaagacgctgagaagtcgaaggaactctcgcgaagtagcgcgcgtcgatatagaggaagtagtcgatcgcaccggctcgaccttctcctcctcgtgtgttctcctcgccgtactctcacgccgatcaacaccgcaaatcagcggcgcctctaccggtatccacacgtacagggacggaacgccacgcgcagatgtgctagcacccgcgcgcggttagggttttgcttggggagggaagtgatggctagggtttctcacgtgatgctatgcctccgccggtcacacccctcatgaatatataggatccatcactcgggcctccaaggcccgtaggactcctattcggtctctatccgaattaagctcatattggatctctatccaatccccttattccggcccattaaacgtgcgaccctgtaggttcatatatactcggctataacctgaaaactcattttcggtccacgcgtcaacagcggccccctagcagaacgtattgacccaccgggcatacataaagatcatatcggctgaacctctagtgtatacttgtatgaacccctttgcctcacgatatcgattaagcttaaggctagatatgtgccatcctctaatagctcaatcattcactcgaacctgttgatagattatataacttgtgattgactcctcaatcacctttggcatggccatgcacttccataatctacaacatcgaggggcccagagatatctctcaattggaggggcaaatcctatcttgattatttatatcccactacatgtttcatagcatacccgaaaactacttttataactacccaattacggagtagtgtttagcagtccctaagtaagctactacacatgttgagaaccatgataatctcagatctaaggattcaacaccaacactcaatgagatcactgatgacacaacacatatggctcttgcagtgtctcatgttgggtctatccaacaacatattcaccaacatgtgtccacattattaatttggtatctctataccatgatccatgagacatgattatcaattaatacatgtgctgatcatataaacatatttgttccatatatgatatttgatcagggatcctttagaaatagtaacaaacaacataaagagtcttatgaaagaatcacatattcattaactaataaagagttatctatttcaaggaacaatgtcggataaatatgtaaacatagtatgtgatacaatcatttctatgattgcctctagagcatatcactaacatctttaacaaaattgaacattgggcacaatttaaaacacttgaatttcacaataattagttaataattgctttgatttccactgggcgaattctcttgttcaaatacagcatgttgcattaggtatttaggtaactccttcctgatatgaatacgtagtattagataatatcccatctaattttttttgttgttatatcatattttaagacgaagctagaggagtatgtattttttttaagatgcatttgccgtcttgcacactccatgcacagatctagacgatcattacgtcaatttctaaaatacaaataaaaaatcatcacgtatacaaagatgaatttacgaagtgaacttaactcaatcggctagctttcttacggtggaactaaaacacccgaatttaagccatagacttaatacagatacttgcatttgcaattatcttagtgttaggcaatgtacccatcaacaacgagacgttggtgttgacttcgtcatcttaagatatgtcagcccggtctgttagagatgctcatagcgatatattgtgcgtgtaaaataaatttcagaagacaggaagcattttattgaacacactcagtgcacatttatggtggtctacattttttcttgtttgcttatgacttgcgatatttgcaatgtacattcatgaaatttggctgtgtctgtacgtacatatcgaatgagcagtttttgtacactttagcttgtccctatttatggggagcagtcaccttaatttcttaatgtgttcggcccttttcattattttatgaacttatgcgaccggcgacttacctttgctgtactattgggtactccctctgtctcattttttgcatacatgatttttcgtgcccaatttagaccatccgtcttatttaattttttttaaaaaagttaaaacataagtcacgtataaagcactatttatgttttatcatctcataattataaaaatactaattataaaaaatttaaataagacagacgatcaaaattttagtatagaaactaatggttgcttttaaaataggacggagggagtattgtttagttcgtttgatttacatttgtcttgcctagcttttggacaagtaactctgtttgtttgaatgaagcttcacaagaatgcaaagaagatactccattttgtagtacatctatagctcataggcccagtttaattcttgacctcaaatttttcacgtttattatgcaaacgaacgacctacattttgcgttatgtgttggtgtgggttgttcatggtcatgtgcccgtcaaaattctttaagatcacgtggcgccccaatcaaacatagaaaaaaatttgttcaggtcaatccctcctttttgttagaattttgttcaggtcgatcaaggtcaagtccattcttcaatcgcacgacggcatcaccaaaattcaatttctggaataagaactccgaagtctccgatcattttatgcacaattggtgtggatcgaccaggacccgttcagatccacgaaattagcaaggtgtgtttcacattgaatttgtatggattaccagttgtcacctctggattgcagttgacccagttttggatatactacctctgtcccaaaataagtgcagccgtggaaattcgtgtccaacgtttgaccgtccgtcttatttaaaaaatttatgattttctttaaaaaaattagcccacataaagtattatacatgttttatcatctaataacaataaaaatagtaattataaaaaaattcaaataagacgaacggtcaaacgttggagataaatagtaaaaaactgcacttattttggaacggagggagtataatacaatcgtcagctattgttgacaggaaccaaatctgggacagtgaccttaaattgggcctcatttctgcatcatatagcaggcattaaaagagaagcacactttgcagacttgcaggtaagcatataattttctagccccactatggcatgagccggcgaaccgcaattaggattttgctagtaaataatgtaagatccaagagaagttcaggcatcttactacaaggaataaaaaatcagaatttggccacttgacatttagttttcttgagcttgctcaaaatttatttatatactagtacttccatttattaccattagggcattatcgcattgtcacagatttttctcgatgaacagagtatgagtgggatctacgctaggtcaggacggcacctcacatgcctctcactgtgctatgctgcaactggcacggcattgctgctgatggctgctgcccatcccttcggtggtgtttagatgcagggacttaactttagtccctgtctttagacactaatttagagtattaaatatagactacttacaaaattaattacataaataaaagctaattcacgagacaaattttttaagcctaattaatctataattagagaatgtttactgtagcatcacataggctaatcatggattaattaggctcattagattcgtctcgcaaattagtccaagattatagatgggttttattaatagtctacgtttaatatttataattaattttcaaacatccgatgtgatagggacttaaaagttttagtcccatctaaacagggctacatgctgcctgtatgcatggcgacaaggatgaaacattgaatatgcttagggctccgacgacctagcgtacccgatgtcccgatgaaaatgatgcaattcttttttctgtatactgatccgtgaactatggaaatgtcacttgtaaattgctatgggtagaagctttccttgccaaaaagatcattctttctttgtgaaagcaacagggaatcagatcgacgccatgatgaaacaaatgcaaaacaagaattccagatgcgggctgcaccgatcagattctgcacgccacatgatcctcggctaagtggttcgtcttctcttgtccatttcctgccgctctcttcgacgctgaaagctttccttgcaaaacagaaagggggagaaggagatgaaagagatcagttgaaaacgagtaggatcatcatcccgaacgggtggatgaatgggctctcatcctctcaccgcgattgtgcgtcgtaaccgctattatcagcaagaggtatcgccgcttgccgcgaagtacagcaacgtacagttacacctcttgttgcttctttctcttcgttttgttctgacgccaaaaggaaattaggaaattctgaaagggacatgtgagtttgctgtgtgacaaactgacaatatgaggtgcagcttttcagcgtgctctgggcctcttaaactatgaatttctgagcactgaaatgaagtgagcaatacaaacaggaaaccatgtggtccttacgccagaaggtgtcaattgtgatatgatattcgttgtttctttgtaaaattgtgctgttagcctgttgctgttacagtgtgatcattttgcacttcaatcagcttgttttgggagtgtagggagtactggtgaacttcatttttgcaagtctgttgctactgactttctgccagaccttatccaagaattactagcagccacaccatcttgaaccgcagtgtttgcagcttactatttgttcttacaggacaaggtatttagttatctgagaggaataaatattcaacagtgaagtaagcgtcctgattcttgttaagtccagtatactaatatgatattctgattatctccctgaaaaccactgtttcgacagttgaggcgatcttttccacaacaataacatcaactcatcaagtgctcacattcactgatatgtgataagaccgatcatattcagtgaccattactgacgctgaaatgaaaatatcatctgttcatagtgagaaagttataactactaacccataacagctgacagcgtaatgcgaacaatcaagccacagtcatcacaaactgcagctacactgagatattgtctctattaatgtttctctctttgataaggaggcctcctattttctctacagtccttcggttgtcagtttgtctcccatcggtgtgatgtcaataaatgtcttaagataagaacacgacgtagcttgcagtcatgcagtggaatggacccttacgtacctacagaacgggacagcgaaattgcaaaaatatctactgatctgaaacctaaacaaaggtaaggactgaaggaacaatggagaatcacagccaatgacctgaaactctgtgagcccttggacccttttagcagtttgattgatttgtgagtagtacatggtacaatcaccagctgtttaacaagtctcagcatccaagaagaacagagcacataatgtgttttggatgctaagttggtttgatgcatgggctggtgttagtatgcatgtgctgctagggccctcctgctccggctggcttgctgagaagtggctgcagcgccttcaccacgatggtcatgttcggccggaaatctgactcgtattgcacgcacaacgccgctaccgccgccatctgaaaacacacacaatgcacgacaagatagcatctcagatcgttcctgcaaacttgcaagaaactgatggtcttgtattaccttggcaactgcttttggaggatagtcatccccgagtttcggatccacgcactgcctcaccttgtcctcgctcaaccttggcgtcgcctagtccatttcaccagtagaaaatgttcagaaattcagcattgtccaaaaaaaaaaaaccagaattcagacaaccacaagagcatatggctcttggaacacatgaaaagctccaacaagatgtgcaagaacatggcctactacactacccaggttacaagactctgctgtctcttcggcatggtatggtccactggcttcctgccggtcagtaactccagtaggatgactccgaaactgtacacatcgctcttctgattaagctgtcccgtcatcgcgtaccttcagaaagcgaaagagagaatccatttgcccggtcaaaaattaaccttgacctttcttaccgaaagtcaattaatctactaatcttctgatcatgtttttctccaatcaaacacagtgtggattcagacagagaatgtattactcgggcgcgtggtagccgaaggttccgaggacgcgggtggagtgcaaccgcgcggcgccgtcgggaggctgggtggtgaggttgaagtcggcgagcttggactcgtagccgtcgaagaggagaacgttgctcgaccgcacgtcgcggtggacgatgggcggctgggccttctcgtggaggtactcgagccctctcgcggcgccgtacgccaccttcacccgctggctccagttcagcgccggccccggcgccgcgtccctcacgcccttcttccctgcagttttttttttttttggtttccggatcgaccaacacgtcgtgtcaggtttcatgtgccaagaagaattcgctgtaaacctgtggtcattaatgcatgtagatcatcagaatggaggaagaatttgtataccgtgtaggatgtcatgcagggagccgtgcgtggcaaactggtagaccaggattcttcggtttgcatccaggtagtagcccatcagccggatgaaatactcgttcttgagcctcgaaaccattgacagctgcatgtccacggaaccagatggttttaatcagcaacgtagatttgcagcacaaaagtttgatgttgaacacgaatccgttgtgtaattgttttactgatcgttaacctgagcagagaagtctgcttcagagtcgcttgacacgctgggatcaagcttttttatggcaaccggctccccggaggtcagcaccgccctgtagattcgaccgtacgaaccttctcctatcaaggcactctgtccaaagtgtccggtgatgttgttcagctcgcccatggagatggctggcacgtcgatggagagcaccttcggtggcgggccgccgctcctgggtgcatttggtcctcttggcttacgagggcctgatacacaaccaaaaacaggagatttgcacaattttcagtcttcagattcagcataaggattgtggcatactccgtgctaaactctctgtattgatgacataagttgatgtggccttgttgaagaatcttgtactagtaagctctaaaatgagatgctgcgaaggcaacacaagttggtcgattgaactacgaccttctcctactgatgtttggtatagtgagtaacttgagcattaaatctgaatgtgcagatgggtatccaattagaacagagaatatggatggtagtcataacgaattacagcttcttattttccctcaaaaaattacagctgcttatctatacaatttttctttctgaaagttcagattaaaattgcctctgaaactaagaaagacagagctggcagtgcggtatttaatctgaactttctgccaattcaattatcatcacgatgcaacattatacagttgagcaccttggcctctgtttcagctaaccacctgcagaaccggaggaggaaacggcgggatttcacctgcattgtactgcgtcgcaggtgtcgggcgcctgctgcgactgcgactggctgcacggggagcgtacgtctcctcctcctcgccgccgcagcaaatcatcctcctggctccggaaatcaagtgcaaggaccgtggcaatttgcagtttgtgctcccgctccgatccgatccaccggatcggccgggagcctcctgaatgacgaacactgcaaaactgaaattgtcacgagcgtcagatagagaaaaaccgcgcatggatagaacacggaatggaaaaggtgttgctggccgcaacaaatcaatagaaaacgttgcttctttttttttccttttcacgagatgcatgtcaacttttaaggccttgttcgtcggacaggacaatgaaaaacaaccacgcttttaatggattaaaaaaaataaatactgtacaagatatgccatgaagaagtacgtacgattaagattgcaagccagccgtaaatgtttgctcctcctcgccgacgccgacgccgacgccgacgaggtaagagttctcgcgatggacggtgttcgccgtcggagaagaaggagaaggcggcaaatgggaacacaaatgggagcctaatataggtaggaaagaaacacgcatcggtagaccaccgcgtttcgcgggggcgcgaacggagagaggagaggagacggtggcgattggcatgtccacaaatcacgtacactgcccgatcgaactcatgggctcacggctagttcgcaagca

SEQ ID NO: 10203 - DNA, 45441 bp, Oryza sativa
ctacaagtttaaaaaaataataaatttaactgcaaataaacgtatagtaatttgagctttgtttgttatttttattacaatttatataagttgattttttaacttgcatggttgtggagtgatatattacatattgatttatcttgtcaattttacacggttttaatagttgaaggggtcgatatatccggttttgtgattgagatatacgaataagatctgaccaccactacccaactctatccttatccacaaccgaccgacacatcccgttctctcaacggcgcctcctcttccaccaccgtaccgctcttcctgttccgctattgcgccgacgccgcccctcttccgccgcagtggcgctgctccccctgctgcccatcaccggtacacttctcttccacctccggtcttttcccctcgttttatctgctagcggtgatggtggaagggcccagcatcacctctccccccttcctttactgcgagtggcgacggcggatccccacaacgacatcgaatctggccgctggcctctcccttcccaccctctttttgtggtcgaggggctcacgagcttgccagatccatcaacctcgttggggaatggcgatgcgaccacaacagtggcgagcggtagatttggctgtgagttcgctggatccgacgattggcgaccacaacggccgcggtgagagcgcgatgatgaccacggcaagccctcctcgacctctcctttttccccaagcacatcaagaggctccggttctccccaatgcgtggccctaaacagtggtttcacacctcaagagccgaagcgtgccgaggcaaccatgacctctacaagcacgacaagggcttatggaacaacggttctaatggggaggattgaaaccactattcacagtggtgtattgtatatggccttataactaaaaaaaactagaggatgccttgcgcgttgctgcggaatttggttaacatcaatttgttagataagagatatgatctcaagaagaaacagaataaacagatagctttcttagagaaattttttttagcagacctatcaataatttgtagataatttaggtagcacatgtcaactgaaggagcgttcaaccataaagatcttttatacggttagacgggttggatacatgtagatgtgtgtagagatgggccaatgtgttcatgtgggctacatttagcactgaagaggcgaaaagactcacccgatgactgatgggttgggctctatcctgtattgcatcaaacgtcttagaagcaatctaatacattcatccaacggttcagaatttgatgatgacgtggaagcacaagatttgagcttttggccttaattttatataaaaaaaaaggattacgatcatttgtgctgtgtcctctctattctctccctctctcactcttggactattggtcctcccagcgtcggcgaagcgaggcggcgagcgaaacaatactcccaccaaagccccacaattgttttgccctttttttattcttttcagagcgaagaaaaagaaaagaaaattataaatgagagaaacacacagcccgcttggacttggagacgagacgacggaaggcatccgtgtggtggtgtgtgccttgtgcttgtggggtcaaaaaagtcaaagcgctgatgctaaccgctcgcctatctaggcaaacaccagtcaaaaagctgacccacccacgccaccaccacgctgctccgctccgactcctcccacctccacccccaccacccgtcatcaaacgagtaggagtatcaattatcaaacattcaaacccatcaccgcatccccaactcgccaccaaccaccaccaccgccgcacgaacccccgagcgcccgaatcccacaccgcaccacgcgccgcgccgctgcggccccgtccccgcgtcccctgttccgccccccggctccggatccgcttcaccttcacgtggcgcaggcgtccccggtttaccccaccgccgtcgcccgggtcccgccgcacgcaggcgcccgcgtgtgtgcgtgtcctgcggcccctctccctctcgtcgtcgtcggtgaaaaaggaaaagaaaaacagagaggaggaggcgtttttaaccgcggtgctcagcggggtggtgaaaaaatctccgacccgggtccaaatccaggtgacggccgttgaccgcgaccgtgggggcagtgaagtggtggccgggagcgagcgggaggaggaaggagacatcgaggggaggagtgacccggaagcaagcggagggcgagcagccaagccagcagcggatgggggagtgggggcggtggtagccatctcgcgcacgcctttccccgtacaagctgctcctctctttccttatctctccccccctgattactacccagcagctgcagcccccgccctcctcggcggatcggaggggcagttgatttccgggcggcggcggcggcgccatgaagcggcagaggtcgtacggagatgacatggacgacgaccggaggaggttctacgaccgaggacccccgccgccgccgccggcttcgcggcggcggccgggggactacgacggcgatgggttcgaccgccggaaggggttcggcggcggcggcggcggtggcggtggtttctacgaccaccggtacagggagtccccatctccgcgagggtacggcggggaccgggcgatgcaccggtccgagagcttctcaggcttccggcgggagttccccaaggggttccgctcggagcgcgaccggtctcggcgggacggtggcggcagctcggcgtggaggcggcagagcggcgggtggagggattcggaaggtttggacgggtacagggcggcgcccaggcggtccggggcgtcgccgccgacgccgccactgcggttgcccagtgagtctagcaggaggtttgatggtgcgagggtggagaagtccaggaagcagagctttggcatcagcgagatggaggaaggggaggttgcgccagatcccgagaccaaggcccgcgctgctgcggtggatcaccggaagcagatcgagttttctgggcatgccaaggagaaaggaccggagcgcggtgaggtgaaaaaagtggaatccggtgtgagaggggatttaggagctcatggtaaaggagtggctggttcatctgctgctcgcaatgcagggagggaagaagggaagatcaaggatagtatgattgcagaagcaggaacggtaactcatacaaggcatgaaaaatccacctcagatgccgcagtatcaacggggagaggacatgaggtgcaagggcaagatgaggctgccaatgctctcaatcaagttggacagtgcgtttcatccagtggaagtcacaaggtgccacaggaggaaacgatgatacgggatgaggctgccaacgttgttgatgcgattgggcagagcacttcgtctgatatccagcaggaagctgtttgtgagaaggcggctgtacgagatgaaactgctaatgctgctgaggaagctgggcagagaacttcatctagtgtacatgaggaggctattcatgaacaggcaactatacggaatgaaactgctagtgatgttgatgaagctgggcagagcacttcatctaacatccggaaggatgctattcagcaaaaggcgactatacgagatgaaactaccaatgctgttgatgaagctgggaatggcacttcatctagcaaccaggaggcggctattcaggaaaaggtgcctgtacaagatgaaacaaccaacgctgttgatgaatctgggctgggcacttcatccagcatacatcaaggacttcaggaggaagcgatggcattagatgaagctgttgatgctgctgatgtggttaggaaggtcagtttgtgcggtatgcatcaagaagctcttctggggaaaacgagagatcaaactgccaatgatgttgacagggttgaatgtagtacttcatctggtcttctgcaggtgacaccacaggaaggaatggcatcaatagatggaactgccaatgctgttgagccagagaagattgattctgatatgttgaaggaaacgattgaaggagagctggtgctagatggaactgctgatgtggtgggagagggaaattcacctagcactgtaaaggaagcaatgcatggaaaaataactgcagaagacggttgtcccagtagtgctcttgaaatagctaaaaagtgcaagcagtcggctattacagaggaactggtacatgaaaaggtggcgacctctccaagccaaggggccccagaaatgaaaaaaaatgaaaaaggtactatatccagcaagaagatgagtgaatcatttgaacctgatgcgtctcaacatgtggaagaggcactcccgagggatggccgtgaaaatatagttgcattaagtgatactgaagtcccagaacaagaggcagctgctgagaacaaaactatcgagaaggaagtaaaaggtttttgtttggaagcaaactcagtaggtgctaatgtgttccttcaaccaagcaaggaatgtaatggggataggaaggaagagggtacagctttaaatttaattatggggaaacctagtgctgaagataaaggaaagggtatagcatttgatgtccttagtaaagaagaagacataggggtaggaagttcagtaggaagatcatttgacttagcactgcaacctgacattgaccgaacagaggtgctaaaatctagtgggactgtttctgtaaagcaggaagatgacacacctaagatagggaggcttgacctttcacttagcttatcaggttgtttacagaatcctgaattcaaatgctcagttcccagatctgaatctctagaccttgcaacatgctcccaaatgttgccatcatcatcgttccgcacaaattcagaagggttcacaggttctgtatcattgaccaattctcaaacatttgttcacaatcctagttgctcacttacccaacagtcattagacaactatgagcattcagtcggcagtaaacctttatttaagggtgttgataagttgagcgacagcacaagatggcaagctcagttgtcgaatgaatctactaagaagagggaacctaccgcagttcttcagaatacagtaaaatatggtaatctgccagacaagacctttcttggtgtgaatgtgcagaacaatgggatttccaaggacattcacaggcgcgcagggatctcaggtgttttgtcgccaactcatagtcgggattctcatgattcaggatttgaacaaagtagacatagaaggcagctcacaagagagagaagcagcagcagtcttacaaggggtgagcggcaggatgggcaacaacttgtccttaatggtgctggtgtcatcgaaaggattatttccaagatagtatcagaacctttgcatcatacaggaaggatgcttgacgagatgacaagcaattctgtaacatacttgagggaggccatttctgatatcatagctgatgcggataaaagagggcaggtggtagcattgcaggaggcacttaaaaaaaggtctgacttgaatagtgaaatgctgcaaaggtgtccacgcgtattgctggagatactcgttgctataagaactggtcttccagattttatgaagaaaagtaatagcattggtacatgtgatttggttgacatttttctgtatttgaaatgccgcaatctctcatgcaagagcattctaccagtagatgattgtgattgtaaagtttgccaacggaagactggtttctgtagttcttgcatgtgcattgtctgctcaaattttgacatggcatctaatacatgtagttgggttggttgtgacgtatgtcttcactggtgccatactgattgtggcctgcgccactctcttattcggaaggggggaagtggctcgagggcatatagtactaatgagctgcagtttcattgcgctgcttgtgggcatccatcagagatgtttggttttgtgaaggaagtcttccgaacatgtgctatgcaatggaggatggagactctggttagggagcttcagtacgtagaaagaattttttcttcaagtgatgatgcaaggggaaagagagtcagggactttgtaaaacagatgataattaaactggaaaacagggcctatcatcctgaagtagtgaaatatatcatggcgttcttttctggtaagctactaatcatagttcataataaaaaaaataatagttatcattttcatgcttgataaagatgtttgttttttgttttgttgtcctgtaagatattttatatttctggaaatagaaataagatttctatattttacacaatgctatagcagaagtatcagctatattggcaaaaagattatgtgatccatgttctgatatcatgttgttatattagagatgctaatggtcttttggcaataaaaccaggctaatgctcgattttccctgttctagatgacaattctaacgctggtagtggtacatcagtaccactgaagggcattccatgcaacattgctgaaagaatagatgggattcctagttcaagtcgaaaggcaccatcatggctaccatcggtgaccctggagggagttccatttttagaaaaacaaggagtaatttcaaccaccgggagcccattaacgcttagaaaatttggcggaactgacttccagacagttgataataagcctactgttgatgaactggatgccctaatcaggttaaagcaggctgaagcaaatatgtaccagcaacgtgccaatgatgcacgcaaagaagctgagactctgaaacacgtcaccatggttaaacatgcacaaatagaggaacattatgctactcaaataggtgaactccacataaatgagttacaagagcaacgcaaaagaaagattgaagaactgcaagtcattgaaaggacacaccatcgatttctcagcatgaaaacaaggatggaaggtagtattagggaattattgttgaagatggaagcaacaaaacaaaattttagcacatgagccaagataacagctctgggttgaagataccaggatttactcaacttgcctaatgaaggttccatgtgatgtaagttctaagacttactgcacgattatcaattttctagtattttgatatagtttatgtttctgttgttttatttaacaatctgttattgagttttgatgatgtgcaataaactttagctgttacagtatatacttcacttttatttactgatctgctgttataagtctgtgtggagttaactgtttttgtggctttagacttaacagtcaagactgaagacaatgacctatgacttattgtgcgccaatttggcactggctttgttcttttgcatacttatctttaggtgcaccgcatcacatcccttaattgaaaataaggggaaatagtgacgttttggagtttatcttgtttacaggagggcagttcttatcatcgtggcgtgccttactacatatctggacagttcttatggaagggtgctagactgcaaatctgcaactttaagcatcacaatgaagatgagcatgaatgttctcttatgagaacaggcgagtggatcataatcgttgcaaaacctgtttggtcaaatacaattctgaatccagtatggattgttgttgcaagggagaacacaaactgaagcacagtaatcaggcctgcaaggtcctcgaagcagaatttcagaacgtagctagacagcatctaaattatgaattgatgttggcaatagtataggtaggcatgaattatttctcgtatgtaaattatgataaggtttatggttctgatcttcagtgagaagatgcattaccagtttcctttttttttttatctaaattatgcagcgtttgtacgtcggccacgtacgtgcatgggaatgcgccggcatggaatgagtgtgaaatgcaatccggaaatgtgtcgccagccgctcctgctgggatcacattgctgatatacagtattgaactgtaccctcaccgtcaccgactatatgcataaaaccgtcgaatttcagagctccagaattaaaatttggcaaaaaaaggtgcagatatatggcattctgttctgcaagttacactgaggcgccaactcgtgtcaggcttgctcggagaaacataaaaggatacaactcatacaacaaactacaaactcaagaagcactccgaattgaaatactcgccattgcttgcagtacgtacagagccgaaattgctacactacccttaagtttgcatgccgtcgctagctgcttatcgatcaatctcacatggccacgcatgagctgatacatagcatcggtgtagtttctcaaccgtgatttgatcagtgagacagtgacatatatatagaacagttcagcgactaaattaaacggtggcgccgttgctcttcccgccattggggacgacgtggtgtttgtcggcgtcgtccatgaagcgcttccagaaccagtgctgcttccacaccctctcggtcatctcctcgatggggatgttcttggtctcgggcaggaagaagagcacgaagagcgacatgacgacgacccacgcggagaagaaggcgaagatggcgtacttgaggtggcagagcatggagaggaacgcctgcgcgatgacgaaggtgaagagcaggttgacgcacacggtgacgctctgccccgccgaccgcgtctccagcgggaacgtctcgctggggatgagccacccgagcgggccccacgaccacgcgaaggaggacacgaacgtgcacaccatcaccaccaccatgatcgcccacccgtggccgaggttgtccgaccggtccgtcaccttgatccccagcacgacggcgatggccacctgcgacaggaacatctgcacgccggcctccagcagcagcatccgcctccccaccctgtccaccgagtagacggacaccagcgtggacagcacgttcacggcccccgtgatcaccgcggagtagagcgacgcgtcggtcttgaacccgagcgtgttgaacagcacgggcgcgtagaacatgatggcgttgatgcccgtgaactgctggaatatctgcagcagcacggcgatcaccagctgcggccggttccggcgctggagcaggttgcggaacgggtgcttcacctcctgcgccacgcggctcgcctccacgatctcgttgaactccggctccacgttgtccgtcccccggatcttcctcagcaccgccttcccttcctccagcctcccgcgctcgatcaggctgttgggcgtgtccaccacgaacagcgcgcccagcgtcagcagcgccgccgggatgccggccagcgacagcgacagccgccatccccacgggtggatcctgcatgcgtacgtaaaatgatgcagctcatgtcagttcatcatcatacgtacaatgcattgcatttgtatctgaatgtgtgtgtatgatgatgtgtgacgtacttggcggtgccgtagttgacgaggttggcgaagaggatgccgatggtgacgttgagctggaagaggatgttgagcccgccgcggatcctcgtcggcgcgatctccgacaggaacaatggaacggcctgcacgtattcacctctgttattaaattcagatgggcttgacgaggcccattaggcccaaagtgacacttgattcgcctttgtttagcgtgcagatacctagctcatcattcaatagtaataataaacttacaaaggcaccaactctgccaataaattccccgtgcgtatttctgagtataataacaacccaagctaggttaggcgttgaacctaatacctaatcacatggcaatacggcatgacccttgaattatgtagatagttttgttattcagagaagatagtttttgttatcttaaccataatcaagggggctgatcggtagaggtggaattaacaaaccgtagtagttgtacatatggtagtattagactactactacgagtacgatagtgtctgctgactgctgctaccactctaatgtttgttgaacctaggcctccatcaaagtcttgttaggtggtgactgaataactgatcacatgaactctgtcctgtactaaacctcttgcatatttagtttattgtcttggcagcttcataattgagtctagacgtcccatatgttggcgagtgtgcgtaatatgtaaactactgtttcatctattagacacgaataaattcagaagaagccaagcaaattaagtactactcctactctcctaccaatcaagcacactagcagccaactagtactttgcagcccaaaactcagtgaaccaaaccaaaggtctacatattgcgacccgtgtggcatatgcgtggacagccatagcagcctctgcttaaaaatcaaaccagagcaagccaaagctgcaacagcatgtgtgtattccaagctgcatccattgaggacttgacagttgtggctgtaactagctagaagttgctgtaaagatcagtcaacaaagctgaccaatctccaacaaacgtgacaaacacaagtctgttgctacactacacaggtcgattcctccgttgataacaactgcgacggccagatagcaggcagccacacgcaaaactaccggctgtaaaatcatgcacacctatcgcctcttggttggctgcaacttcttcagacgtctcgactacaaacttggacaacaaaaaatgggtaatttagccaggttcagtaaggattaattaagaagcgtggctaatcctaaactaggagagtcacgaggacatcggaatcttggaacttaaaaagtttatcacacgcatgctgctgccaatggaagatgtcaacgtagacgaacacaagtcatgcacgatcaagactctctcggcaccggccgaggtgtccataaatccatgtatatatatgcccatacttctacgcgtttgaccccaaaattacggcaattacgaagggccccgtgtttaagtacagtactaactaccccagtatccgacgccataagaaatacgtataaaaatataatttttagtaatgtatatgctcgactcgagtataaaaattctaatcaggacggtggttcatataggagtattaggcaggcaggaacgcacgtcgttttcatggaagcagaaaattcggcttgcttgtgatgcaaattctcaaaccagccaccgctttatatgtttgacttaaactctgtgctaagacttttggactcaagtgagtagtatcagtttatattagtactagtcaataatatatggaatcaaagaagatgatgttgcgaagaaagtacaggacgaaaaaaggaacatggaaatatccgtgcaaattatgagtgaaaacaatagtataaggcgtaatgactttgtttaactccatagcttattatatgaaatgatataatgctgtaagcctgtaacgataagattattggaaagttgcttgcctggttggcaaagccgacgccacagccgagcaggatcctgccgactatgagcatggcgaggttctgggcggcgccgttgaagatgacgccgacgatgaagaagacgccggcgatgagcatggtgaggcggcggccgagccggcgagtggtgtaggaggcgaagaaggtggccgtgaggccggcgaggtacagcgacgaggtgaacagctgcaggccctggttgtcatacttgcagtagttgctctccttgtcctcgtgcttcttcttcagcaccgtcgggaagaactcgcgcaggaagtcatccatcgatgtcactccgcctaaccaagaaaaagaaattcacaagattttcaacggatattatttagtttcataagtcgtaaagttcgtcatctattgtggcaaaaatggcatgtataagtatgaacttggaatgttttaaaatgttgtgttagtgcgccatggaaaaggttgaatcagagagtggataagattttttttccgttttaattggaatttattgtcttagatgtaaaaagggaacatggccacacaaaattaggaaagaaagctgagagagttgcaagaaacgtgatccgtggataaacaaatgcattgacttaccagcctgtcaaagcaggtggctagctcataacactcgattccttctctaaaataacatctaaaaattttaatgctttgggatcctcaagaaaatcatactactagctggactgtaggagcactacaagccggaaactaatgaaaaaggataaaattgcaccaaatggactcaataaaatggcaagatcttttttgatcctctgtaaatggtaggtatttaatgacaaggataaaatcatccgtttcgctttaatctttgcgcttatatgtgcttatccatagcaagataacacaaatatgtagacagatcaaaccgataacacacacgtgcaagaggaatctcactcaatttcaagcaggagacaccaatatgaataatcgagatgaaccaactaatcaacagaaggacatcaaagccggccatggccatgttcggacatcgccggcggccggccgtgcgtagatatatacctgagataccgacgtcgtagccgaacatgaggccgccggtggccgccatgatgcaggagatgatgacgatcggcgtgatcttcgcctcgaactccaccccggaccccgacacagagaaccctcccgccatcttgccccctctctctctctctcgtcgtctctctcctctccggcgatctccactagctagctaccaagagcaagcaggagatggagacgatgaactcacagggctccaagccgctcgctatatatagagagggagtgggagcccgatcacacggggggagacatttcaaacgcatcggagaggcaggatgcggccacgtggcataggtgggacccaccgccgggtcgcctcccgggctggctagccggccggtcagcgacggctttcccggcggcccacgggccggaggctggccgtgccgcaagtctgcgactgttgcataagcagcacaagactttcaaatcccactttaattttttttgcttatccaaattaaaacctttttttaaagctttttgagctccttttggaaaagagggagagagcaagtaggagcagcagtttggaaatttggatatatagttggatatattgaagtttgaacgccggcctttttgacgctggatgtacggtactacagtattgattcctggcgttaggcgggcccgcatgtcagtgccttgacgctggttgctgtcttggtactgtacggtgatgctcacttgaatctttggcgagctgatcatgtgaatggaggaccttgacttgaatatttgctaaggaaaattaagcaacatgtgcgatggacatggtggagtagtagtgtagtactattacttgggaaattgtggttctgtggaaaatgcgagctaaagaaaatgacttctagttcggctagtcggcttacctagcttgtaatattttccttctagtaaacgtggtatcatagggcacaccccaaaattttacaccatatcacatgaaacgtttaaacacttgcataaagtactaaatatagaaaaaaaataactaattgcatagatttcgactactttgcgagacagatcttttaaacctaattgtttcatggtttgacaatatggtgctacagtaaacatgtgctaatgactgatcaattagtcttagtaaattcgtctcgcagtttactaacggatactgtaattagtttttttattagtgatcgaacaccccatataacaccctatataatacccgatacgacacgctaaaactttacacttctgcatctaaacattcccatagtactatattagtagtagctagtgtagatgacggcgtttaatcagaacacaagcagtggtgattagccgccgctattcttgcccaagagctgctagtttagtcatctttgtattgttattggatttgatctactcgtgattctcattaagatatgattgtataagatatacgtacgtagtaccggacacagttgctagtaataattaataggtatccgttaatcagccatgtgtagttcatgagaaagaacaaaaaaaaaaaaccgtgaacacgaattaacaaacgtgtggtctaacggccagtcactctccaaataacctccgtacctatgtctacacaaatttaattttgcttcgttcttctctgcatatcaacgaattgaacatcgaaaaatattcgcacgctctcactcttgttgagttcatacaaccgtatcatagtcaagtggtcatgtcagatcgatcaactaatatttggcaccgttttgcaacttacaatctgcacgtacgtactctccgtgcctatgggaattttcacgtaagccgatcgaactgggtgaactccttgtcgtcggaatcgtgctgtgatacgatgtttgacgcttaccggatggaactactccacttgatcgaccatgaactgattgtgtacacaccgacaaatgtactcaagcctcacgaattaacatggtgaaaatttccatggaatttctttcgctgacgcttgacgcgtgcacgattgatcacagctcgatccttgggcgctgcatacacgagttgccaccgtaaggtacgtgacgatttcgcgagaaatccttcgcgtggagcagtactattccccggacttggaacactcgaataccagccactcgaataccagccgtatgcagtccaagtccgcgcgcgcacgtaatcggtgtcggtttcatgcacgtagatcacggtgacaccgccgttttttatcccgtggtaaattttcccaacgatctctgcatttgagattgttcgtgtgttacaatttctaaaataaacacccgtcgcgatcggggcttgagcggcagatggcagggaggcaggcgcgatacgtgcacgtgtccaggttgggcatgactccgatcccccgtgcgtggcaagtggtgacgtacacgcgctttgccccttgacacgtccgttaatttcatcctgcttagttgacttctaatactgctttggacttttggtaatttcggagttgtaactactagtaccatccaccgcacagctgtacgcgcaggaactggccgactggtttttgtgtgtgtgtatgtgtgtttggatttcaccgtacttgcagtcaactgttgctggcatgcaatatatttttttaagttgttgttttgttgctacagtgccattgcaagtttgcattctgcttataagaatgacgtgaaggagccataggacgtgtcgagtagtgtccgtctcattgtttcacttatacttatgttatttatgttcgtacggtttactaataaaagattatggataaaaattttcacatatgtgcccttattgatttgattgaaaagcaaatgcaataaaataaattacaaatggaaacactatcaaatcaaatatctctattattataaaaattgaagatgttttttgccggtactttggtacgtcatccgtgtatgggtcgatttttaaattttttcgcttttagaaatacagatcacatttgaatcgtgttttaaaattgtttgatattagaaatatataaggagtcgcataaaaatctcttttaaaaaactcgcttttctagaaaaatatatatatctaagtgaattcccacaatgaattttatcttaactaaaccgtataacaataataagattaaaaataaccttcacccgtttacaacgcacaaattttttttagtaaaattaaaaattaaaaattaaaactttgattataagtataagtgaaaatgacgaggctgtgtattagggttgcatgcactggagcaacacgaaaccgggggagttgaccccggagacgaggcaggcgtaagcaatggaactctctgattgtttggctgctacggcgtctagtaatgcctattggtcaaaaatatatgcggccaacctgaagcagataattgttgattcacacggcaacatgttggtgcagagggcaagcaggaaaaggggtcattagattctcgaaattagttgtggtgatcgatgcttgcacccagcatacatcgatgcattagcccatgatctatacgtgcacgttttagcccgttctgtgatgccaattcgccctccggatgtcgcagccgttacatatcaccaacccaccagagcttccttctcgcatgaccggtagaaagacctggacgaatttgtgcaggtgcatgacacatcacaccgcctgtcgtcctaaggacgatgtgagttgtgacagagagagacagtacgccggcccgccactggccattactgagagcatgcttagggagcttttaactactactttctctcagaatcagaaactcatttaaacagttcagcttttgattcagattctgaggagttatagttgtaaaatttagaaaataaactagaagctggacaatcgagtttttctatattgtcaaaaactgactatcaatcagttgtttctcagttttttaagcttctcaaaacaagcaatgaggctaaacaagcatgttgattggtgaaccgagaacgatgggccgtgtatacaggaccacgatttgcactgggttagtcaggtagaaagactctcctgggtctggtggttagcagtacaggtggtggacctatcaaggaatttctggttagatttgcatgaatatcctttatatttggaacaaaggtagtaataaaggggtgttaaattacatgtcacatcaggtattatatacggtgtcgtatgtggtgttcgagtactaataaaaaaactaattacagaatctgtcagtaaatcgcgagatgaatttattaagactaattaatctgtcattaataaatgtttactgtagcaacatattgtcaaattatgtggcaattaggcttaaaaaatttgtctcgcaaattagttgcaatctgtgcaattagttatttttagcatatatttaatacttcatgtagatgttcaaacgttcgatgtaacatgatgaaaaattttggagtgggatctaaataaaccctaacgctgagttcttatctctatttatccaactcacctccctcgtttttcgcgtgcacacttttcaaatggctaaacagtgtgttttttgcaaaaactttatatacgaaagttattttttaaaaaatcatattaatccattttttaaatttattttagctaatacttaattaatcatgcgctacacgttgctctgttttacgtgttagggagggagggtttgttttttgcaaaaactttatatatgaaagttactttaaaaatcatattaatccatttttaaaatttattttagctaatactcccccatctacttttgatagtcatattttatcttggcataagtaattttacttatcatctatttaaacatgctattagtcattccttgtaaataagcgattcattaatatgtaaatttctcgatacccatgtagtcaatcttgtgaagaagaatggagagtcacacattaaatccgagaaagctattaagatgatatgttgttggattgaaatatacctatcaaaaataatttttttagatttgaaaatattcctatcaaaagtagatggagggagtacttaattaatcatgcgctacatgttgctccgttttgcatgctagggaagtgagggttcccaaacacacccttaaagtatctttagagttctttttcctttctactctttgcattttctctcctagagtctcttacgagggataacttatcctctctctcctaattacttcttttctccatctcatcatctaagtttatatactactcccttcgtcccataatataagggattttaaatttttgcttgcactgtttgaccactcgtcttattcaaaaaaaatttggaatttttttgacttactttattatccaaagtactttaagcacaatttttcattttttatatttgcacaaattttttttaataagacgagtgattaaacagtgcaagcaaaagctaaaaatcccttatattatgggacggagggagtaccattttaggatttgtgcttagaagcttatgttatattagtacttttgtaacaaatatgatgaacacttacgtttgtcactcgccgttgctactacatctgaatgtaacaaatatgatgaacagagaactcagggaaggatataaaggaaagcgatcaacactgggtttaagccaggtagaaccttttggagctagggccggttcaatttaatgccattttcaaccttaccaagttttgataaagttgctaaaaaaatagctatatttagtttgctgccaaaatttgataactatataagaaatcttgccaaaattttgacaagttaccaaaattttagcaactatgccaaaattttggcaatgctaaaatttgataaaattttttttagcattaaagtaaacaggcccttatatttcacaagcaacggattagacacctttagttttctactctagtgttatacaaagtggaatactcgagttccgaacagccggtaacattgatttattctatacacgcgacacacattttttgtacagagatgacattggcactctttatgtttacatgtaaaaagtccggcaaacaagctactgaaccaagtaaccatcatgacacggtcgaaccacatatgcacgaactacggcaccggatgatacgagtcatacaactacattttttttagataatggagtcatacaactacatgcgacgatatgcaatttctcaaggatgcagcttcttcgggatagtagccaggtcaagcgtactgccatacatcttggcgagagcctgtccgcaccagccatggccatcgtctagcgttggcatcctcacctcaatgaacggtggaacagcctggccctgaggcttgacgacgccggcgaataccctgaggacattgccagcgtcgatgtccatgcagacattgatttcgacggtgccctttgctgctgctggaataccggtgatcttgaagtatcccaatagatggttgtcttcagcctgattcccttcgccttcatagacggcaatgagagcttcggtctgattgtcgtgggttgtggtaaagagcatgtcccttctcgcaggaacagcagtgttccttggaatgattgcggcgaagttaccgccgtcagcacgaattccaaggttcattggagttgcctgaattgtcaacagatccaggctccctgaagggtcagatactcctgaggcaatggctccttccaaagcagcccctgaaactgcagcttcaagtgggtctataccactgtaagagtcgtccttcttgcataagccaaggacaacgcttctgattttaggaattctggaacatcctccaaccaatatcacatcattgatgtcctctggtgttaactttgcatcagccaggcattgcttgatgatcccttcacatttctcaaaaatagactgattcaccttttcaaattctccacggtccaagatctttgacactttgtggccagcccccaaatctacattgatctccacatgctcctgcgtagccagtttgtgaattgcatcctgagttgccatccggagtaagccaattgacttgattctgtccattgtttgaccagcatatagactatcaaaatcaggcatgagatggcgcatgacattctgaaggatatcctctccaccaacagtgcttcctgaaagtgctcttatctgagaaacacctccagcagtggcagccacagcagcatcacagtagccagcacccatgttaaatatcagagcaattttctcaatgccacttcccatattgtcatgtagcaattgctgctgctgttgggcatacaaaagtgcgatagcggtcggctctggcatgagccgtaacacatgcagcccagccatcgcacatgctctctcaatcctggtctgttgaaaccgactgaatgcaactggaatggtaagaacagcattcctcaccggatgtttgagatgcatctctaccaaggccttcaattcaaggagaaagatggcaagaacttcttcaggagtggtagaccgccacatattgttcaccagtgctgcaatgaatggtctcaccccaatacccaatgtctgcacaagaaaaggaaggctcttgctagcttgaaccacttcatctgtgtccattctcccaatcaaacgtttcatgttaaatatggcacttcctgacaaaatatctctttcctcatgtccatgttcccgggttgctcctcctgtaactcctgctgaaaggctgtcatctttgaacatcacatatgacctcatccctttctggttgcgagtgtttttgaggagttcaacctgatggccagtccaaacggcaacactacaatttgaggtcccaatgtcgattccaatagcaacatcaggaaacgacatctgcgacttatcttccccagtggtttcactgtcagatgccacagtgtataattgttcagtcatcctgcaaacaatgcagcgtcagtattgtgtacctaacattcttcttgttctaaaaagggaaaaagatctggttaatccaaactatgcccgccatttgaattagtagttttaaggccaagggtttatgatagtactattttattgcatttgcaaaatgtaacataaaagtgtaagccaatacataaggcaaaaaaacaagcaagaaaacagaattccaatgacactcgatgaaacggtgtgaaatcctagcaaaccaaacatgtccatgactcagaaatgacctattcgagccatttaaaggagctacccatgaaactatttcaaaataagcaatccattcaagtgatattttctgaatcctaacagtatttccttttcttttttcaggagtcctgacagtacttgtacatttcacatacagataaaaagaaattccttttttttttctggctctgtcctcatccatgcatatcggactcacttgatgcacccgcgaaggcagcttgaattatagataaccaattcgcgtatttgaaacaagtaacttgtcttgcagtacagttgtatatagtggtctcaactcatgtaactagatgacactatcctggatcgaccaaggaataagattgctaaaaaccaatgaaccaagtaatgagttgagttctctgcgacaagacaaacttaggacttagtaggtcacgtacttcgattccactgattatgccaatttcatgccttgccggggttcaggaatttctccaacctctagcactgacaacaacacatccaacatcaacgggataggattaaatgtcgggattttccagtagtaacacctagctactagctagcagacaatcgcatcgcatcgcattaggcttccatcaagagaaagtattcagcgaccacaacaggttcacagatccgggcttacagttacagcactacgacggggaacaaaccgaagcaggtaaagaaaacaaggcaagcgcagggtgtgcggagatacctcgccactcgatcgtgcgacggagatggccacgaaatccgggactctccggggcggcggttgctgggagggagtgcgggcgaagacgaagcttggggaggcgaagggtggtgggagcgagcagctggactggagccttgaagaaggcggaggaagaaagaaagccgcgccggagttttccggagaggacgggaggcggcacgcggcgcgcacgccgacagtgcggagccgggctcccgaagcgtcgggaagcggcgagacgccgctggagaagaagcgtggcttccgtgggcctggaaatgcagcggagatctaggcccagtgcacacggcccggatactagaccaaatttcgtatagaaataggcccatatgttttgggaggtacttggggttgggccgaacccacgaacgctccgggctgtaaaagtccgactagttcagatagcgtgctgggctgtaaaagtactccatctgtcatcgtgctgtgcagatgcacgttcgaaagtgatgctcctgagctattcgatggcagggaaactaatctcgagcgattaacgcaatgatgattaattaaatattagtacatataatatgtaatatgctcggactttggcacatctgaaagcaaagaatggcttaatatttcagaacgttcaaccttcctttcaagcatggagatttttttttgtcaacgaagttcttctgtatatgtgtagaatgaaagatcctttaaagcaaactgtttttaattggttacaaaccttataatcttcctatgtgaccctcgtgtaactctgtaatcttgtaaatattttctttctttataaaattatactgctggacaaaaccctggcagtatttccggtcaaaaaaaaatatgctcggacttggatttaacgtcgttttctgtaatatggcatgttctgtagtttgtgttactccctttgtcctctaatataagggattttgacaatttttctcgcgctgttttatcattcgtcttatttaaaaaaattaaaattattatttattttttttacttactttattatccaaagtattttaagcacaactttttgttttttatatttgcataaattttttgaataggacgagtggtcaaacaatgcaatcaaaatatcaaaatcccttatattatgggacagagacagtagatactattatgtaatagtttagaaatttgttacgtatttgactaggtcttcctttgtaactaaccctacctcccaacctatataaggatataatcataactcgattgtatacatacctagcggattcaatcaccgaaacaggactagagtattacttattatcaagaatggttgaatctgtttagaccttgtcccttttactcatactccttagatctcgtactatacgcttttttttttatcgttgatctagaaaatcgacaacgggtttatttgagtctttttaataaaatcctaccgtcctacatagaactttacttcaaacacacaccttttataagtttaaaaaagtgtgctgatgataatcaagggattagctcatcctaacagaaaaaaaataacggggcctaacctaacgcttacactaacagcatctgggacacattaagctcgtgagaattcttaaggatgttttagtttagtgttgttttggtttgatgtcaaattttgctccactaaactattggtattttaaatagtgatttagaaaggtttggactgctgccaaaagttaccaatacatatataaattgtaaaaaacttatccgagttttagcactataatatattaagtactttgaatagtaatacggtaatatttggttagctgtcaaaatatgccaatcagccatataatatgctaaaatattggttttggtattgttaatattttgatacgatagtaaaccaaaacaatcctacatcatatagtacaacggacaccttgtcaaaataatctagcctaagttgttagcccacaaaatgatgaccacatcttaggcaaaattttactggcaaattttagtaaaattgtgagcaaatatatcgctagtgggtctaagagtgaaaaatccgtggcacattacaattgtgggaacaaacaagcgtttcataaaatgtgacaaagtttcataaactgtcataggctatcaaacaacccagttggacataattaggagggagatggagatgtgccccataataacattttttttgaacgactcgcacgagacggtgcgaagttctattgataaagcaggaaaaaattacaagattaaaaccctgtagggtcgtaatcaggaaaaagaaaaaatataccaccacccacacaccgacatcgccaacacacaagccaaggagaaggctagcaccggaccggccgccgctaagcgtgaccgaccgctactagaccaacaaagggtcccagacaagatcgcctcctaggggatgccaaaacgacgtcttcaagaagagaagcgagggaaaagccgccgccgtccgtccgtcgggactcaaaggagccaagactgggttttcgcccgacaaacacccttgaggggtgagacagcacgacaacgcccttaggagggggaatgaaccatcgttgtcggtccggccaaggccggactgagttttcacccgccgttcaccacctgcaaatccacgactgacgcaccgatgccctaccaccacagaagctctgctgacctgtgggacccctgcaccggcgtcccctgccggccagccttcgagcgccgaagatcgcgccacacccaccggcaactcctcctcacacctaggtcgcctcctccatcgccggccgcgcctctcgtgccaagccggccttctccaccggacgtgcctctcgcgccaatccagcctccctccatctgtcgcgcctcttggccaagccggcctccatctccgccgtccgcgcctctcgcgccgagctgacctccgctgccatcggctgcgcctctctgcgccaagccggtctccgaccctccaccaaacgatgccgcggcggccaaatgtagccgtctcccactccctcggctagccatctgaggccatcatgcctccggtgaccgcaattacggccaccaccaccacagccgctgctgttgaacgcctagccacctcgccgtcgccatcctcaccgcgcacctccacttgctgccaccagcgacccgcatctgccgacatcgccagcgcctccacagtcacagccgccgcaaatcggccgctgtcaccgctgccactgacgccagccactgccagcggccgcttcgctgtcgtcgtccgccacgtcgccgccaagtcctccataggcgtcgtcagccgacgccgtcgccgccaactgccgcgaccaccactgtcgctgccgtcaccagccgtcgcaagtcagccgccgtcgccgacgaccaccgccggccaccctccagatccagccaagaggcgcagatctgagggagaccgccgccgagcaccgcgccgccgctgcgtagggaccaccgcagccgccttcgcgcccgccgcaatcgccatccccgccgcctgcaagcaccaacgaccggcgtctgcgagcaccatcggccggcaccgcacgtgcctgccccataataacattagttatttatcttttcttgactcattaaccgtttgattgttggcagagaccgaaactttaaaccatttctatgaccccaagagggatgttggtaaccaaacaacctctaaacattttgccgatgtttgatgggcagcaatgtttttttccttcctttttttttcggtgatcgatagtagtagtagtacgtagttacctttcaccggcagagaatccccaatacgaacgacgatgactcgaacaagatctaatgataagctcccttagctcgcgactggtgctctgaacaatcatcattcgcagctcaagcttttccacaccaagaaaattcaaacacgcctgctcacagctcatacagaagacgacccggaccgaaaatcgtatcagctaatcaatcatactacccggatacccaaatgacaccacccactgcacccctcctttccctttcaacgccaagctgcgccaacaataattaccacgccgcgaaaaaaaaaatcaccggacgaccgaccgggataccagacaccgcacatacgcgcgcggtacgatctccactcagtacaacacatccagcaggaagtactccctccgtcatataagagattttaattttttgcttgtaacgtttgatcactcgttctattcaaaattttttaaattattatttattttatttgtgacttactttattatctatgttactttaaacacaacttttcgttttttatatttacaaaaataatttgaataaaatgagtggtcaaacgttacaatcaaaaagtcaaaattcaaattccttatactgtgggatggagggagtagcagtggtactgtaccactggtagcatcacccagaaaacacaaaagctagctagcatcattgtaccggctcgagcacggacacggccccatcttttccgcgcttatgccgcgctgtgccgacggccgcggctccctgcgacgcgccgtggcatccgtcgtcgtctatcggcctcgccatgcacgcgcgcgcgcggagcgccgggccagtatcagcgagagggaagaaacgccccctggccacgcgcgtgaaactcgcagagacgatgggtaaaaggaaaacgctgtatcagcgcgcagcaggagccaagttgccaatgccgtcgtctgcatggtagccgcagccgcggcagcgacgcgagacgtggaggatgccagcgagcgtccgcgcttgcgttcgttgcagcttgttcggaaccccctcttcctcgttttccacgcgtacgttttttaaattattaaacggtatattttttaaaaaaatatatatatacgaaagttatttaaaataatcatattgatcttttttttaaaaaaatagcaaacacttaattaatcacgtgctaatgaaatattccgttttctgtgccagagggtagcgttcccaacctcccacgcaaaaacttttcaccctgtcacatcgaatgtttggacaaatacatagagtattaaatattaaaaaaaactaattacacagattacgtgtaaattgcgagacgaatcttttaaacctaattggttcacgatttgacaatatagtgctacagtaaatatttgctaatgacggattaattagacttaataaattcgtctcgtggtttacagacgaaatttgtaatttgttttattattagtctacgtttaatactttaaatgtgtgtccgtatatctgatgtgatacgccaaaatttttcagcctagatgcataagattggtggcatgatgtctcgttcgttggacacacgcagcagcagccatcatgctgttgggtgcagcaagaatgcacaaatttgcacgagaaacagtgaacggataaagattttattgaatgcttacttcgaattcgaaagatatatatatacagaggaagaaattccacgcaaaaggttggaaaaaggggggggcgacaagattctcgcttgctgccgtggactttttacgggccatgcatggaggacgtaaggtggcaagtacgttttttataagaatcaaatttagaacagttatacgtttcaaaaatttgaaaccgagcccccaggatttatcgtggggggccggaatcgcgagtcacgactgctgcctagcttacgatcgaccaatggatggcccaggagtaaaaagggtgagagccgaggctgccagacgcacacatgtattccgttacttgcgttgtccctgcctgcagacattgtcacggccaaacaagtgtccattgcatggggccggccatgaaatggccaagatcgatcgatttggtaaattaaccgaagacacacaagcgcggcacatggcgcaatggtcaaagatgcccgaatccatgcgcgacatgcggcaagcagtgcgccgtgccccgggattcaatcattcaaacatggttgacaaaacgttttcgaactatagttgttaatgactactagcagtattatcatcagacattcgagtagtatatataagaacatgtccatgataataatagagtaatagtggtgcatggtctgaactggttttgctcactcagctatagtaatcagctgtagtgtagagcaaggttgtcaggatcgggatattagacagtatcgttttcctcaaagtaatatcgtatcgtagtatcgggatactataagatttctttttttaaaagtttaattaatatttatattaattatatatagccattatatattaaaaaatgtagtaatgatatatgtcatgcaaatagagacatttatcaagagaaaccacgttggtttgatatatttaactaatttttatataaatttgagcatatttatttacattattttcaaaccatgttattttaaataatattttgtagtatcgtagagatcgtagaatcgggataccacctaagatttcgtaggatcgtgtagtaatgaatagtaggatcgagatactatgaaaattaggatactaggtaggatcggtatcatttcggcttggtaggatcgtagtatcataagatactagaatacgaatcgagatactaacaatcttggtgtggagtgtacctgagctgctcaggtaagtgccccacgagtactggagtactttgtacgtaggagtagttcactacactactacagtgccgctgctgccagcttagaggaggtggattggtgtggaagcagtagtaggtgaagcaaaacgcagacatgtggacccacatccgacattccgcgtgatctccggatggtccacccgtaagcttctgtccccttgtggcaatgtagctaaccttttacctctctctttgacatagcacccattgatcaggcacctatttttctcactgactcgaggggaccactgtctccgaaggtcgtgggcacacctctgataagcagtagcaacagcaggtttatcgaaagaaacttcagcgggaacccttttcgatcgatcgctagcctttgagaaaacaccaaagaattggatgagatacagatactcctagtaacgagcagtaggtactcgatctcttctatactaaccattgtttgatcttacctaaaatgcattcgacaaagaaggaggatgatgcatcgactgtacatcgtatttcaaattaaacttgcgtcttgcttgaatggtggctgaataggcagtggatgctgctgttcgctacttggtcggtagcttttgactgcggtagttccagccttccaggcttacctaacctgaagtcacacctcacatgcatgcatgctcatctccgatttaccccttttctcccctggttaactagtggagctagctagcgcagagtgccattttggacagactgaaaatggctaattattcttccatcatctttagacaaagagaagtgcttcagttttatgcatgcatgcacgctcatttggaccggtacgtaagctggaaattgcggtcaatctacatgacgcccatgtgactagcagtacgaaaactggggaactattctaatccctcgagagatattctctcgtttgcttaaaaaccatctaaacggttatgaaaaattctggaaaaatttgacaacattcatacaacacatatatacaactctacaaaatcttaagtccaaactcaactcacacgtcgagatataaaaaagacaaattcagcgtatgaatagtagcgtatctaaatttgtcttttttgtttctcgatgtgtagatcgaatttgaacataaattttggtggactggtaggtatcattatactctacattgtcaatttttttcagaattttttacaactatttgcatcgaatttgaaagaaaaagttatacgaggggatatcccctcgagggattagaatccacactccgaaaactgatacaccgtactagctggtgatcgacattgttgaataatctcgagatgggaactaaccgtacaaatatcgatctgaacccatcttggtgcagggctgcagagtgcagagtaggattgactagtgccgtcagttttctcatccccatgacggtccgatgggaacaaagcagcactatgacatgcattcctcgtatctcccttaaataaacatcactattgcgtccatcactatgcttttaaggtccgcatcatttcgtttattcaggaaataagccaaacggtatatttctaaatgaaaaataatttataaataaaatttttatatacatgttcttataacgatataaaagtaaaggctgaaaaataaattttgaggaaaaaaactctaaaatcaatctaaatttaaagttaaaaatttaaattttataagtataagcgaaaatacggtgccgtaattatatatatcttgtttatttctaggacactcaacgaggtagtagaagaatggttgcctctgctgtgcaaaccggcagaaacagagcggaaatgtcaaaaggacttttatcctacctgaccttttgtagcgcaattgaattgaaacaaactcagcagagcaagctagtcgtgcagcatcatgtagtactacactaaaaaacaaactaatcacaggcttagaaaagaatgtactacaagtagtaatcatgagatcgaactacacctcacgatttcacagtttcttttttaggtcttgaatcttgattcacagaaatggcacaaagttaagcataagctgctcttttcttactttgccagctggagaagaagtcctactccatatcatgtgtacacgtctctattctctttgaaccggaagtccgaaacagtggaaaccaatcaacccagccagtcgggaaacaagagagaacaaggcgaacacacatcgattccatccgtcaccgtcgatcaatctacgtacagggcctcgcgcgcgcttccaccgccgcgcgcgacatgaccgacggcgacgtacgtggacggcagctagctagccggcccactactactcgatcgatcggcttcccgaaacgctcgagcgcgcgagacgtactacgtacggggcaggcggcactcgccagccagtctcatcgcgcattcgcgcggtgagtgacgcggcctctctctcgctgtccctctccgggattccaccgagcgcaacgcgacgccgcgctcgcctccaacccgcgccttgcttccccatttagtcaacccaacccaccacccgcccatgcatgcatgcacgcacgcacggtggcgctggctgactggctggctcgctagctttttctctcccccttccccaccacggctgcctcggccctcgggaaccggaaataacaacgggtgcatggcggagtacacgctgccgcggccggggtgtgtgtaagccaagcctgccttgctcgctcagacacgcaccgtacgtggccgaccggccgtgggcaggggtcgcatgcatggcatggaggtcgtgcgcactcatctcgtgctacgtacggtgctacccatgttgcggggctctggcacggcgagtgtggtttgtgggtggtaggaagaaggggacgagagttgccgattttgtttcttcctcaagttttcgatgttttcctggggatggctcatggccgggcttcgcgtcgattgcgcggccggcgagcttgttggctttccgtgcggccgcttttacgtacgtacgtggtcgtcagcgaggtggtagcatagtagtacgtagtagtaggtaaaattgcagccttgcagggggctcatagccggatcgatacggtcgttttgttgcatgggccggaccgccggagtagtagtttagcacgctagatgtatggcaattctccggttactttgcactaaactaatgacggacggagtctggattaacggctaggagtacttttttcaccgaaaaagaactgctacttttgttttgttggaggcagccagcataccgaagtgcttagatgattgctattccacctgcgtttcatacggtaagtcatttgtttttttagtaaaatctaattaagatcgaccaaatttatagtaaaatttagtaacatctaaaataccaaactagtttaattaaattaaagtttaatatattttgataatatttttattttgtattgaaaatactaatatatttttttaataaacacatttaaacttgaacaagttcgactagaaaaaaatcaaacaatttataatacaaacggatagggtacttaattgtaaagtgtgtttagggggaggaagggattttaaatgtgaagcgttaagatccacacgacaaacaaaatgctggggtggccatcaccacgtacgccggggcccctgtaagccatgcaaaggagactcacaaggccgtggactcttgctaatgacatcgatggaactgacattttatatcagtatattaccaactaactccctccgtcaaaaaaaaaaagagaaaccccgatttacgcataaagtattaatcatgttttatcatctaataacaaatgaaaatactaattataaaaaaaattcatataagacggacagtcaaacgttggcacgaaaatccagggtttgcttttttttttggaacggagggagtagctagcgccaccatctgaaaaacagtcacttcgtttttattttccaaaataaaatactaggagaaagacgttctactagtactagcgtacaaaacaccgcaaagtatatcttggagctttccattgccaaatacaaacagcaatcatatactaggagtacaacgagacaatataagttcgatcacaaattcacagtcatgaattaatcgtagtactcgctccgtccaaaaaaaaaaaacttaacttataaagtttaaattttatctaaaaaaaccaacttctaccatcctacctaatccctgcacataaaacgagaagttttatttcttaaatactttttacctacctatcaacatttctacgttttccaatacggaaatgctaaataccgggataccgttgctagccttcaatacgagatccttatcctctcctagcctcacgtggctacggataagaatggcgcggagacaaccaagtttcacgacggcgttgcagctgagataacctatttcgtgcgaggttgcgccgtggcatccgtcaccgtcgcgctacgcagctactcgcaccagctgatgacagcggcggcgcgcggggcttggccgtcattgctgaatcgaagagaggtgccacgttgaggagcagtgcgagcttggagtcggagctgatggacgtgggttgtcgcgatggccggggatggagctatcgtcggagttgatagacgcagagaaaggaggacacggccaccggcgacgagctccgatgtggtgtggacaatggaggatgcggccgtcgctgatgagctccggcgtggggcgtagatgacggaggacgcggccgccggcgacgagttctgacgtggcatgtacggcggaggatgcggccatcggcaactagctccaacgtgagacgtggacgacggaggacgcaaccgccggtgacgagctccgacgtgacgtggactatggaggatgcaacagtcgtcgccgccgagctccgacgtggcgtggacggtggaggatgcagccgccgccgacaagctccagcgtgagacgtggacgatgggaccaccagcgacaatgctttggtgcccgactcctgatacctcggaagtatcacctaatacgtggtaggaatcatctgatacctaataagtatcacatgatactttgcaagtatcacctgatacgtggtaggaatcgcctgataccttataggtatcactagatacctcataagtatggcctgataccggttaggtatcaggatcccgtcccaacaggatttcgttgtatagcagctctcttttcaataatgagaggcattttggtcatttttactcttcactaatctctccttagatgctaggaatggactttttgtgggatggagggagtacatgtgatcattgccgtgttcaagattctattggcatgctaaggccttgtttagttgggaaaagttttttggtttggttgtcacatcaaatatatagacacatatttgaagtattaaatgtagtctaataacaaaacaaattacatattccgctaggaaactgcgagacaaatttattaagcctaattaatttgtcattagcaaatgtttactgtagcaccacattgtcaaaccatggcgcaattaggtttaaaagatttatctcacaatttacacgcaatctgtgtaatttgtttttttcttatatttaatacttcatgtatgtgcataaacatttgacgtaacagcgtgaaattttttttgtttaagtaactaaccatgacctaagtttcgaccaaagcaacaatcagcaacaatgattgggcaacattaattaattagttttaggttcgaacatacctatctgtaggtagtaatttatttacaaatactccgatagggaactccatcaaactgacgggatcaagtcttgtccaaattgcccggcctgttttcaaaaaacaaacaaacaaacaaaccttgtccaaacttccgataagatatttttctgtatgcaatctgaaacgtagaagcgattccattcacgtaggcaccaaaacagaaaaactgtgggacacattgtcacgtcaatttcatggccagaacgcgcacacgggcacccactagttacagactaaactcagacgatcgagctgaaggtgaactctgataaattaagacagtgtgatcaatcattgcaaattcagagtaggtgtgaaaaccataatggtcactgtttctgttttttacggactgcattggtatcataattcttcagcggaaatgctaaagggcgatcgctcgtctggagatgggggtagcgatcaattcgccccaccctgcctccccattcctctctctccacctggtttcctattttgacaccgcattactttcttattttagtaaatttatgcacctaaagtttatatatctcaagtttacacatctaaagtttagagaccaaaagtttataagtcaaaagtttatatatccgattcaaatttgaatttgaattcaaatattttttttatatatagtatttctatacatctaaagtttatacacctaaagtttatagacctaaagtttatatatccgattcaaatttgaatttgaattcaaatatttttcatatatagtatttctatacatctaaagtttatacacctaaattttatagacctaaagtttatatacctgattcaaatttgaatttaaattatattcgattcaaatttgaatttgaattcaaatattttctatatatagtatttctatacatttgtgcaaatatgaaaatatttatgtcatgcttaaagaacatttgatgatgaatcaaatcataataaaataaatgttaattacataaattttttgaataaaacgaatggttaaacattaaaaaaaaagtcaacggtgtcatacattaaaaaaatatggagggagtaagacctacccgttttctctaggtaaaaaacactaggaatctaccgagagaccaagtaggttatattcctagttggctagtactcctagttcggttccactcaaccgggagcatgcaggttgagcttattagctggtggaaggtggtgacctacaagctacagctcgactctacgacgtccggatgagaccaacacgaagagaaaaaggcatattaggtggctatacatgtcgctgtgtgtggcgctgctggcgcagcctgcaggccaagctgccaaaaccgcaggacacgatgtgtgggatcgtaatgggaaaggcagcgcatcactctgataatgaccgagatcacaggaatgattgccatccccaacagagcgtctcccgtctttgtcaatgctctcgatgtcatgcatatgccccccccccccccccctctcgagcgatcacaattcacaagctgtgaactgaagccagctgatcgatcgcgagacgacggccgaccggccgtgttgttggcaatggcatgcatgagcgcgaaggcatgcatatacgatcgcatgcatgcgctgcctcacgtacgtctaagcgctagctagcttcatatgcgcaagctctgcagcgagagctactaatccggcacgacaaagcgctaatggacacaccctgatcacaggttacctgttccatggcgtggtggttagcgcactagctaggcgagagtgcggtgacgcatcctgcatccccctctcccacacgtgcgaacagaagccgcatgcatcgtcgtctctcccctgctgccgccgctgccccgtgatgagctcaagttaagcgacgaatgcgacagccgaaccgcagaattactagctaggctgctgctgccacatatatgcgctcatggcgcagtgctgatatatagatagatgcaggcgatattgctgaatgcaccccggtaacagcactggagtatcagagaacatgcatctggttgtgagatggttaagaaaaagataactgtagtaagtgctcctggctgtagctactcatcagacagcctctgaagccgcctgaacctgcgtgccattagacgactgttctctttcagaaaatttgtgcatagataggatgtgcatgcttgggtcagagcccggaggtgtcaaaacggtactatctctgttcatgtcgtggatattagagcaaatttaatagtatagtcaactattagttttaaatcatgtaaattagtttaatagttaattcataacctataaacatattctacactattaatatctggttccacccgtcatacgcatattgtatcttagagtccgtgctgcagcgctagctatagagatatgtggtccgctgctcctctctcttctcttttatctcttcaaaatatgtttatagttggcttatacctactcttaatgtcgcatcttactaatataagaatttaattaactactactccctccgtttcaggttatacctactcttaatgtctagattcattaacatatactctctccatactcgtaaaagaagttgtttaggacaatgtttaagtcaaaccttaggaatataaatcatgaataactctcaagttgttgagtttgaaaatgtaaaaattatatgaatagatttgtcttgaaaaatactttcataaagtatacatatatcacttttcaataaatattttaatagaaacaagaaatcaaaattgtgttttaaagatcgtgtcgctgttctaaacgacttcctttacgagtacggagggagtatataaatgtgggcaatgctaaaatgtcttataatatgaagtgaagagagtactacaaaggcgattagcacacgtacacggtgacacgctaactatacacatgttgtcaacttgtcatttcactcatagccttcatttagaccaggtagaagcagggattctttgcattgtatttttttttcaaaactgatatcttcacgcaaattcgcgtaaaaacagtatactttcgatttttttggggatccatgaaaatgtagttcgaagatgcagcatgtgacactcttaattgcagtgcgacatgccaaccaaacctccggatctttggcactttgtacccataaattgtactccatccctggacatgatttcgccatcaaagaacaacaaatatataaatggttcagacttcagacggctgtttggtgattcagaagacagagcactgatgtctgatggtctcttgatatagttaccagatgtctgatggtcatgataaggtgcaatgggccattgaaaaatcttatctgtattcgctattcagtgaggtcactccaccatttgatatagcatatagagggttggtgaatctcagaatatggaaattgtgtgggggttcagagtccccgtggaaattaagttttcctttggcaaatgtaccatgaaaagatttaccttcgtaggaaatagactacctctagtgttaacaaaaccaattggttttaacgaaaaccgttggattaacgtaaggagttagatcaaatgtcattgtttttaccggctttcgcttggtttccagcaagccaatggagggtggtttttacttctaaaacagaaagaaagttggactgaagagatatggattatacttttcttctcctgtcacttgacggtttatatatattggtatgatttcttccctattttgtttccctgtcttgttcagttagatagatttgtaataagatagcaataattgagatgattctaaatcttttaaaatttctacttttcagaatatatcctggagcactctactttgaccagaggataaaactaaggttgatcgtttggcatgaaaaccatctattgaccctcatatgctaatataagtgggatacccctacttcaaataaaagagagagagagagagagaaataaaagaaaccattgttctttgactgcaaatttctttaacaagccatatgaacgtgcaatatatcgacatatagaataataatatttccacaaccattcatatataatctaaaagtatttctaatagaggcatcgatccatacaaggaaataaggaagccactctagcattgcaggaaacaacttacatatatgcgcgatcaactctaagagaaagccatgcaaaaagattgatatagaccactatttttgctattcatgatttaagcaattcaattatattggtcacaaccaatttgaacggctaaataagtcaacacttacacaatgcattatgtggaccccacttaactaagacgtcagatatgccataaataataaatatacaatagctaacggctataaaattttcaattgtaaaggcgcgtcaatcatatttggcacacttaactttttaaaagctagcgttacaagttaggttttaaccatgccgtcgtatagtagtatttatacgctttgttcaaaacacaacggtaatatgtattattagctactaccttacaaacataaatatagtctcaactatccttatatgacataaataccaacgtttttttttcataaatttttcaacgacttacaatactggaagtgttatactccactattcaatggacaccataggccgccgcagcaacccaggtcattttctagctccctgggactgtatacatgtatgtaggacccatgaattggtgaaaataaggatacgaatcatatgagagccctgaaaacatgaacccaaacaagggaataactatatatgatgatgatgatgatgatcaaataaaagcacaaaagggttgtggttctttaaataaaaccgaacgcaccaacacgggccgttattcgctagggaacgaatcgctagtcgccgaggcgaggcggaagaatacgagcaaaagtcgacgaccaaaccatgggggccagcgcgcgcccaaacgtccgtttcccgtttcgccgtcagcgcgactcggcgagcgagagagcgagcgagcgcctgtgcgcctgtgtggcttgaacggcacacccccgcccgcccacgcttataatactgtcgcttacgcctttattttttcttctctccttcatctgttcgtcctctcctctctcctctctctcgccctctccacactggcacactctctgtgaatctctccttctgttcctggttaattcgctcttcttcctctcgtatctccgccgcgatcgatggccatggagaaggtggacgccaaggagagggagaagatcgaggccgtccgcaagaccctccgcaagcaggctccgctcaccgccaagcaggttcgccctccatggctcgttttcatgcatggcgctcgctcgctcgcggtgctgcgttttcaatcggttttggttaaccttggtggtgcgtgcgtgcgtggatggcgtgggcgagcaggcgatgtactgcaacgacgcgtgcgtggagcggttcctccgggcgagaggggagagcgtgaagaaggcggcgaaacacctgagaaccgtcctgtcctggagggacaccatcggagccggtacgttcaacaatcccagcttccatttttctccattatttccatccatccccacatcgctcctcatttactccactcccctcttttccatgtttctgccaacaaatctgagtttcatcaagcgtgtgtgtctgcatccctgcgattttccggcagcagccgggggccctgattttttttgaaatccgtggggggtttgccacattaatggtggtgcatgcccctgctctgtttcgcttctgttctcttcgcgatacctacggcacagtgtattttagtcaagctactgtgcgcctgaatttattgtgccgtgtgatttgtttccttgcaatattatgcaagcaaagtacagtctgcaacagtgtacactcttgttggtattctgttcttcgtcgggttgggggctaaattggttgattttgtgccctttgttttgtgttgagcagatcacatcatcgccgacgagttctccgccgagctggctgacggcgtcgcctacgtcgccggccacgacgacgaggcccgacctgtcgtggtacgtttccatggcctccgtgccgggtgcaaattgacactcacacgctagatggagaatatgttctgatttgacagggaggtctttttttacaggtctttcgaatcaagcaggactacccaaagttccactcccagaaatcgtaagaacgaacagatgaacacttgcctaatttaatcattaacccggtcttaacaattgattgactcttgcttcttgctggatttaattaggttcgtgcggttactggtgttcacgctggaggtggccgtgtcatgcatgtcccgcttcgtcgaccagttcgtcctcctcttcgatgcaagtaagcagccatttcttcaccatttccaactattcccgtagctgtagtagtggtactagttacatctgtgcgtgtcctttctttctccaaagaagaaagacagcgacagtgagaaaatagcggtcgcgtttctcattgcctcgcacgggcaaggcagaatgggcagtagtggcatgtgtaggtcagagctgtgcgcactgcacattcgtggggatggctcggcgagaccttcgtcgcgcgcggcgcggcgcgcccacctcgctcgcacggacgaacggggccgcatggccgtgtcgtgtcgtgtcgtcgtgtgcggttgccggcgacggcttcgcggcggtcccgcggcatcgcgcacagttaccgctacagtggcaggcacggctgccgcttttgggggcggagaccccggcttcccgccggtgcggtttgaatcgtggcgagaatgattggatcggtgatgatgcgtggaaagcgagagccgtagaatctgcaggaaagtgagaggggttgacgagacgaatcgaatcttttttttaatttttttttcatgtgcaggctttttccggtcggcgtcggctttcctcaacctgctcatgggcacgctcaagatcgtcgccgactactaccccggccgcctccaccgcgccttcgtcatcgacccgccgtccctcttctccgtcctctggaaggtatacgtcacgtttgatttcgtgttcatcgcgatggcgatggcgagtgggagatgaactgaaaaaacgggtgcggtgttgtccagggagtgaggccgttcgtggagctggcgccggcgacggcggtggtgtgctcgctggacttcgaggactcgctggaggacgcgtcgttcacggcgtacccgcggacggcgtcgctgcggttcgagccggcggcggccctgctggcgaccgggacgaagggcatcggcgtcggctccgcctcgtcgcggttctccgtcaccgtgtcgcacgacaacaccctcaagccgtggtacctgtccaccaccacgccgtcgtcggtggggcctcgctccgtggtgccgacctccagcccgtccctcatcggcgcgtcgccgctctcggcgcgctccttctccttcgcctcccccgccgcgcgctccaccacgacgccgcccgtccaccgcggcgcaccgctgacgccgttctcgaccaagggcgggcagaaggcgccggcgccagcgcagcagttcccgcggacgccgcggccgtcgttcctgcagtcgccgtcgatgctgttcgcgttcaagaaggacggccaggccagccgcggcgagcgggagcgcgagtccttcctgccgttcctccgcttctaccgccgcccctacgacgagatatcgtatcgcgccaagatgcggccgccgctgggcgggctcatcgccatcgtcgacgagaagtcgaagcagcacaagacggtgcagccgccgctgcgacggcacgccgggctccaccaccagcagctgttccagctccaccaccaccagaggatctgatctgaactccagatgatctcccgttgctgaagcatgaatccaaccgatgaagctagcgttcttctccatacattttacagcataatccaatgctataattatgctaagttgatcttttgtcgacattttccccccagtatttacctcctaggatattcttcaacccgtgtaaaataacagccctaaaatgtgagtaaaatcgaccccttttgcagcctctcgccgtgactgactgcatgcatgttcatctctgattgttcatggctttaaaaaatgccctgcaaaatgccatgattttcaaaatattttcatattgtacgcctacagtggacacatgctatttcttcatttcaaacataaaaataatagagtaaattgcgttggcggtacaagaacttggcaggtgtgtgcgattagatgtaaaaatttgaaaatcaagcatagcggtacaataacttggctaggtgagtgcgctcatggtgcaaaagtagccatgtaaaaaaaattgccacgttgctattccaccttagcaaaattgccacatcagctttatatgaaagacctatctcattttataaaaaaccccaaatagctttttttttccaatcacatttcctttttaactcgacaaacagaacaaacgtatgcatatctccttccatctttcttgacgtgttcctaattgagaggcggctgcggttgtggcgatggcggcgtagcgacggtggcggcggcagtgacgacggcaacgagggaaaccgttacatcgccgcggcggcgagggcttcgtgtgccacattagttcaagccctaaaccagtaaccaaaccaattcaagccgacaatttgctaccgtcgacatgatcaccgtaagctttgggatggctctgaatcgacgagtttttggagcatctgctcctagcttattatggtaaatcacttgctgatggttgtagatttctatttttcgttcatttgatggatgatttcgaagttaaggtttcattgatctgtacaatggctacatttttttgggttttcacttgaatatcatgttatttgttattacaattcaatgaagtgatctaatggtactagccactagattggttttactgaaattattggtgtttcctgtaattgtatatgatataagagaaacattggcaatgagaaattcttgctagatgtgttgtacccttgtcagcagatataattagttgaataatttgcaaataatcttagtgtattattttccttatgcggtataacacatcaaccaattattttgtattgcaggtcatgaggaagaagaattcacaattgcactgtatcgtggtggattttttttttttttggagttggcagtagcagaatttatttggatgagaagatggactggtttgatcattgtgatacaggaggaaaacagatatatctgaagaagtaattggaatataaaagttattagggacttttctgtaaaatgagatggtcaatgcatgctcatgtggcactttcgctgaggtggaacaatagcgtggcaacttttgcaccatgagcgcacccacctagccaagttattgtaccgctatactcggtttttaagtttttgcacctaatcgcatctacctgtcaagttcttgtaccgctatgcacggttttttcaattttttgcacctaatcgcacctaacttttaagttcttgtactgccaatgcaatttacttaaaataatattaaaaaatcttgcacgcgacagtgtcacgttggtcatgcgacatatcgagccaacacagttggagggagaacacaacaggccagacacggcccgttgaaaattttgaaacgttgagacgaaaaagagagatgacatggagagtcccgacggttttttccttttcgatcttttacagtaaccctgtcggccacttcgtaaaacacacaaaagctagcgtcaccgattaagcagagtccagtatactagtactagtataaacagaagtctacatgtacgcatgtacaccttctgattttctgctaattttttgtcgctctccctctctctctcttctgtgtaagttggttttactttgagatgatgatcaggtttgacgcttttaagctttgtcacaagtgcttacaaaaagcaaagctgatgactgaattgaacatcaatttcttgtggaccaaatcgaagtttaaagtctatactactatgagaccactagtgtgaacagcctcttttttttctcgagttctgggtaaagccaagctagcacagtggacatgcaaatctttcctggcgagctactgctaaaacaaattgaaatgatctcctgcaacaacaatgatccagttcgctttcattgatccagatgcagcgtgatctgcttcgtgtggacctagatcgctttggttttgtcccagaagggaccaaagctggagctccattttgcttaggcgttaattaactcgatgtgcttagcgcagcgactaatcccatctttccacattaatcacttccccttttgagcccagcctgctgggatgttgttgtgtatcgagaggtttgtagtgtagctgagagtgtgacgtgcaatatccacatggaccagtgtgtagaacccatctttccatacagggagctcttacgtgcattccgtctgtttgaataggctctgtgatctgtgaacgtgttcatgattactcatcgatacgtttacttgattgcctactaaggctatcaaaagaagaaaaagataactgaactaaattatgattggattcatcttgaatccaaactcggtaactacagaaatactcttaaagaaggggatggattcaaactgagccacattttcagcctatgcgttcatttgcagtttgtgttttctgtctcgtttgaggttattaactgcacatgtacttctgtagttttgtcacactcagttggaccgaccaagtggttattgtcacaaaccacggatctaatcacagacgacgctacttcactattacgaccgatcgtacagaaaaacaacggacttaatggcagcagcaggaacggtcgctcggtggtgcatcggaggaatcacgctgtgtcaaggcgaaacgacggtgtcgccacggcacacgcgcacgcacacgcaggcgaggcgagcggagccgaggcgcagggacgagacgacacggcccgcacgcgccacgatggatcatctacccccccccccc

SEQ ID NO: 10204 - DNA, 11479 bp, Oryza sativa
ctttagccattggcaccagcctttgtggggcctccttgtctgcctcttttctcctcaaactatgttcactccatactccatgtatgcatcagcaactggttggtgccaatggcttaggtcatgaacttttaaccgttgcagtgggggttcggtgttaatcataaggctaacccttcggttgttactcggtatttatagttcagcatgcctgggtgattgtcatgtgcccttgtcagcactcagcaccctgtgccgagtgtgcgagagagtccggtcagtctctcctttgactggttggtgacggttgttttcccgggaccacctggcagtgtcactgctagtattaatggagtcacgtctcctagcttgtgcggcccagctggttgtcgcattggaggttttgccttgcctgcgcagaggcagcagcagagggcggtgcagcgtgcaggactggactgaactgtgcttcgctcgctgtggccatccgcatgaaaagcccgggattttgcgctgcgtcgtggtggtggtggctcctgtttccaacgtatttcccccgtaccaagttgccttgtgctttacagctagcttggtgtactcccaacatcccccatgcccatttttctgtagggaaatcgatgtgctgctgtatttgtccaactgttctttttcttgttgctactagtagttgtacgagttagggggtgtttgggagagagagggtaaactttagcccctctctcaacaacttacttcctgcgttccaaaaattcctccgttcttaaaaaaaaaccctgtgtccagattcaaattcaggagtggtttttttcggaggaataagtctctcggggagggactgtttttgagagaggtaacccctctctcccaaacacccccttagtgatcagttactaatcctccatttacatttgcatgtgatccttgtttgtcctcaatgatttgtcggagttttgaactgtgccgtatttctctttattcgtcatgttcggtacggagtaaatgaaaaataaacttgacatgagctacgttaacgttgtttatcttacatttttggcgtgcaggggcgtacatcggcgtcaacattggcacggccatgacgtcggtaccggcgccgacacagatcacgacgctgctccgctcgcagaacatccgccacgtgcggctgtacgacgccgacccggcgatgctcgcggcgctcgccaacaccggcatccgcgtcatcgtctccgtgccgaacgagcagctcctcgccatcggcaactccaacgccacggcggccaactgggtggcgcgcaacgtggccgcgcactacccttccgtgaacatcacggccatcgcggtcggctccgaggtgctctccacgctgcccaacgcggcgccgctcctcatgccggccatccgctacctccagaacgcgctggtggccgcggcgctcgaccggtacatcaagatctcgacgccgcactcctcgtccatcatcctcgactcgttcccgccgtcgcaggccttcttcaaccgctccctggacccggtgctggtgccgctgctcaagttcttgcagtccacgggctcgccgctgatgctcaacgtgtacccgtactacgactacatgcgctccaacggcgtcatcccgctggactacgcgctgttccggccgctgccgccgaacaaggaggcggtggacgccaacaccctgctgcactacaccaacgtgttcgacgcggtcgtggacgctgcctacttcgccatggcgtacctcaacgtcaccaacgtgccggtgatggtgacggagaccgggtggccgcacaagggcgacccgtccaacgagcccgacgccaccttcgacaacgccgacacctacaacagtaacctcatccggcacgtgatgaacaccaccggcacgccgaagcaccccggcgtcgccgtgccgacgtacatctacgagctctacgacgaggacacccgccccggctcgacgtcggagaagtactggggcctgttcgacatgaacggcatcccggcgtacaccctgcacctgacaggctccggcgtgctgctcgccaacgacacgacgaaccagacctactgcgtggcgcgggagggcgctgacgagaagatgctgcaggcggcgctcgactgggcttgcggcccgggcaaggtggactgctccgcgctgatgcaggggcagccgtgctacgacccggacaacgtcgaggcgcacgccacctacgccttcaacgcctactaccatggcatgggcatgggctccgggacgtgctacttcagcggtgtcgccgtgatcaccaccaccgatcccagtaagttcacaaaaccataagagattcctgctttccaaacatttggatttgagcttatttcgttctctctgttttcttcaggccacgggtcttgcgtttacgctggaaggtacgctctttttttcccctccccataacgtctttacattctcgcgatgtttgaaacagaattcaagtgcgtttcgctcaaatctgtcatttatttttggacgtgcagtggtgggaagaacgggacgtcgttgctgaacggcacatcgctggcgccgtcgtcgaactccacggcgggggactccggcgcgcaccgggcgatcggggacgtctcgtcgttcgtccgcgccgtcgtcgcggcgctgctgttgagcgtcgtcctcctgttgtaggcagtgagacgagagtggttagtttagtaggcaaggcagcagagtccgtaggaattcatggggggattctttttttggtgtcgagtgggattggcctcggtgttatgggtgggtggtgatcattgagaacgaacaagatgatgtgcctgtgttcatctgttgctctaagatgttgtctgggaacttggtattgggtggtacgttgcctggaaaaggaaattggtactaggttgtatttgcagaaggtgtcagtgtttgtgcgctgaccacaatcaaaatcttcttctgagccaactgcttcactcgtttcctttgttctgaatcgttgatcgattcatggatttttgcggctttccgcttccttcgatcgcgacgaacgcgcggacttgcattggttgggccgaaagggatagccacttacaagaggcccatatagtttgggccggaacggtgtaatgccacagctatgtgcggcccatagataccggcctccaccctaatcgtggtaatcgaggcctataaaacccagcgcctctgcgtctcctccatatcctcgcgcgccgccggatcccgcagccttggctccctccctgttccttcccttccatcaaagatccaatctgaatctgtttcttttctcgtttgcgcttcgaagaacagatctgttttctcgtcttctgattgcgtttcgatgtgatttgctctttttttcgaagcactcttctcgtttacaactcgatcgctgctgattcgaagcttgcgtttctgaagggctgccaaatcatactcgaggatctatggacatgcagcttctggtaatagattcccgcattttctcgtaggtccaacatatttttttttcaatgaaatctatatctatacctaataaaaaaatacgtaaggattccgatatttcttcgtccgtcatcccacgcgccactaaaatctgttttaatccgagtcgggtcggtcggttttcattgtattgcaaaaccgcagttgatatagtatatgtatcttccatgtaatcacataacacaagtggtaatttgcttgcttggttaatgtggaaaatcttcactccggcctctcctgtaataagtctactttcgctccctcgtgtaatgtgtctataggacctccttgcctaacgggtcgggccggcgcacgttgttttggcccttattttttcgcccaaaaatcattaaatgtttacataaaaaaattaatcactttgaaccatcattttaagatataaaattgctgtaaattttacatgtgcgttttaatttatttctaactaaatagaacccacgtgaagaacaaaaaaaaaagtaagtcttcgggtaaagtttttttttcatcgtccatcacacgcggaatcaccttcgtatatttcggcaataatttgtttttttataacgagggtttgtttagattgtagtcaaaataaaccttatcaaattttggcaggattttttatgtatttattagagtttgataaaaaaactaaatggatgcacatatttggtaactttactaaaatttgataagctttatttaagctacaatctgaacaggccctgacatcagtttcctaatctgcaaaagcgatataaaatttcaagatttggaagacatgtacaaatttgaaattttgtacacatgtatcatacaagtacacatgcaatattagcaatccatatttgtttgatattcacccgttacaacgcacgggcatatttgctagtcctatatataaattggttgtgtgatctccatgaaacaaaatcatcctctttggatttttttgtttgttcgtttctgttttgtttcatctgtttgcgatctggtcaaccggtttatggctcgatgatgactactcttgctttaaccacaccgaatacgaaggcttgacgaagcgtgctttgcccccaccgctacgttgtgctcttctgtctcgtcgattcctcgtgaaatctcctcgtgtcgaagaattagactgattttttcttctttgatgagagattgagatggatggattcggcgagattggtgagcatggtagtatggacgccaatgcctctttcgatggctcttcacatgtggaaaaactttggcctttactgagagcctaacaatcatcagtttattcacaagtctttggtgattctttttccagttttgaaactgctcgaggactttaccgagctagaattcgtatataattaggatgaaaataatttgtacgacaacatagcagatgcaacagcagccgcaatatgttttccaaacgaaaactgcagaaatctgaatagaacagcaaatgagacgtttgtcggcattgtcattgcaatctgattacgacaacagcaaattagaagttgttgacttgataagcatttacgtcatccgtcttaccaaacctgacttgctacaactaaaattatccagttacacgcacagggaccggacaggaagggtatgaacaccttcgtcgtcatttttttcaacggatgctactgctagttgaacgagttaagaagtggtcttttgcagtagatagtatagcagataaatagataaatatcattatcccagtatcaatcaagtgatcaacgaatcctgcgaccatttctgacgaaatgatttctggtaggatttctgactaaatgatttttgctaggatcagcgttgctcccagtcgtcaactggtgcaatgcgctgtgcgcatcaccgcagaaatatcccggtgagatacaaaagaaatcaacgacttgctcaaagtaaaaccaaagcgaatgacaggacaaacaaattgacagcgctcaccattgtcaagtgccaacgacgcgcagctgccaacaaaccttcattaactagggggtggccactccctctgctttcctacgtactccagcgacgagttctgttcaggccgccggttgctttcatccgaggacactagggccgagcagcagagtaactggagtactggacaatctatgcgatgacacttcagtagttcacagcatccaaaatctggcaaactgccctactaattatggtcccataaacctccaataccagcgaaattgcaataacgatcatggtccaagaactagcggctaccggtcggagatgggaccttagctagttattgcccgtaaagatataaatttatttaaaacatttaaaacttagatttaaatttagaaatttatgatataatcttttgattccattctgaaccgtgcgagcaattaaaaaaatgttcgattttgacccggacccatggtgcggtgcaatacaacatcgctcttgcagtttgattgctgctctcgttggttaattaacgtgggggcatatccatccatttctaagggataaagcctcgatgcgtaaccaagaaattactaactttcataaatgcgggctatgcatatgcctatatatcgggggtgctgcatcgctactgaacgggcttcacagcgacatgagaccaactagtgatagacctaaagctaaagcgatgataaagacggatggcttcctgctgaagcaggcagatcaaagaaaatttcagacctgattcacatcaacacgcgagagagaaaggatggaaatgagcatcaggtctttatatagagataaaagttcgtcttctttaaaatctgagaaatcttgttgactagcacttccgaaaaacttgaaacagacattattgtcacgctgaaacttactgccaccaaaaacttattgtcacactgattggatacaagtcgcggtttgtatatcgtctaaaatccaaataaactgtaaaaaagtagtccattggcacgtaaacatcgttgaagaagccaatgctgcatcatgccatgaccggctgacggctaatacataacttgtggattcatgatggccaaacaaagcttggcccttcaatcaatgccatgacagatacctatgagtactatataggaggccaacaaacaagttaatcactcttcgctaagtaagtaagaattgtggttgccactcggcactcgccaccatgctcctcgtcggcgtcctcctgctgctcttcttcaacctacatctccccacggccgccattgacaccctcacgctaggccagtctctgctgtggaaccagacgctggtctccaatggcggcaacttcgagctcggcctcttctcgccgggaaagtccaacaagcactaccttggcatctggtacaagaagatctccaagaagacggttgtttgggttgccaaccgtgagcgcccgattcttgagccgtcgagctgccacctcgagctgagcgtccacggcgatctgcggctgttctcgacggcgccgtcgaacaccttgctgtggtcgtcgaacgcgtccgcgtcttcctcgccgtcgcccccgcgcaccaccgtcgccacgctccaggacgacggcaacctcgtggtgaacagcaacgcgacgcggtcgcggtcgcgatcgccgtcgtcgactacgacgacgcacgtggcgtggcagagctttgatcacccgaccgacacatggctccccggagccaggctcggctacgacaggggccgcggcgtccacagcttcctcacgtcgtggacggactccgagaacccggcgcccggcgcgttctccatggtgatcgacgcgcgcgggctggccaagttcgacctcctcgccggcggcgagcaccggtactggacgaccggcctctgggacggcgagatcttcgcgaacgtgccggagatgcggtccggctacttcaccggcgtcccctacgcgccgaacgccagcgtcaacttcttcagctaccgcgaccggctgccgggcgccgtcggcaacttcatgctggacgtgaacgggcagatgcggcggcggcagtggagcgagacggcggggaagtggatcctcttctgctcgttgccccacgacgcgtgcgacgtgtacggctcgtgcgggccctttggagtctgcagcaacgccaccaacccggagtgccggtgccccgccggcttcgagccgcggtcgtcggaggagtggaggctggagaacgccgccggaggctgcgtgaggcggcaccctctcgagtgtcacggagacgggttcctggcgctgccgtacaccgtgcggctcccgaatggctccgtggaggcgccggccggagctgggaacgacaaggcgtgcgcgcacacctgcctggtcgactgctcctgcacggcctacgttcacgacggagcgaagtgcctcgtgtggaacggcgagctcgtcaacatgaaagcctacgcggctaatgagaatggccaaggcgatcctggcctcgccggagcggtgcttcacctccgtgtcgcccactcggaggttccggcgtcgtcgacggagcactcgtggaagaaatcgatggtaatccttggaagcgtcgttgcggcggtggtgctgctcttggcgagcctcgtcaccgtggtggcggtggcggcggtgttgcggatgcggcgtaggaggggcaaggtgacggcggtgcaggggtcgctgctgctgctcgactaccatgccgtgaagaccgcgacgagggacttctcggagaagctcgggagcgggagcttcggcacggtgttcaaaggcgcgctgccggacgggacgcccgtggccgtcaagaagctcgacggtctccggcaaggcgagaagcaattcagaacggaggtggtgacgctcggcatgatccagcacgtcaacctcgtccgactccgtggcttctgctgcgagggaaacaagagggcgctcgtgtacgactacatggccaatggctcgctggactcgcacctgttcgtcatgagcggctccagctccggccccgactccaagcaggtgaccctgacttggagccaacggtacaacgtcgcggttggtgtggcacggggcttggcttacctgcacgagaagtgcagggagtgcatcatacactgcgacgtcaagccggagaacatcctcctcgatcaggagatggcggcgaggctcgcggacttcggcatggccaagctcgtcggccgcgacttcagcagcgtcctgaccaccatgcggggcacggtgggatacctcgcgccggagtggctagccggcacgccggtcaccgcaaaagccgacgtgtacagcttcgggctcctgctcttcgagctcgtctcgggccggcggaacagcaccgcgccgtcgtcgtcgtcggagggcggccctgggatttacttcccggttcatgccgtggtcaagctaaacgaaggcgacgtggccgggctggtcgacgagagggtggccaaggatgccgacccgaaggaggttgagagactctgcaaggtcgcgggctggtgcattcaagacgaggaaggcgaccggccgaccatggggctcgtcgtgcagcagctcgaaggcatcgccaacgtaatgttgccgccgatcccttctcggcttcatatcctggcgattgagaacgaatgggtcagaggtgttccagaggatgagcgctgctcaaagagcggtagtaaaccagaaacagaagcaatagaagaaatgtagaactgaaaagaatctgggagcaccctacagctgaagtgaagatgcagcgtcagatatgaaaatgtagttgtaatgtcagcatagttgatatttcccgtgtggatgtatagccagtactgtactgcaactgttctgtaaattccttaaattccggaaacaggatcagacaagtaccttctctcgttttgttcccatctaattctggtccatccttgctgacagctgcacctttattgaagaaatccattagtgctacccagaagtccttaactaattgttgaaaacaacttgttgacaaaattgcagatccactcctccacactcactataattctgttatgtacaatttttagatgggaaaattttctgataactacaaagggcataagaagcatatatctacacgggcaactagtaacaacctatacagattaagaactaaatacaaccccaaagaatgaacgaatatcactatgtaactacaagaaccaacatatcaagatgtacactttacaggtaaagatgaagatgatgatacagagtaaagagctttaagtaaagaaatgaacttcacaactgtttcttcagagaaccacttgagtttccatgtatgcactgtgtaaatttcatctggttgcttgctctgtgaatttgtaatgctaccgttactgcaaaatcttccttcatgtgcatggttgtccaaaactaatgtcaaacatctcttgtcacagtgatccacaacctgaatacatgaagagagaatattgaatgagtgatatcaactttcaatctgacagaacagctaagcttacttacaatgatatcacagcttattttggtaggacacaacttcactagctaaaggaataaagtcagatgcaatcatgattcatatacttgatcgattgatattaaattaaagatggctgttcgtgttcaacaataggcaagcagcgctttgtttggattgtggaataggaggggtaggatacggattgagttaagatacaggaataggggaaaaatggatggtcaagcaaggggctattgctctaagctctgtatgtatgctattcctttcagacatggcattacctaacatcttaaaatgcaaccaaaatctaaaatgggtacgtatgcttactgctccctgtttttctgtttttctgtttttcatttacatcacaaatatttacagccaaggaagaaacagagtactaagggtgagtgttagtgacctacttaacatcaaggtgggaaggaattatcttttggagctgttggagcaaatcatgacaaataactagcaagggaaatgtcaaaagtaaaccatggcttaccacttcttgaatatcgttgataaaacaacaagcatccagagaaaaatatggagtatccggatcatcagggagggaaccaaactgatgtatgttctcgatacacacaaataatgacccttcagtaacagcgagggatctaataacaaaggatccttctgcaaaatagaatggacactatttcagcaagttccagttgacagcagacaaataatgaattaaggtaactggaacaatcctcatagttttcatatgccaaaattggaatatgacgtcagtggtaaaaatgcagataaaaaatctgtggtaaactattatagttttcataatgacctccctccctacttagcttatacaatagtcatgcatactcctacctcctttacccacctttttccaaagaatcccactctataaggcttcaaggaaaatctcagacacacccaaacataatttagaaccatcaaacataagataacgcagggaccgatctgttcttagtccagccacagaatagtgtgctgtttcatcaaccaaataatgcttaccttcagtatcattcttccaaaacatcaacaacgagtagagaaatattcccatttccaaacttggatggatacaattctcaagcaatttaagttggaccttctcccagctgccatttaaatacagaactaagtataatcaacaacataaaccgaaagtcgcaataaaaaaaagtttccttttaagcaaaaaagaacagtgttttgctcacagggaaagtaaaaggctaaacaaaccaaacctttgcaaagatatactactagttaattgtggaaaattagacgcggttaagag

SEQ ID NO: 10205 - DNA, 27766 bp, Oryza sativa
tttgagcaaccgaaagcaaattgaaatttagagatttaacaagagagacattatcaattgacaaatcattggagatagcaattttacctaacccaattacctttcctttgctattgtctccaaatgtcactttctcttgttcattccctcctacttcaaatgtggtgaacatagccctatcaccggtcatgtgttgagtgcatccactatcaagcacccaatggctcccaccggtgcggtagttcacctacaaaagaagatcaagctcttttaggtacccaaacttgtttgggtccttggaggttagagaccaaagctttgggcacccaaatggcattctttttaccaccgagtataggggaacccacatatctagcaacaatgctaccatcataagccttcctaagcatataatgagaatcagacatgcatgtcttaggaggcttaccaccggggcaatcactcaccaaatgcccaacctcacgacacttggagcaatacttaccattgctcttgacaaaacgagtggcacggtgagaaggtttcttacccttctttagaatgaatccaagtccctctttgttaaggatgcactgttgctcactcaaaatcttgtcaagagtgttcttacccttgaagcatctctccaaactcttgttgagcttagccacttgctccttaagctcattgttctcaacaacaagtgaggcatcacaaatagaaacgcaagagctagagctagagttaggcatatccataagatcatcacaagaggtagaaatgctagatgatgcaacatgagcaatatggcaagtagcactatcatcaagcaaatcacaagatatgccaacatcaatgagagctccatgttgagtagtggaaaggaggttgtcatgagcttccttaagcttctcatgagaaatggtaagtctctcatgagaagtctttagctcctcatacaaaacctccaaagaagcatgatccttctttagggtcttgaacttgataatctccttctcactataagcatggagctcctcaaacatactcacaagctcatcataggaaacatcatcacaatcatcatcactctcactatcactaagagatgttaccttagaggggctctttgccatgagacaaagtggagcgaagagtgatggtgcctccttgatggcaacaacggccatcttcttcttcttggagcttgcatcatcaccaccttcttcctcggacccggatgaggcagagctctcctcatttgagtctcattccccgatgaaggcctcaatcttcttctttttcttcttgagcttcttcatgagcttgtagcctccactcttcttcttggatgacttgtctccatcatcatccttggaagggcacttggaagcaaagtgtcccttctcaccacactcaaagcacctcaagttggagagagtcttgttgggtcttctatttcttctcctattggagttggagccccttcctctctcctttctccttcccaagagatcattgaaccttctagcaagaaggacaatctcttcctccaagtccttattgacttcattcaccttgctcttgctcttgtcttcaacttcggcttggagagcaatgcacttcttggaaggtgaggcttcctccatctccttcttcttcaacttgtacatgtcattggtgttgatcttccccaagaggcttgcgggtgtcattcttgacatgtcggagttgatgagcatggtgacaagggtctcatacttctccggtagagccctaagcatcttttgggcaacctcaagattggtgtagtttgccccaagccccttgagatcattcacaatgacattgagcctcccatacatgtcattcacactctcatgaggcaacatggagaatgtctcatattggatcttgaggaaatgaagcttggcatccttgtactcacttgtactctcatggatctccgccaacttgttccaaatctcatatgcggtctcaaggttgctcactctatcgaactcctcttggctcaaagagttgaacaagacattcatggcttgggcattgagtttgaggttgcggtgatcaatctccgtcaagggtgtgccggtgatagcaaagcctacatccacaatactccaaatatggaagctcatagctttgaggtgagtagacattttaattttccaagtggaatagtttgtgccattaaacatgggagccttccctacatggttcacctcgttcgacatcttctctctaggcggtgaagcccaatcaagagagaccaagctttgataccacttgtaggattgagatgtcgactagaggggagggtgaataggcgatttaaaactaaataacacctaatcaaaactaacctaagttgctaggcttggtgagggtgaactctaactaagcaactaagttatgttttgcaaacctagggtgatagtggctcaattatatctctaggaaagtaaatcacactcctatgtcaaagttttgcaatcctagggtgaaatgatctcaagtatgtctctagaaatgtaaattgcacaaatgtaaatgcgacaatcaaatgagacaaggagacaagagatttttcaccgaggtttggaaactcgccggtttcctactccccgttgaggcgagcccaactccaccgctcaaccacgaagccaccgcacgccccctttgtcaaggggtgggcaaggcgggagccggcccacggagaggactacccaagcctcgatcactagggtagttcttccttcactccgaaggtggtgaactccaaaccactcacaaaccggcgccgggccttctccacaatcttctcggagagatcaccgggcaactcctccacaagccgtctaggaggcggcaacctccaagagtaacaagcaatgacccggcatggagatgatcaaatgccacactagctctacaatggaagcaaatgcacttgactcttggctaaacaaccctctaacacactagatggatgaacacaaagctcaagtgagtgtgagagagatgcaaggggtgtatgcaattgaattgggtgccaagagagcccccttgctgctggtgggggagtatttatactcccacccaccaaaactagccgttgggagcgaaatcccccaactctgtgctctgccggtctgaccggaggtatgtggccggtcagaccgtgctactctgcaacggctagaaaactagccgttgtagccctgtcagagggccccatcagcctggtcggtcagaccgacatggggtggccggtcaaaccgccatcggctcggtctgaccgaatacggctccgtcggctctgtatcggccatcccgagcagcaccatcccggcctccagggggccggtctgaccgcgcatgtgccgccggtcagactgtccttatgcgccggtcagaccaccttcttgcggccggtcggaccggccagggcacgccggtcagaccgccactatgtggccggtctgaccgcccctggtcaggccgaacctagtgaagtgtgtgtgtgtgtgtgtgaaatgtgagcacaagtctaaatgcataatgacctaatgtggcaattaaaatcatctctttgctaggtcattacccctcttaatagtacggcgaaactaaaaataaactagcaaatttgatcgccctacacctcgatcaattctaaattaaagcgctagttttatcgtcttctttccctttgctttgcgccgtcaattttaatccatcgataatcatccatgcgcacatatgacgtggacctaacttaaaatgtatagctcaaagacaacggttagtccacaattagcacttgtcattaattatcaaaattaacaccgggggcctagatgcttcaccaccaataaactaaacagttacatgcatatatttatcgattgcatttcttgactcctttcctttcacctaccctttcacctcactatttatatgcctctccacaatggcatgtcttagccatcgtataggatcataacagattctttgtgaaaccagtggatgcaatggctgtgatctcttcaaattactgatggttttcttgatgtcttatgctgtcaatgctatgctacagtcattccttcaaggtttgtggtgtgttcctttcctcggcctacaatttaaattattatttttgttttacttataaatattcacgttagtattttctttctttctcatgtgttctttgtttatctgttttcgctcaccgtgatgatctgaagttcttccctttttctactgcttatatggacattgatcctgttgatgttgctttatggcaatgagcaactaagctccctatacgaccactatttttctatgatattcattcatacagcaatgattcttgaagtttattctcgggtactaactaaaatttacttgctatttcatagcaggcctatatctttgtatgcatcggaatgatgcatgtcagcacaattaagtcaatcttcctttccaacgacctgactcagttgaagcaagcatcagaaaatgcgtaactccaatctttctatttattattgaatttttgtaatttttttaatagttacaaggtgtatttaaatcacaacaatcaagtgtacccgacgcttgaagtaatggataaatttacaatagtgctaatgtaggtatacaactggctagatatatgttgcgtctaaagttttcttttatcatataaaagtgtcgcggtaacgcgcgggttactcactagtttcatacatttgagtgttcggctttgtaattgtaatggagatgccattgatagaacccgaacaactgtctaattagctcaagaggtggctccacacacatagcatggtatttcaatcggcggagttatagatagatagtatgtttttttttcatcaatttcaaaatatggtataatctgtggtaaacttccaaaaccagtttcatcggttagagtgcattttaccaagtgtgttgtgtgtcagctgaactaacacattataacggttgctggtggtgtttgagacggatgaagatgtaaagtaagggcatgcaaaacgagtaaaccattagggcatgattaattggttttaattattgcaaatttgagaaatatatttatttgatattttaaagtaaattttatatagaaatactggaaaatttagaccaatccattgtcgtatagtgcagaacaaataaattgcactgtacacatatgtcacttgtccattgtcgtctagtccggttaggatacctggctttcacccaggcgacccgggttcaaatcccggcaatggaattttttttctattttttctatttgtctatttttctatgtttcttttaggggatctacatgtctttatgataagttagcagacttaactcaaaactatacgggacctgcagaacttcttgacaaatcgcacataactcccaagttagcaaattagctcaaactaatcaacactttatttagtggttttccgtgagcatacgagaactaacttgttactgttagtgtgacaactcacaggtcacaggattcgcagcatgttcacggttcaccaatgaattatatccacattaagtaaacaaactgtccaaagaaaagaaacaaaaaatcaaaccgagcggtgaacacaactacacaaggggacatgatctgatacactaatacactacctgagcaataatacgcacgaggcaggagtgttgtctgtaaaaagtgaggcatcaataggtgtagtataactattttatcacgaaaggtgaaaaagactatctaccggctctacatcattttatatcaggggcagggcgccccgctttagccgctggcaacaatctcgtggatcttgtcactgacttcgggatcatctgacctgacggcaagcttcatcgccacttccttgggcccgctcagtccaaacgatagcctgacaagaaccttggcgtcgccgatgaacacaccagacagcaggcaagtgtgcgatcttgcattctttggtacaacctcagtgccctgccaaacatgcgcaaggatttagcgacatttaaatttctcaaaaaccaaatgaatttaaatttctcaaaaaccaaatgatgtagggccaattacgatgaataggaacagaagtggaaactgacctcacaaggctgcataccaaggatactaatgacagcactcacagcctcagccaagctctctctaacaccaagtccatactcatcgacacgctcactttctgggtccatattttcccaggcattcctgaagttgggagacctgcagaccctcaagcatgctaactcagtccgtaaacaactttccaggatcttccgatgctggctattcatctctctcacagccattccttcatgcaacttaccctctgtagatgtgtcaacctgagaattggcaggattagtcattgttctaagaaaaagaaatagccatggaacaacttaaatagagaatgattaccccagtacaaggtacgtgttgatgcctcaatttaattagaacaaaatggcttataacaatttaaaccatagaacatatttttattactatattcttaatttgatttagaatgccatagttctatgaacaagggagcaagactcttatgaaggatccgaaactcactaaaggtgaaaacatagttttatatgagatcaaaagactttaacaaagatgaaattcactttcagtaccaacaaccataacacgtacgggcatagacagacaatacaaagtatatccaaagcatatgatatagaacagtcatacttgaattagtataacaaaggatattactgtcggtcatatcaggatccaacagcagaaggaaacatttacctctttaacaataaacttcagcacatttgaaaatttcccagtagcaggaacatgttctggcttttcaaaagcaacaaaaatttgcccaggtgaatcataaggcaaacttctaagtggctttgaacaaacttctgaaaattcctcagcatcagtggcatcaacataaacagtcacctacaagaatcaacatacatatatgaaaaaaaatcttcagtgtgagttgacagctgtgcctccaagaacatatttaattgtacttaattgtttgctgcttacattttctagcagttgttcgggtatagtgtttgtacagttgtactgcaacacaacatggctactgtatatgtgcttaaccacattaatcgcatattcagtctccgcctctgtcagctccacaggttctgaggactggggaaaaagagaggggtttagcatgtgtactcaatcaaaatcattaatggtatagaagctacagaccttgaagagccttccaaacccggagaactcaggaatggacgagagaatcttctgataagcatcaacagctggaacaggtgcaggagcaggagcaccagcaggtggcttctttcctggggcctttttctcttgaagtggttgtgatttgacttctctcgacaccaaagaaatatcaaaaggctcctcagagggttccttaagtttgaagatgttagtataccatagggcatggcagttgcttaaaacataaaatgttcattgtaaaacatacataggttttaagacttgcttccaagttggcaagtggcacatcaaatgatccaaataggaactccttaacatccttctcagtgctaccaacagcaacttcaccatcaagagtttggagataaagtgtagcacggtcacgaacctatgacaaagaccaataagacttgttattgcccagagaggagagacaccatacaccaatgttgtttctaaatgccaagttggcatcttacaataggtggccttaaaaataagaattgtaactgataaaaacatacttcaagatatgcatgtcacaaaaaggaaatgataataatcatgtcggtttgctatttacctcatcatcggtgtcaaacaggcaacgacgcaaaagaacaaagatcctaggctgaaaaagaaaaagaaaagcaagatctcaaatgagctaagaatacacaaaagtggtctatataaattagagcacatgatatatgatttatcctaccttcaaggcatcaactaaggcaccaaactttgccaatgtactgacagcactagcacggacagtggcattttccagtatcacacggttgtagatgtagcgtatatatctgcttggatctgatgtccttggtccttcatttcccaaaagatgcaatatctaacaaatagagaggattgattctctgttcaaatgttgaaaaacaagagctaggcaaggaactaccaattggaaaagattgattatgaacattctcaacagttcatatattatactatagaaaggtcgtcagtttgttatgtccccgttctttttttaccattgcatcagcatttttcactatatcaagtaatactacctgataattcataggcagctggaaggatggaagttaaccagttgttacttaatcaacagcaaatagctaatgtaattacctgactggaaagataggtgaactcacagtcttcaatgaactcacagagatacaaaagaccaatttctttagcatctggtatctcactgataagagttactatggaatcaacgatggcctttttgtactcaaagcccccttcttctctcaaactgttactcaagaagttcatcctatagaagaaaaaaaaatgaagagcattggacaccaaatgcaactgatagtcaaaacatacggcactaaaagaatgtaaatgtcatcaacaccgaattaagatttacatacattgaacgatacttcaggggaaacttaaggcatagagatcgtatagcttcaacaacaactatcttgaattcatctgctatgtctgacatgaaattggtaatttgtttcatgaggcggtctacgctagattcattgcctgttttaagaagtgtagtgattgccagggttgctatactcctattctggtccgacatcagactttccaagtccacattgcagtttgtcactgccaaagggcgtgtcatagcaacctgcgagataacaggcaaatcaagatatagacataagctgagaaaatttaaatgtcaaagattaaacatcatgcagggataaccttgttgagtgtccggacagcagcaaatcgaaggacaggtttggatgaactcaaaaataactgtaacacagtaatcgctggtgctaattcacgacttgtcacatccatctctgctattttccgtgcagcctctagaatcaccatttctgatttatgtctcaaacatgattccagataatcaaaaaatgggcgatcactggtttgtgtgttcatgcttgactcgcgtattacctggtaaatcacccttccaatgttcagcaatttacttttgctaggttttaagcttcagtagaggtatatgtagcttacctggctcgtgtaacgaatcagaagacattgtgcaagaggtgagcggacagaccccctagtcaagccagaaaccatcttgctaatagctaaacgatcattctgtctgatctgaaagttgggagacaaaattaacagagcatcaactcatcatgtgtctcaggctaggacaccttataccatactattccttttgcataccaaatgcacaaaaataaatcaatttctacataattacagttattttaagattaagtaaagtggaggtcagtgatatttgaagatgttaacccagcatagcatatgactaaaactagtgcaaaatggactgaagcaactgaaaattggttagtcataccttagttcagaaaagctttactttggtaaaagtgtttgacctaaatagtttcattctgagatatcaagacattgacatctggtgtataagttcatcgtcggcactgataaactaaccatggactattccaaaacagtaaactgcaaagcatatgacctgtggcctgacaatggcctcctgaactgaatccataagctatcaagtgaaacagggcacacaaaatgattcaggtagatattctaactttcaataaagaaagatgtcctcctagaaaatttaaagagtaaactatgaaaagctacaatatattaagtaaaagattgatattccacagttccatcatttagtcaaatgatgaaaaatacttttaacacagatgctcccctgtaccaccaccgatcatccgaatgtctttgagatccatgcacaaaaaatatatagctacgaaaaatccatgcacagatctcaaaatgtgccatgacacaacccaagggcattaagaagtaggatggaatcccattaagtggttaaaatctatctccctcaaatgagatcatgcagccaaagtgttcttcaaagggccaggattaatcagagtttgtcatgcttttcattttttcgtcaaaagctagtaaaacacaacgtgcaacctatattattaggcacagaactgctgccggcttctttggtaatgcccaggtacaactcagaagttctattcaccggatcaacaagatataccataacataggcattataatctatctcaccttcatgttcaatacctgtctttgctttgctattagtctaagtttagttgggcattgatcgatgaaacaaaatacaaacctggtgaagaagagctaggccatgaaattgcacaagtgcaaatcttgattgaacagcttcctgcacttcgttgctccatcttttcacgatttctggatttgcctgcatataataagtacagtttttgacttccgaaaagaattatgttttttttcgtatagaactatagaagtgtacctgaagcagatggatgccactaacaagagcagcactagcaaccacaggattcttatcaactatagcttgtttcaaatatctctcaatttgagtaaggagggtgccatcaattattctacacagaactctgatagcattggcacggtacatatccgtcttgctgttcatatctttcattaatgagcttgtgactatgataacctgttgtgtaaaattcaaacaatttagaatgacaatacaagaaacaagttataattcatggatctaaaaacagtttcctttgacctcatctgatgatggtgaaagctctttgatcattaaatacaccagccgcctaagaccagcatccttggactggaacagctttgttactgcaaagaaaacttctgtggcctcaacctacatcagaagcaaatccatcagggcattgagagcataaggcaagtttggttgcacgagatgtagtatcctacctttgtgaatgtctccccttggttgagtaaatacaatagcttagtgatgacctgagaaattccaagacacatcaaacaaagagcaaagccataataatgaataacaagagggtgaaacatacatctgaacacaatactcagaactgatatgaaaatgagagaggtcatgcaagaaacacttacttgcgagcacttcctggcatcaagctgcggatcatggaaagcccttgcctcctgcagaacggctcccttctcaatcccataaaatggcgagtactcaactgtaaaagcatccatgggttaataaacaggtaataacttgaaagcattttactacactgactgaattcaatctaaaaacaagagataggacactctctataaaagatcaaactgcaatatcaaaatgaaatgctctgacgttaaggtaaacaccgcatgtaaccagcttgcattgagcaccaaaaaccttaccatatttggatcatacaaattggccgaacacccatatagactaagggggtgtttagatccaccggcaaatttttttgccccgtcacatcgaacgtttgaacacatgtacggagtattaaatattgataaaaaaaaaactaattacacagtttgcgtgtaaattgcgagacgaatttttcaagcctaattgcgccatgatctgacaatgtggtgctacagtaaacatttgctaatgatggactaattaggcttaataaattcgtctcgcagtttacatgcggattatgtaatttggtttgttattggtctacgtttaatacttcaaatgtgtgtccatatatccgatgtgacccggcaaatttttttgccagtggaactaaacacagcctaaggaacggatctactcctatatgcaaattagacgtgcgaatctccaatggaaagtgaaacgaaatggttccagcacacgggcgcaactgaatctcatctcactattggatcaccaatgggcctagccgactgataattagaggatgaacataaaaaaaaaacgaagtgcgtcggaaccgaacgcctgtgatgcctcagaggagtgatcgagcgcactccagatccaggtaaacccaagctctcccactccaaattctcagggccaaagcacgccaagtcgcaaaacagaaggccactctgaccagcggagagaatcaaacattcaaacaggaagctcgcacaaccaccaccacaaactctcgggggcggacatgcacacgaggtcgagatccaccgcgagatcccgccagatccggcatctccgccgctgggccagcggctcccagatcgcagcgcggccgggagaaagccaacaggaggagaattaggaggggggagaggggactaaccgtcctcgtcgtcgtcatccttcttcatgtacggctgcgccatctccggatcggtgaggtcgccggcgagggagcgaggcatgcgacgctgtggcaggcggcggcaaccaccgaaccggggagcgtggggtggtaggtttttgagggccgtggggtggtgcgtggagggaagcttttcccccttgtcgcgctccggatcctacgaaacggtggcctggccgtgcggtggtggtggtgggggtggcctggccgtggtgggggagctcgggacggacgggacggggaggagctctctttgctcgcgccctttttgcacttgggtccctcggtcgagtcgagactcgagactccagactgtggaggccggtttgttggggttgccacttgccaggtgttgggccagccctgcctgatggaagggacacggccttttggcccaaactgtccagcaccaacctcgacccttttgggaattttgaaggtaggaaaaaggccactttgactcccttaaaagtatgctgaatctaattcataccccttaactagaaaaccaggtaaaatgactcctctaactattaaaaccggtataatttaactccctcgacggttttggatgccagttttgcttatgtggcgctttgacttggtccaattggctgactcagcgtgtgggacccacatgtcaatgtcacattttccttctctctttctttctctttttcccctctttttctcctgcctccgaatgacgccacaaattgtcgtcattcatggatacttgcaaggacatcgtcgctgcccgtctccccgccgcgggaactcggccggtgacagatgctcatgtgcctgtgcgcgacagtccttctcctcacttcttatcacctgctccatccttctctctctttctcttccctttcctctcccccaaggcgaagcgacaccgtggcctcgaggcggagtggtggctggaggtcctgatgcgcggcatcggcctggcctcaagcggagcgactttctatgggagccgtttttgctttatttgctggattttactattgggtgggtaaaatctttggcagacatatcctgaaactttaggataaatccatttttcgattactttattcagggttaatctgacattttttcccatgcatttcttaggacgtcggcccggcgtagagggggatggcggcgggccggcttggagacggggtggtggcgtggcgcgcccagacgccctgcggccgcctagggaggtcatggaacaggtcccctccaccgtcggcagcggctcggctagctcggaccctggccgacacaggagtagcctcgctgcaccgcctcgctccaacacgaaggtggtcctccccgccatcgctgacgaactgcggcgtgtcgaagttcacggacacgccgtcccgagtggtggcactctgtcacaccccgaagtttttctccctagccaaaatttaatttataaacgaccccaagaaaatgcaggtgcaaatcaagagaaaaccctaagaaagtaatgcaaataataatcggatttgatatgtggaatttttcttgagttctacatgtcgaaattcattaacaggatttttagtggaattttcagagctctagaaataattttaaccaattaaaattgagcaagcaatattttaattccagggaaaatcctttttcctttttctttttttctttttctttttcctccctttttcctcctttttttgaatgggccgccggcccattctcttcttcctccccctcctccctccgaggcccatccaggccgccccgccactctcctctcccggggtcgccgacaggtggggcccacctgtcgggtccttcccccacctcccgccgctctcgctcgcgccgccgcgcccgcaaccgccgccgcgcccacgtctccgcctccttcgggccacgtcgaccacgcccgcgcgtgcgccgcgttccctgcgcccactcccctctctcttccgttcgcgcccgcgcccgagatggccgggattcgattttcgaatcccgcctctctctcttcccccactcccccacgtcggccggcgattcccgcctctcccggccacgtccggtcctctctctctccctatttaagcttccccgtcgctccctctcgctttttccccatttcgccgacctctcccgagctccccattgctcccgcgccgtgcaaccacccgccgctgccgtttccgcaactccggccgccgctagccgccgctaggctcgccgccgcaccgcgccgtcgccgccgttgggttcgtgcggccaaggtccacctcgtccacccctcctccgtcgaggttcgccgccggagccccattcccgtcgtgcgtcggtgagtgacgccatggccgccgccttcggccggcgccctcgtcctctcgcactctcctctctccctctaacccctctccttttgttcgttaggaggttccggagctcgtcccgccgtcgccatcgtcctccgtcgcccgccgtcgtcgaccgttgtcggtgaggcctctcctcctcttttttctctctctcccgcaccgtttcgccgtcgcgcgccatggtcgccgggtcggtttgcgccgtgcccgcgcgcaccggccgcgagctcccgccgccgtccgatctacccttgggtagatcggggccgtcggttcggctgtcgcgtggccgccgcgtggcgcgccgctcctccccggtccgtggacccgatccgccgtggaccgccctccccgagccgctgactggtggggcccgcttgccggcgcccttcctccctctcccgagccgctgaccggtggggcccgcttgccggcgccgcccccctccgcgctgacgtcagccctggaatatattgcgcaataaatgatttaaggtttttcttttatagtaataaacacagtgaatcttctaaaattcataactaattcatccgagctccgtttaagcccattcaagtctcagtaaatcaagaaaaatgtgtagaatccattaaaaatggttgtgttccctgtttcagtagtcttatagcctgtttgcaatgtttgctttgtatgtcgctagattccgacccctccgacgctccggtgtacttcgaaatagtcgccgaggttcctccagcagcagagcaaggcaagtcatgcttgtcacttgaacatgttgatcctatattgcaaatgctccattgttttctttcaaatattgcattgttttataatattactatgggatggttacctattgttacagccatgctttttggataccatgctcctttgttagcttggggttataacatgattagagtttggactaggaattgcttagccatgcttagttcaactagttcacaatggggaaaatcatattaatgcttagactgttggttctaatggttttgttggattagtgccaccgctttggtgttggttaattaaaataaatcacatggtgggctgtgggtgcatggttttgctggtcgcacccatggcagttaaggaccggttcgcgggatgccctggaagaacttatcgtacttaccacaagccagcgtgggcaacggctgggcttgtagtgtagctttcctctagtcgacgcattcaggcaagggtgggcgtgatagagcggggcgggccctgcgacggcctctgtcgcttccggattcacctaggcacgagaggggactgcccgttgcccgctggggacgggggtgaaacctgaggtgtggtgtgcttggctagagggggttatgcgaagggtcctgtcacggcctctttccgatatgtcgtggtggcatgtcggcgcacgaaaacgtgtcgcggggctgtgtcttgtgggtacagttgtacacctctgatcagagtaaaactattcgaatagccgtgcccgcggttatgggcggtcaaccagattcaccgtgattagtatcaccctagtgtaatcttttgaatttggttagtttaggtggatggttgggcctgtcgcaacgtgggatagcgttggatagtggatgtttaattaattattacaacggtttaatctttcaacttctgtttataaatgctcgctttatgcaaatgaaccgctctagctcttctttgataattccgtgcatcatacccctattccggtatgacttgctgagtacagtgggtagtactcagtcttgctctacttttcccaaccccagagttcgagttcgggtcagatgaaggtttctccgaggagtaggctttgtccgtgccgtcgaggatgcctgtggagtggtgttcccgctgcagttttagtcaaggcttagctcttgttgtctttcttttcttccgctgcatttatgtaagacttttatgatgtttgtaagacgtggatctgaatgtcaacattgtcgtttgtgtaccccggctggtcctggacggggaatttaatgcacattctgcttgaaattctattcgggaatttctgggcgtgacacgctcggcgtactccaccaatggcagtggcacgggcgcagccgcacagagaagacgcccacgtgctcctctcgccgtcagtcaccgcccactcccagcgccctgaagaaaaagaggtagaaaaagagggggaaaagataaaagaaagagagttgaggaaaatgtgacattggcatgtgggtcccacatgctgagttagccaattggaccaagtcaaagcgccacatcagcaaaaccggcatccaaaaccgccgagggagttaaattatactggttttaatagttaggggagtcgttttacctggttttctggataaggggtataaattagattcgagatacttttaagggggtcaaagtagactttttccttgtgttaacagtgaaatttggtaagcccggagtaatcatcggcttagagtcagcatcgacttcgaagtcctgagattagccgatgagacttatcacgtcgtcagttgccggattcttgctatattcggttaaggaaattgatctactaaaggaagcttatccagaagagaccgagttcaaagagaatgcgacatagcaagttatctattaattaggaataatttgttagtttccttttatctttaggaaagtgtgtttaatgtcctataaggactttatcttttccttttatttgtagtttcattcttgtccgacaaggactagtatctccctatgggtataaatatgtacacccgaggtcattgtaatctatcaatctctcgatcaatactactctcggcgcatcgccaccctctttaccgaggtttttacttatcatccgacggaacttggcacctagttgcattgtgtttagagacgcatcaatttagttggaatgtctcggttaggtccgatcttctgtcttagccaatatatctctacaatcacaaaggtgttctaaatagatttgttatatccatcacattagacagatctatcggctcatcgagtattagattatcatatacaatctcgtgctgcatcggttaggttcgacctattagattgttgttgataatataagtcttgttaagccgataggttcatgctggtgtttatcggggtgctagccgataagttatctggacgttgcatcggcttacaaggattgcatatacatataagtttgacttagccgatcgcaacaaaggtttcactgtttaatctaatcttgtggattttatgacatcggacctacagccgatgtatgttttaaccgtcggatcagtgcttattctatcatatcattgctagctaattagtttctaatggattatgttattgttatactacattatcatcagccgactgcctttatatcattatttaagtcaagtgtcagactctacattggacataaagccgatagctcagaaacctatcgctatcggctggcatcggttatcggctggtatcggcatcggctggaattatttcatcggcttgtcaaccgatcggctatttgatctactctttacatatcttgtcagttgcagaatcaaactgactagcacgcccgcatctcaccaacctttggatctgcattggagctaagcagatctcaggccagtgtgtgtttttcgcatcaacaccttgaaggtattctggaggaggaggaagttcactttaggtcccttagttcgtcgcccaatctatttttcgtccttgatccaaaaaccggatataatacatccctcaacttatataaccatacaaacgaagtccctcggtagtattgactccagttttaactgacatgatgcctttgactaagtcttcgtcccacgtgacattgacatggcgcttacgtggcagtttgacaaaaaaaataaatggaacaaaattaaagactaaaaaaataaaacaaaatatacgggacccacatgtcagccaaacaaaaaaaataggacccacatgtcagtggttcccacttcttccacctcaccctcttcccctcttttccaatcttcttttgggtgtccatcctccatccttccccgctcctatggcagcggcaagagcaagagggagaggagcgcagcaaggacgccgagcgcgacgggcggcgagagaggagcagtgtgcaacaagcggtgagagtggagcggccgctctccgtggggggggggatggccatcggggagaagggcaatgaccggcgggaaggagctaggcgatgggcgcggtgtcaccgagctcgaccgctgtggggaggtctagggacctccgctcccgcctcgccatcaggcctcctaagctcccgccgcggcgaggctaagcaccaaacccacgacaaccacggggatttgggtcccctcccgtcgatgatggatccaagagccagtcaaagttggatcccctctcgtcgcgtctcctaatgccgccatcggatcccctcctgtcgtcgttgagttccccttttgaaggccgacatcaccattccctctctctgcacagctgcttccccacttctcctgcagacaatggtctccattacaacggaagaggagcaagccggcagtgacctcgtctcccatcaagcggtgccagtgaagataccccccttctccctctctatgcatgctcgctagggatgcaagtgggtagtcctactacccgcataaaaacccgcttgctagtctatttttcgcatgatagtacaaaatttagaagaaaaaatgaactagaagtaggataagcaggaaaaaaaagcctgtttgcctgcccggcttgcatccctaatgctcgccagccgacgagggagcttgaggagagaggaaggatggccgggacacggcacaaagaaacacgtgcagtacgttcgacgcttttcaaccgttccattagggcagtcccaacccatattgtccataagcagtgtctatggtgccatgtcaataagacatcacaatagaaactacactctacaacctatggtttcttaaagtgggccattaataaatataaactacactctacaacctatggtttcttaaagtgggccattaataaatacatcatctctcttctctaccaatcatatttattcttcatctattataaagagactattctctccaaatgcaaaacttgatagtgtctagtgcatgggttctcgtgttgaaactgtgtcttgcatgagacccggtttcttcctctattcactctctctctcttaattaatacagtgtcacataagctaaaagtcctacatgacagtagttaatgccatatataccatcttagatggagagttgggaatgcccttagaaacaagctgactaaacttatgtaagttccttcgaatgtatccttaacttcaaacgaaacctctcttcttccttttctcgattcagtgcaaacctcaccagtagatatatgcaagataagcgcaatatcgcattactcatcgatcggatacatcattaaatcacacgataatacagccaacaaagcagtcacgtcaaacgatcggcctgcaatatgcacgacagtatcccaattcccacatacacggtacgccccggttcccatcgatgattcgccatctcgcaacaccacacagtttccactttccacactcacgcaccgaagaaatagtcaagtctagctcgacgcctccgatcatacggctagcgatgctgttgccgccggggtggctcccccgagtcggcgctggagtgggtcccgtactcgctgctgtcctcgatgctgctctcgaaggccaccttcctcaacctgttgatgtcggaagcgtagttgccggagtcgtactccgaccccgtgctgaacatcatgctctgcccgggcttcaccccttcgttcaggtcgtccagcgacgcgtcgccctccagcgcacggacaatctgcaatacacgcaaagaagaaaaaatatcatatattgccaggcaaccaggtgatcgatgatcagtttgatcactgtgagctgtgcggtttcaattacctgcttcatctttgggcggcgcttggcggagtggcggacggcggcggcagcgcatgcggccatgcgctccatctccagccggtcgaacttgttctccaggcgctggtcgatcagctcgtcgaaactgccgtcctccgacaaggcgcgcgccaggaggggcctcgcctgtcacgaccaagcgatcgagtggccggcgtgtcagaaccacgtatgtaagcttaggatgtagtagtggtagtttgcgatggaggcgagggtgacgctcacccagtcaaccaagctgtcctccatgtagttcgttgggtcgaccggtcgccggccggtgatcagctcgagcagcatgacgccgaaggagaagacgtccgatttgtccgtcagcttgccgctcgacgcgtactcgggagccagatacctacacacatgtaactgggactcgtcatccgtgcccgctcgtccgtcatgcatgtcaacgagcgagccacggtctcatgttgcactaacccgaaagtccccatgacgcgcgttgagacatgcgtgttggtgtccgtggttagctttgcaagcccgaaatccgcaacctaatgcaaatgaattcaaacaagtcaggactagctagttcaatcttaaacgcagcttaaacaagctggtgtgttcaccttagcatcgaaattctcgtccaagaggatgttggccgccttgatgtcacggtggatgatcctaggatggccttcgtacgtgacaaccacaatgcaacaaatcagatcgttagaaggacgtacagacaggatttgtccctgcagactgcaaattaaacgaaaagtttattagggaccttacaatcttcgtgaaggtacgcgaggcccttggctgagccgagcgcgatggcgagcctcgtcgtccaggccatcaccggcacgcccttccctgcacgcatccggcacacgcgcgtgtcagaatcgaacaaaaatctcacgtacgaatggcgcgttacgatggctgggaaaagagcaggaaagatatggagaccgtggaggtggtgctcaagggtgtcgttggggacgaactcgtagacgaggaggcgctgggatgagccggcgatgcagtagccgacgagggagacgaggtggcggtggtggacacggctgatgatctccacctcggcctggaactcgcgctcgccctgcccgctcccggccttgagctgcttcaccgccacctccttgccgctgcccgcgaggacgcccctgtacacgtacccgaacccgccctgccccagcaggttcgccgacgagaacccgcccgtcgccagcgccagctcgtcgtacgagaaggagctcttcgagaaccccagcgccatgcccggtgacggcggcggcagcggccccgccccgtgcgacccgctcatctcgctgctcggcggcgcctggcctggcgagtactgcgcgtgccagccgccgccttggtccacgctgttctgccacctgggcatgctgttcgcgtagtacactttccctgcatgcacgcggacgcgggagcgcaccccatgtcaactgcacaagatctctctgcggcatgcgtggcgagcgcaccatgccgtcgcgtcgcgtgtagatgtgtgcttaccgttctcgtcggtgtagtacggcatgtgcatgtggggaggtctcttcttcttcttggagcagcacacgcaggcgacgatggccagcagcagggcgaaggtgaagaacccgatgaccatgccggcgatgatggcagcctctggccccggcctgttgccgttgctttcgctcttgccacggtcactcgagctgcctccctccttggagctcccactgtccgaggaggagccaccgtcgccgctacgcttcggagcgggttgagactggacggcctttggcgctggcggcgagccatgcgatggtggtggggacccgccgccgccggtattcgccggtggcgccgactgcgacggggaaggtggcgacggtgctgagcccgaggaattggtcggtggggccgacggtgtggacggtggcgggctggcaggaggcggcgatgaccccggaggaggtgactgcgacgacggaggggacgacgacgtggagctcggcggtgatcccgtggagctagagctgtccgcgcctgccgatgaatccaatccatttccatcaaacagattatctagcggggaatcgtccatttcccgccggacgtcgagacggatctcgccccggcgatgatcaagacgattccacccctcccacgagaggatgttctggaatggaacggcgcggcgcgcctccccctcctcggctcctcgtcgcgataaacccctgcaaaaatatgggaggaaaaaaatggtgatattatctaaaaggaaaaaaaaaagaaaggatgcataaccatgggagaggatagtgagggatttgaggattttatctgcatttgagggacttgtctcatgtttcatcagacctttggtttagttaacatgtccattcatacagaactacacgctgaaaagcagtccttttttttttgtttatcttacattttagaatcctggaacatcaaggaagatagttcaaaagctactttaccttacatcttagaatctaggatcaagggaataaccacattcactttaagaaaagcaaacatcatgcaaaagaaattggggtttatgaaactggaggtgagatcgaatacaacattcagagtaccaaacaaatagaggaattgaaatgccatgaaattgaagaatcaataatgtaccttcctttttccctgttctttctgaaaaaaacagaaggggttgaagcagaattgggaagggaaaaggaagtaggcttcaaagcgctggtttcgtcacattgtccaacctccaccgcaccgcctcgcgcgcatttctgggatacaatctctttatattttctatttttggtctccatgccaactgggacgttcccaaccattggagctcagctgacaaacatcattatcattggtggtcaagggagcttctgtgtagattcaaaaaaaaaaaaagagcttatgtttttttccactccgcacgagatctagtactcattgccatttgtgctaaaacatgagctaccctatttgcttctctctttatcttgtgcacttgcacttgttggaaacactacatcactcctttaatctcttcaattgtcgtcgcctatttatcttgtgcacttgcacttgttggaaacactacatcactcctttaatctcttcaattgtcgtcgcccaggccgatttcaatggcccctgttgttttatgccatcgacaatttcagcattgtccatctccatcacaattggcatgtggatcaattcaaccgccgatcacagtccttctagacatgctagcgcctccgcctgggccgaagaaccgcattgatgcaaggttttgtggccagcaagaagcaccaaccccttcagtctctgaatataaatccgacgcttgcatccccagactcttctctgtaaccagcgtcaacattcagtttagcgaaatattccggcggcgcacaccatctgtcagcctgtctgttcatacttgtagttggaacttttttattatgttccatatacatagggcccttccctttgtgatcatcttcccgttgtcggatcggctacaattgattttcatagcttaccaggaagctagccgagtcagctattgatgcatttcctttaccatggatcacgtcatttcgcagatgccaggctctccaaagtaaatacatctgccttcgctgaagtactgagactgtccagcagtactaacagccaatcagggcccgtccatgaaaaactccaaaaaaaaaaggagtttatgtatattaccatgcaaatgctttgtgccatgtagatttcttttctttcttttaataaagagccagtaatagaaattaaatgaattttgtatcagtaaaaaaaaacagtgactgaatcttcggtcattaacagtcagcagttgtcaaataacaaataacttatgcccatataagaaaacagcatcgaaactggtgtactgaacactatcgttccatgcatctttgtgtaacgtcagacaggacagggaaatttcatacaagtaaaaacaagagcataaggatagattttgctcaaaagtagccagtatcccattaaataaagagcccgataatacaatgtagcagcagctcaattagaatcgaagcaaataaagtatttcactcacatatctaaaccagaaagaaatggacatccaatgaagaaacgtatgcaaattactcagttccagggttaaccagtgaatgtttggagcattggacaatgcatgcactgtccgtgttcgaaactcatacagaaacaattatagcacatcacccaactatacaagtgactcagataacatactattcaaacaactgttccgaatcagctatttcacttccaggagttcctgccgaagatttaacaaccgtctcttgatcagcataaataaaactctctggcaatttgagtactgctcgatctccatcagattcaccccggtaggccagcccaagagcataccccaaagctcgagcaactggaattgcaaccgcattgccaacctggatatatctacattgaacaagaatacatagcataagaatggaactacacaacactcatctgtcatatactattatatctgtgagtaattcaatccaaaatatggacactaaagtccatattactgattcctgaatccactacaatcgatacaaacatcctataagcacttacttctcctttagtgggccgatcaatctgtaatagtcaggaaaaccttgcaaccttgcattctcgcgaatagtcagaactcggtcttggctaggatgcaaaataatctgcatatgggggagtccgtttatgcacaattacaaccgaagtggcattaagatgggaaaaacgccaaaaaaaaaatgatacctggttgtgaggctcagctctggtaactacagtgggaacagtttcatcccaccacaggcgtccaaacggtctgcattgccagattaattagaattatcaatcaagattgtgtaaaatgaaccattatgctcaacgtacttacttagttgacttccccttgacgaaagatatggcatagtcaggcacctatccagagaagcagtaattaatggcatgcaaaagaggaaacattgacattgcagttgttgaaatatagcaaaatataaaagtaccaaaggcttcccagatgacagtcgttcacgggaaatgtttggatccagccgcacagtattatctgggccaactatgacgccctttagatcacgaaagttcgctccctgaaacagaaaaaaaggtaagcaaccaaggtattgaaagtaactggcatgacaatcttaagccttgctaaccttttttacaggtatccgctgcacacgctcataatcatctttgtttagctttagaggttgatgatcaaacaatttaccttcttcagaaggatcatctccacgaaaagagtaatcctgaatgtctgaaaatgaataacaaaacaaagtaacttggcctagaaattcaatcaagaaactacaagtagcaacacttagaattgcataaaccaacgggcaaggcaattgtcaaacccacacactaatgaaaatttaaatagttagaattccacaaatgcagagggaaagagcataacaaacgaacatagccctccatcccataaaaaaataaacctagtaagggatatggatcatcttaatactacgaatctgaacagactgtttcacatcccatattaggtgtgtttttttatgggacggagggagtagatttcatgaacagtatttatcgatatttgttaattcaattagtaacaaatcatggactacctttacggttgttccggatataccgttgaaattcagttttgggggcaacactatactctattacatctttaggttgatcatttccaacctgtaaatttgtaatatagcacatacaaaaaaagaacaacacaattgtccaatcagcattcaaaagataaagatccatggatatatgaaaataacacaaaccttgggtaaatcagatatggcatctgcaaggagaagagcctttcgtaggcaacgggtgtctacctcattgtatgcagcaacactatgctgcaaatggagcagccaaatattaaggcgatacataatacaataatgaaatcttggcaattatttactcaattctcttaccgaaaatgtagttggtactattccacgcacaacagcatcatgggtaggaagtgggaattttggtaatacctattggtgaatgtaacatcttaatatgcaaaagtgtcacaaaggaataagattaagaaagcatagagagaaaccattgatggaagggctccccagagaaatgcccgcattctgaactgcggtagcccataatatcctgccgccatcatcccaagcctagcttgataattcatagccacaaggcaactcat

SEQ ID NO: 10206 - DNA, 23537 bp, Oryza sativa
  unsure (1)..(23537): unsure at all n locations
tgctagaatgacttacattgtaaaacggaggaagtagtataaaaagaaaaacagttgtttccatcaataacaggttgatgttgctcccacaaaaagtgtgaaggtacacctgcctacattctacgcctttggataaggacatatgaacagttggtgattacgtaattttgcacagctcttccataaagatttttttagattaagtcttccataaagattagattgtttggaagggtctttctattcaaaatagggtccggcagacatatgtagattttttttaatcataagaatcagatgtttacagtagttactgtggtcattttcagatacttatggaatggcctttcgaaaaaaaagagataatgatggaatgaaaaatatgctgaaaattggacatgtgtttaggatcatgggagaatcagttttataagaaattgcatttgctgatgaacataatttacttcggttttccctgagaattttatccatgcacttgtcaaataaatgattcaacatcacagaagacattcttttgctggagtattctatttttttccatggcactacaatacgctgtaatgaacacaaacatggtaacaaatcatgaatacttttcttgattacctgtggtgaaggatatattgtgaacccgagcttcgacttcctaccgtaatctactgataggcgctccaaaagtaatgaaccaagtccagagccggttcctccaccaacagcattgaaaaccagaaaaccttggagaccagtgcagttatctgccagttttcttagtcgatcaaggcaaagatctaccacctctcttccaactgcagcagaaaaaaaaaaggatttgaatcattactaaaaaaatattttcattataaaggaatatgacagtttctctagtatgacaatttatttatggaggaagctaaatttatggcgtcatatttttcactaaaaaatagtcggcatgtcgtaagttcctaaattattattacaagtcaccccaaggatataagttataaacaattaatgttattccttatgtgagcaataatccttatggatcccaaggatatgtaagcaatatcatggattcagactcctctaaatccacccaaaccatatctttgtggatcaatcatacctgtagaatgtttcttgtgaatactattctagttggagtatatcaatatgttggtttagacattttcatagacacattttatttctgcaaaatggctcagtttcagggtaagcatcacacctgtgtagtgcccacgagcaaagttgttagcagcgtcttccttgtaggagatgagctgctctgggtggaagagctggcggtatggcccggtcttcacctcatcaatcaccgtgggctccaggtcgacgaacaacgcccttgggacgtgcttgcctgaactcgtctcgctgaagaacgtgttgaatgcatcccttgcaattccaggagttgtgtcgctgcaagcaagcgtcagatatgaccaaggattaggatatcgtaaactaggagccactaggcaccgcagcaagtcacagactagtattcttcttgaaatgaaattcgcttcacaaaaaaggcacaggctttctactctcaaagcaaccggcttggggatcacagattcacagatagcatctctacaagaacagtgctagcatgcatggtgcaaatcaaacatcgaataaaaatcgctaatttcacttctgattgtcatacatgactggagctggagactctgccccaaaattctcctcaagatcaattcttttttaggctacagcaagaaccaaccaaacaggacaaaaccatcatccgaatatcagaatttcacaaaattaagtaggaaaagacagcaagagatgcagacgagcaagaattgggatcgagaagaacctgggcatgaggccgtccggctggatgccatgctcgaggcagtatagttcccagcaagaattccccacctggatgcccgcctgccctatgtggatgcttattatctccctcatatctctctgcctgtctctgcagccttcagagttcagagttcgggattggttcagggttcagaggaagacagaagggacctgagcagtgcagcacatagaaaaagctagggataaaaggagggcaggcacaatggcgtgaaccggaacacttcagccccgggaacacgttgcagggaaagtgactccactatttggtggaccaaataacgagcagctactacaagaaaggtgactaggcgactggagatgatggtggtcttctccattctgcctgcctctgactgtgagtatgcctggtgtaaaattatatcgcaattacatgaaatttttgtctatatatgatttttagggcatgcttattaaaaaaatcgaactggtaaacttgttttctgacatcaagtcggccattcagacagctacagatgtacaggtacagattgtttgcaagatgtctgacaaaaatgtcaatgtacctacggtagttttcaagcaggaccaagtttatcatctgctgataaaagaggaccaagtttgtcatcgattccaaatcgaatgccgccgtgacttgacaaggacacgtccatcataacatatgctgtgatcaaggacgccatccatgaccacaacgctaaaatgagcacatctacggcgcatgccgacgagttcaatggggagtcggcccggaagttgattgtcttgatgctgatgatgaactgaacagagcaccatacactgattgattatttttttctggactgaacagagcaccataaattgctgacaccacaaaatagttgcatagactctgcacctgtaatctgaatgatctcacatcgaagaccctcaaaacgaaaatcacatatctatcagtgattttttcccaacttttttctattaagatacccttcgtacaaaactacaaccagatggttctgcacttctactacaaccttgttcatctattgcactagccaaatactactactactctatctacccgtgttattgtgaaaatgaaggaataaacagtgcaaaaatctgttcagcatcaagtgcagaaactactcacaaagaaaactttcttttctgcacggcataagtccgcgactttcttgaacaattcgcaatcggcgggttccctccggaagagggcatcagaacagaacatttgtttagtaggcattcgtttattctgttcttggtttcttcagcaatcagtgtacgacgtcacgcccccaagatcgatgcggattcttcttctgtcacttggatttctgaacattccttcgcactgtgcaggcgacagcgaggcgaagcgatggagcaaactgacactgctactgcgacaggttgcacatgccggggtggagcgagcaccagagcggctggatgggctcggcgcggatgccgcgctcgaccatccggtgcctccagtcgttgaggcggtcggtggcgttcgcgtagcgcttcttcccgttggagcccttgttgccggaccagagcgtctccgcggcggcggcggccctcggccacagcctggcgtccagcaccgtctcgtccgactgctccgaccacagcgccacctccccgcccagcaccagctgcgcctcgtcgtcggtcagcccgtgcaggatgtcgtagtcgtagacgcgctgccacgtcttgaacggcgcgcaccatgacccgcccgtgccgccggggtcgttgaacagcggcgtgccctcgcgctccttctcctgcttgtcgtaccggctgtcgttgcccacccacccgccgtggccgcagtccaggtagtagtacgacgccgacgacacgatggcgcggtagcccgcggcgacgacgcgcttcgtgttctccggcccgtcgttccacgtctgcagtatggtggtctccctgggcagaatcgtggggccgacggtgaccttgggcccgaggaggacgtcctcccagtagaccaccgtgcggttcagctcctgcgccacgaacgggcgcgtcgcgttgatgaacagctccaggaggtggtcgtgcgtgccgccctcggcgaggaaccggcgcaccaccgggtcgtcctcccagcacgccgtgttcacctcgtcggcgccgccgtggaggtacgggtccgggaacagggccaccatgtcgcgcagcacgtcctgcgccacgcggtacgtcttggggttgagcgggttcagctgccccgtgccgggctccgccgccagcgccggctccgcgtgcggcgcccagaacctgttcgcgcaggtgacgatctccgggtacgctcccgcccacgaacccgtgtgccctgatccgaagcgcgcgacacttagccttgagtatactgtttattcggagagcaatggaattgaaatgcaggagcagcagagggagtctgggatttctcactcaccgggcatgtcgatctcggggatgacgcggatgccgaaggaggcggcgaagctgacgatgtgccggacgtcgttctcggtgtagcgcatggtgggggagtaggagccggagttggcgaggttggggacggtagggaggacgatggggaaggactgggcgtcggtgatgtgccagtggaagacattgagcttgttgaaggccatggcgcggagggtgtggaggatgtcgcggaccgggtagaaattcctggcggtgtcgaggaggatgccgcggtgggtgaagtgtgggcggtcggagatctcgatgccgctggggacgatcggctggccaccggaggcggcgccgccgccggcccaggcgagctgggagaaggtctcgagcccgcggatggcgccccatggcgtggcggcggagatatcggccgatccggagtccgggagcacggagagcgtgtaggactcgtcgacggcggggccgagcgggacgtcggggtcggagacggagagcgtgagggtgcggacggggacgcgggagagggtgtagttggcggggggaaccagcggcgcgtggcgctcggcgcggatgaggcgggtgtagaaggctaccgcctggcggagcgacgggtgggacagcaccgcgcggacgctgaacgacggcgagagcggcgcgtacaccgcggacggccacgagatggacgtcggcttgggccacacctgcaccttctgagcaagcagcggcggcgggaggtgaggctccgaggtaggcggctgcgaagcggcgccgggcgcagccgctggtcggaggatcaccaggatgaggaggaggaggaggagataggccggcaatgccgccatctccgtggaggacgacgagcaatcctggtcgcctccgcgagtgcagcagtgaggcactgagggattcagttgctttgacttttctcccctcatatcgttcgtgatcgagcgaggttggtggcgactcggcgttatccgcaacacgtggagcaagacggcccatgtactactcaaggcccgtaaaggcggcccatgttccatgatttcttccactgtcaggtatctcctccaccctagccgccgtcgctccgcctgctgctaccccgatccgggcgagagtacgccggcgccggaaaacgtaagctacatgctttccctgtttattatcgtattcgtttcgttgcgcgtgagcggagctagttcatggcagccgctgaacttcccccttcctttacccctagctcatggtcagatcctcttggttaagatgtttgaatcgagccgttttccagctttacttgcgccttctgtcacctgtaaaactatctaatttcaccatcttttatcatcaaaatcgattttgtgactgacgcttggagttcagtatggtctttacaaggtagagtaggtaggagcattttagaggaacagtgtaaccctgaaatcgtgtatgatcacaaataaaaacatattgaatgtttacaacaaaagcagattgatggtttgcacccaccggagggatatgcttagccgaaatcggatttgttacgtctgaactctgttgtgcctgcatatgaaggggtaggaaagatgacgcctgattgaattgcaccgcattttcaacatatcttgaattcatattagttcagaaatcagtacttgcactgtcacatcatgttttatggaccacaacggttttagatatagtttaggctaagtcattgttttcatttatgcaatcatgctcaggacccagctttctgagatgacctgagcttctcagatcaatcttttgcagcatgcaaattctgtaaaggtccatgcactattgatcttgaatatgtgtgcattcccactgatctagtttcattttgtgatagtgattatcttcataaccagtaaactttgttggcaggtatagctgctgtgagacgaactgtatcaatgatgagctcacgaggcactagtgctatgctttcaagagctgctcggatgaggcaaaagctacagtctgctttggaggccagtgcgctagatattgaagatgtttcttaccaacatgctgggcatgcagctgtcaaggacaatgcaaatgagacacattttaacatcagggtaatttcgcctaagtttgagggccagagccttgtgaagcgtcacaggatggtgtatgacctcttgactgatgagttgaactcaggacttcatgctatctcaattgttgcaaaaactcccaaggagtcaggatcctaaatgtcaaaaatgtaaggacttatatgcttgattacttgtcttgaaataagttgattgcagcaatattgtgtaaccataagtcaattttttcaaaacaatgttatggacgcttatgttttcactaaaatgcagtgcacaacttctgttgtcagtgaacatctgtgctcatgaaaatttgtggaaaacatagtgagtatcgaattgatatatctgtttactattcgatcagatgagatttttctatctggtatattttgtaagcatatatgaaccttttgtcttggtgctagtctgttacatatatttcttatttacgccaattggtatattatccatcatgacatcgctgataaacaataacattcctagttctggcagttgtttttgctctgatcttctgtgatgaaaactagcatggctgaataatatttatcagtctgtgtttgttgctaagattattaagtaaatgatttgtctgtgaataaaaagcatgcccagcccagttcattatctttgtgacattttgtgcggatacatgtttctgcttcatataatctccttttggttcaaagtagcgatctatttatcatcaatattatcattctgttcaattccaagaaccatgtggatatggaggaattcaaaatatcaggcctcacttggaacatacaccctccatcccaaaaagagtttatttgggctattcagctagacaaaaatctaaagagtttatattagcgaggctcctgcgaaagctgagactattgcaaacaatgtgtcggttactgtttgctggagaatccatgagcaggagtagagatgcagctttctggccaatctgatgtgtagaagcgtgtcatgtaaaacagcaatttacctggttggacaagaattcttaaagttgtatgggtcgtcttcttctctttgtgtgtgtgtgtgtgtgtgtgtggttcaaaattatactgagcaacattttttgtttatctatgtttggtgaaactcagttacataattcaccctttgaatattctgtcgatgtccaggtttggaggtgtagagggtatgatggtgactaagccacagtattgtaacaactcctttgagagataaaaggatgtctcacaatatgtattttgtgacgtaaagttcaaagttatgagtaccttggagacttggtggagatgagttgaccttatagttagaacaggattccagtgtattcataacatcctctttgttcgagtaaaaagattttggtgaagatgagttgccctaacaattggaacaggactccagaacatcctttttattggagtaaaagaaattggattccggtgcattcaaacatcctctatgttggagtaaaaaaatgagtagaaaaaacgaacatcatctttattggagtaaaaaataattaaaaaaacgagttggaaaaaggtaaaaatgcccccatgcaggatcgaactacagaccttcagtttacaagactgacgctctaccactgagctataggggccactgctacaagtaaaaagcttcagtttactgtcataagtttaactgaaatatatacactaaagatccagtaacccagaacactggctatacccaaaccttcagttgcaaacttgcaatggaacacttgaatgacagaatgtagaatccagaaagtccaccgtccatgattccaactatggttaagggaacctgttcagtgttccattgactttttcaggtgcatctagctaaactttacaaatatgcattcacctttggtttttcaattccaaaaagtatcatgaagaacaagaaagaggtcggttctgtgaaatgctgacacagaatttcttggagtcatctcacgcattacagtgcatatccataagagggtgacaatagaaaaaaaaatggagcggagcaccaactccccgttgaagaacaagttcccaggaaagacaactattcccatttatctgaatatttgtatcgagcaaaaaaacatcggttgataacattttaagataatacaatctatgagaaatgcccatacacaaataacacttcaagacattaaatgtcatttcgacaatgcagagcttattctacatcttcctcattatgaacaagcaacttgccttccgtgaattcgcatggcttgatgggtacagctaattgcttgcgcatttttcttacaacaaatgtttcagtttcttcgcatattgtgaccacagttcctttccgccctagacggcccgttcggccagctctgtgggcatagtgtgtagagtctgttggaagatccagattaatcacaagatcacattctggcacgtccagtcctctggcagacaactcatttgtaactagaactctgaattcaccatccttgaactttttcagcacagttgatcttgcaagctttccaagatctccatgtagctcagtagctttcatcccacgggcctccaacttaaatacaacatctttcaatggcttggtgttgttcataaatgcaataactgtctgagcttccagagcatggatacatctcctcaaagtgtcaactttgtgttgagccttggatatacaatagtaatgttccaaagatggtggtaagctgttaactgcagcttgattcactgaatttgatggagagttggggttggcatctgtctgggacagcacaggtcttggaacagtaattgaatcaagtggaacaacactcatagctctaacaaggactggatcgtgaccccaactcctggctgctcgtataactgaaaacggtattgttgcagaaaccaagatagtctggcgctcagaccgccttgcaagagggccaagaatatctctagatgaagtaccagatttccttcctacatgttcaagtattctatgcatatcttcacgataattgaaagacaaaagctggtcaacctcatccagtacaagaaagcggcaaccatgggtgtgtagcttgccccctgctgaaatttcagaaatacgaccaggtgttcccacaacaataagtggcttgttctttttcaatgcttcttcctgcctcgaacgattagccccaccaacaagttgttggacaagcctcttatcattagggcccaaaatcttctccacttctcgcactatctgcattcctaattctctggaaggagcaacaataactgcctctacacctgatctcttatcagaaccatcttgttctgtaggcctctttagggggcctatttcagaaagaatagggagaaggtaagcgagtgtcttccctgagcccgtatatgactggataactgcatcatgcttttgtgaaatgataggaatagcagcagactggacctcagttggagtacttagaccttccttgttcaaccgatctataagcaaaggcggcaaaccaagctcttcaaatgattttgcagagaaaagagattcatctatcttcagagtcttcttcactactgctgatttcggtaaggtgctctttgctggtttggaattaaatgaagaaacttttggtttcaccttaagagcagaagcccttgaagacggctttggacctccaatgcgtgttgctttttctttcttaccatattcaactttgttttgcccttcaagactagctagagttagtgaagcactcttatcttgtactgtttcagtaccaagccaagcggtctggtgaaatctaaccgctcgtggtaatgaaagcattctcaatgggaggttgtcaccgaggacgaagcatgatcgcgaagatgccaatgcaagcacatgtcgatgcacttggccaacagttagcctcatctgctgctctgcttatgaaaaccaattttacagcagccgaaatgtccttactcccaactgatctcgcaaattcaccgggggtgctcttggctgtgcaaagaaccaaacaattgaatcatgtaaactgcagcattcacaacttgcaatagtaaaacaaagttagacgcaagaagtctgtggagtatcggtggcatcaatcgtgttaaactcggttgaacccccaaattttcttgggaacaaactaaattgttattcgtgctaaggttaaggcaaaaaggtaaagagaaaggcaacctacagatctagaagagaagctagggccaacgcaaatcggaggggaaaaaaagtgtgggttagtgagagatgagaaagaggatgcgcgtaacgggtggggtgctcaccagcgggcgaggatgcggcggaagcagcagacgccggcgccgctgcccactggagatcgacgcaggcgaggcggccggcgaactcgcgaggagggaggagacacgcgggtttagggcttagttagcctgaagccggcgactggctggcgttcgtctatccggttgagtggggagggggctcgtgtggtcagggtgtcagagacacgaggtaggagtgatgggccggcccatcaactgtggcgccggccgcaggttgtggaagcgggccacacgggccacggcgccgccggacatgggggagaagactgtttaaatgaagacaaaccaaggataaagttgattatcaaatataattaagactaaattacaactgcgcattttcttacatccatggcatcatccattttctacctcaaatccgaaaatgtaacatgcccacaaccaaccacaatatcaacatgttttgtacatgaaaagtgacaaaatatagaaaatacttttgagatgttattgatattaaaacaaaagaatactccctctgtactcgtaaaggaagtcgttttgaacaatgatacggtcttcaaaacacaactttgacttgttatttctataaaaatatttattgaaaagtgatatatgtacacttttatgaaagtatttttcaagacaaatctattcatataatttttacattttcaaactcaataacttgagagttattcatgatttatattcctaaagtttgacttaaacattgtcctaaacaacttattttacgagtacggagggagtataccaatagatggatcagtcttggatgagctgcctccaaattttaccttacagttactaggaaactgcaacccaacttgctcacactctgccttatagcatagataatagtgagctataaattaattataaacttacgtggatgagagaggtagcaagaaaaaaaatgaagggtgttactcttgtgcaagaactagctcaatacgtgctccaagacaaatacaataaatgcataagtgagataaaagagagaggacaacaaaaattgaaggaaccttatagctaatctattatatatgttgtctttaaagtatgataatagctgatagtgagctctaatattaaatttgctcttaagacgtgaggatatgaatggaatccaggtgcttaatagccttacaatatccagtcacatattggactcctgcaaccatgagcctaatataactagtgatctttagaaatatcttagctcggattgaaatccatttacatccatgccctgatatgttacacctataatttggtcatagtacgccacaccaatttgcagttagacaacaaacttctcagtgaggcatcggttatcttcaagcaccaatccattcttaggctatttaggctactacaacagcaagagccaatgtttctatggactctagtcactctacactaacatcaacatttgccaatgacgagagtctctaggttatgggaaaagttagccagtggatagacttatcaccttactctgttataatccagcggttttaatgaaaccaataacgctgaaaagatctcaacgtattttacctggtcgtcatcgctaatccacatttttttatccatattaacatcgagccattgcaatcttcatgcctccaaaccacgacactattcactatcatcgagtcgctgcatttgagactagtctttgtcctttatcatgtcaaacttgatcatggcctcctaaccttctattttctttgccatcacaccaaagtcattatagttagcttactagatccatgtgtcatgtggtgccatgcagaccaccacacacctacactaacatcgctaagttattactataatagtcttcttcatcactttgatcgatcgtaaggacgattcctaaactgccagtgctatatactattcatagtgtttatatcctctacatcacctatgatttatattagacataactctctcaatacacatcaataatttaatgggctaatttaatgtaatttatttctcacaaggtttagatgtaatccatatatttttcatctttccttgttaactcatatgacaaaaaaatccccacattctatatgaaaatactcattccatttcaatttacttgccgttcttgtatttatctatttttccataataatcatctttttacaatttatagagatgtgttttcttccctactatttttaaatatagttatattaatgctattatctgttacaattaattgtactacttattttgaaaaaacaagatataattaataatggtaataaaattatagttcattaatattttttcgtatacaatgtaataaaacaacgacgacgacaagtaattcgaaacggagagagtacataggtgcagccagcaagggcttaatgagcaccaccacccaacccagccaaaatggccaacgagtccatcctcgtcctcctccacctccgcctacagaaccctgaccggggtcttccccaaaaccctcgccgagtcgccgggctccgccgccgtccccatcgcgaactactcgcaggctactcctccggccatgaggggctcggatccggaccggggcggaggcgagccggacatctccaagctcttctgccactacaacgccctctacttccacgactccctcggcacctgcgccgtctcctgggccaccgacgaggatccactccccaatcggtaaagcgtcgccactccgaattctcgccgttctcggtgttatatgggggggggggggggtccggtttactgaatactgcggatttaggtcttgtgtggatgttgagttgtgtgcggtggttgcaagattgctccgttcatgtcctgccactaagcatgcgtatcttagtagattcagtgcagtatgatggctttatagggggaacagcacacgagaacaatcctgttctgtaggggttctgattcggacattcggtatatgttggttcaccccgcatcaaatccactcattcatccaccagtggatcaatgccaaaaggaagtgcttaacccatatatcccttgttcgttagaactagaacatcaatcccctaaaaatgaattagggcatcaaaggggattatccatattcgggtattttgatctaaacgttcagccagaacataggtgatccatattattctacacgattatgccttgtcattatctgcagttctatctgttaacctctaaatctttgcgtcgttctcttgttcattgaccgtaaaaactacactctttgagagtatggatcaatgcctaggtctaaaccatgaaaaagtggaaagatttaatgtatgcttttggcatgctttctagaaagaaatgggaaaatagtgtaaaaacatttacttttgggaaggagtgaacaaatttatctagacagtagaatgaaaaagtcgcttgaactcttagactgattacatagacatctctgctccagttgttttgaacttcgaagacactggtatcatatctatgggcctattcattctgttcattttgttgccacgttctaccattgctattctaccaaaattggtagttctgaaagtttcccattcccactcataatgacacaaccaaaatttggaaagaaatctaacaaaacacatccaagtatccaacgctaccaaaacttgccacttcctaccctgccaaattttggtaaggttgtttttggcaccaaagtgaacaagccctatatacttcccaaatatgtttgatttgcaaatctattggtgaatgtgcatagcattttgaatggaacacagtgactgatgtattgctatgcacaattatgaagtatgtcagccacatttatggcactgtcatgtgcatatttttctagcaagcatgttcaacaagattcgtgagttgtctgtcatagtgtcatttagctcataatcgtcaactataattgactggaaatgatgctgaccatccgacccttccatattttcatcttaacactatctttttcacataaactctgtactattggataactttgtgagttattgcctataattgttttcttctatagttattctctgaaataagaaactttcatcaaagaccatagtacctgctattaccagtatgattgttttgaaactttccatttttaatcattttgatgcagtgaagtaggtggctgtgaatattatcctggtggtggtggctgtattatacttctttccagatccttgtatgaacaccacacagatttggatttaaagaatgcgctgcttcatgaaatgattcatgcttatatgtgcatcaaagatagtaatgataaccataggtactttttagtaccatgactggcctcttcttgtattacacctgaatttctgtctacttttttttttctcgttttgactaatttaaaaactgtgatcaagcagtgaccatgggccaaaattccagaaactgatgaatacaatcaatttaaactctgtagccgatcctcatgtaagttgaattcaggtgtcaattttcaatcagcatgtgcttaaatatttcttattatcgtaacgatatttttaattatatccagcgtcctcttggtggctacagcataactgtgttccatgagatcagaaagaaattttatatacacaaagtaagaacctgatctttaaaagtaaatcttattttctaatttcagattggcagctaacaatctctgtagtgtgaaagctgtggagatttgatcaagtcaaccaaaatcaaaggaccatcacaggatgactgcattgaggcaatgggtgctaatgacttgtgtgacagtttaatttgtcactggcattggtattagctatatatttctttgcattttttttgttccatgcatgccttattggtatatctctaaaggtgtgttcggaatccccagttcccaactcatccatctcgttttccgtgcgcacgcttttcaaactgtaaacagtgcgttttttacaaaaagtttctatacgaaagttgctttaaaaaatcatattgatccattttttaaaaaaagattagctaatacttaattaatcatgcgctaatgaaccgctccgttttccgtgcggaggggataggttcccatcctccattactgaacacagcctaagagtgcacataaatattcatagaaatataagctagatgtacattttaaagctaactgtgtaatttccaaaatgtgtaatttattactctctgccttgttagtgtatccttgcaatgtgggaggtaggatgtaaacctcagtttgtgatgaacaaataaatcaactattattattgttaaatttgacaaagagagatgttaaactaagaaggtaatgatgggtgtctgcttcaatatctaacattttctttgtgttgtcctgtcactttggcaattgcataatctaaaaagtggtaaatgatctgacataaatttttctttattggaggtgaaatcgacatgtccagcagccaaacaagattagtaatacctgaacaactatcatgctctttctcctccttggggtcctgggatgcaacttactctaaatttagtgtcattgagttcatggatggagtcatgatttggctttctgtattaatatatatataggcacaagaagcggtgcactggtagctatcacagagttcaaggatcatcatcaggttgtgtagagggttcaaaaggtaacatttggcttaaaaaggaggttccagttatgataacattttaagaccataaaacagtctattttgttgaaatgccttgagatgactctttactgcagatatacattttaaactcttagtatgcctactcatacaaattgatgatactgctaatttttgttggtagctttatctgtagaagcacctgattgcaaagttgaagaatcagcccctggaagttggcacaatgcgcatgcatcaattaagggtggaaaaggcaataagcatgaactggaagaaacctctgctgggtttcctcctgatgactctattggtatttctggaatggagtcctcttcaagagacacagctaataagaaaatcaaattgtcaaaggatattggtttggaccgtctaaccgccacaactgttcaggaagcaccgaagcgtccaagaacaacctcactaaagaagaatcaagagtgcagcagacagaagaaaagaaaaataagcaagtgggatggttcctactctgtaatcattgaatggttgaattactattctgtggatgagtcagatgaagatgaggtgcctttgataaataaaagaaccgaaagaagaaagcggcagaagttactgaaacttgttcttgctagggaatccaatagtggcagtgaaggtgctagttctacatcttttgtagaaaatggcagaaattctagcagtgctggctcttaccccctaagccagggggacaatgacaaatctgaaaatgtgcaagctaatcgagttgatgtaagttcattgccagatcatcctgtaagtagtcatgtagcagcagaggatcaagctggccaagctgcatcgtcaccattgaactcaccaactagaggtatcgttgttgacatttcagatggttgatggccagagttccattagtttctttcagctgaggcctggacgtacaattatccagactacagttgtaacacttacttttaattccttgcacctgtctactgctagacatgcaacgggacgatcctgtgaagcatgtgtcttgtacatgtcttcgtttcttcctttctcatttcaccttttcttttcttagcatagatcagttcagtatacttaactctgtcaggttgtgtgacccatcagtttctctccgtactagtctcttgaagaacagcaaagatcaggttttctctttggttgattgtgtgtggaagatcaatccaaatatgttcatttcttaagaagataaattcagttctattctattcataaacttttgtaaaccttctaaaatcctttaataaacaagaagcaaagtgagtaatacgaaaccattcacaaaatagagggaaaagaggcccaaattcccaagggttaattggattcatggcccatttatccaaccgtcttatctccctcgtgtccttccccaattatccccttctatccacccacaccagcaagccgctcaggcgcgctctccgctccaccgccatggcgtccatcaccctcctctccctcgctcccgcggccacattgctccacctcccggcctccacttcgctctccacctccttcgtcgccgctccaggccccatctccggccgccggtccgtcgtcctccgcgcccgcccgcgccgctgcgtcacggtcgtgtgcagcgccgcggcggccgaggccgcggaggcggagcccgcggagaagttccggctcgacaacctgggcccgcagaaggggtcgcggcggcggccgaagcggaaggggcgcggtatcgcggcggggcagggcgcgagctgcgggttcggcatgcgtggacagaagtcgcgctcggggccaggcgtccggcgcgggttcgagggagggcagatgccgctctaccgccgcatccccaagctgcgcggcattgctggaggtgagtctcttcgagcttcccgcttcccctcctcgccctcaatcgaagcctcacacattcaaatgcactggaaattgagtgggaacacgctagcaccttccatttggaatgcagaaatgctgggattgagaagtgacccgttgcaagttctaccttgcgattgcaggaatgcatattggcttgccgaagtatgtgccgttcaatttgagagacttggcgcgtggcgggttcaaggatggtgacgagatatcattggaatccttgaaatcgaggggtttgattaatccgtctggcagggagagaaagcttcctctgaaggtacactatacgacgattatccttcttttttttaagtcggttctgtagatgaccatgttttactgaaaactgaaatatgaatgccttgcatttgatctttgccagtgaattcatcaagttcaccagcagtcttgggtaatcctttagttgttgatgttgtggattgaatggctggcctttttttttcttgtagttctcaaatgttgctgtgttggtctgtccttagcagcaattaccaagttgagtattcgaagtctcaaagttgtgtgtcgggatcaattttcttagctcgtgttggacaaacacggtatgatttgacgagtgtttctattggctactcaaggatctagaacgtatgagttatgatgaacccacacatggtgtaggcctgcatatgagcatatctgtcaggcataaacatgaagtggtatcaagatcccaacaaaaccatgtgctcttacatgtaccactgcatgtctgcatcactcccaacatacccaaaatatttactgtttgtctccactcttagttggcggattgctggagtagatgcattagtgtgctactgggttgccccttatagtgggtagtggtgtggcgcttgatcactgatgtgacaaagacttctccaagggtggaacttaatgcaccttgaatagcataattgttcaacttttattgttctttctggtcctatttcatttgattgattttttctatactctaggctcctagctatgtggtacatataaggtaaaacccacagggctaaaacaggtatcaagacctaagtcataatgtggggagctatcaactttatccttatgataggctttttccttcttgacatctgattctgatgttcagcagatggcgttcctttcatctttgtttgagtacaatgatactgcaatgttgctgttgttattgtatcttttatcatgcgggtagtattagtatgctaacttttgaaaacctatctgtagattttaggagatggtgatgtatcagtcaagttgaatatcaaggctggggcattctctgcttcagccaaggagaagctcgaggcagctggttgtactttaagtctggtaccaaagcggaagaaatggctaccacaatcttatctgaagaaccaagctcgtgcagaagaatactttagcaagaaaaatggtggtgctggtgaatctgatgaagcatctgcatagaattcatatacactgtacttctcctttacccttttctttaacatatacttatttctcttaccttgttccaaaagttccacgttcaacgaattttgaatccgtgcgatatgcaagcatttttttttgtgtgtttcctgtttaaatggagaaaattccttctatacccctgaaagtttagccaatcccttctacgcctccgagttttgtccactcctttgtatgcccctgaattttggttttgatccctttcatacccataccgttagttgaatgtttaattctaatgaaaaggacctttttgcccttagacatgaaggaaatctaaaaattgtagactagctatattgttggaagtgtataattttgttatataagactatcatattcatgactttattgtacaaggtattattcatggcaaagtttatttttacctaatgacataaaaactaatatttatttacctactaaaagagtatatgtagcatttgtttatggtagttcaacatattttctcctgttgtatatattatataggaatgctttccaaaactatgtttatcatttaaaaaaatgctacatgtactttttaaatatatattaaattttttatgtacataaaacttatgaatatgataatcacacaacaaattttatacttccaacaatatagtttacaaatttctacatattcctcacatattgaagggtaaaactgacttttatatacctattaaacggtcaattaacggcaagggtatggaagagatccaaatcaaaattcagaggtatacaagggagtgaaggaaattcatgggcatagaagggatcggctaaaatttcaggggtatggaaggaattttctctcttttaaatgtgatgtatgtcaaatgtcagtatgcataccccccaacacacaccctcaccctcttgtgatcttgcacttatacttcaagttgcctatagtattgttgtccatgttgtgttatagtttggtgacagtctttctaaacaaaaacaatgatggttcatctaggagctaaactctgtttcgcttatttgatcctgcctttttcaaaagaaggtagttatcatttcagtgtcttaattgatgcccatatgtgataatgtgaacttgtgggcttcttaattgtccatgtatacatttcgtgatttcctgggaaagtggacagctggacacacatgggggcatgcacacttaattgctgcactgttcatctagtgacaagaatgggcaaatgttatatagggttgcaagtcattctatgtgtgcttaacaattgattttgaacacaaatttcaacagaactcatccatgaatattgcttgtttgaagaagttatataaggacactgctatatctactgtcacataaattacaagtagtttcttgtttgacttaatacaataaggacagcacatccctcctcaaaggctcaaactgactacagttatatcatcattttgaacttcatgttcatgttctctcattttttattcagggatttaaatcgccacttactgctgcttgtttctttaggagttagttcaaagggtgacataactcaccttttactgcagcttgaaattctttttcctctctctttgattcattcttgcaccctcttgctccctgtggacgttgatgcttcttttgtttgatttgcttcttgtttcaatcgtttacataatctcaattatacctcatacttgttattttcctgttgtttttcgacatttctttaggaaaagaagtcttgactatttaggtaaattctattccatctttgactgtgaaggtgttaatttgttgagatgtttcccatttgatcaaaaacaattatttatggccttttgatgataaaatttatttgtattttagattaacacgcaaatcatcgccctcattcgggccctaggtccacgcagcatcgggagaatgactggcaaataagggtttgggtaaatttccagtggcatagaagaaaatttacccttcatttcagtgtgcagtgcagatttgctatgaactgcgtaccaagatcttgactagttgtgcttgcattgcatgttcatatcagcaatttaatactacctccgttttataatatttcatattataagactttttagcattgtccatgttcatatggatgctaatgaatctagacaagccactagcctattattgcaatgtagttgtccttaactacgattgcaagcattagaaaacttatatttccttccaaattgatccaaggtactcttcgtttcaaaatatagcgaacttggactgaatgcgacacatcctagggcctgttcactttgatgcccaaaagttgccaaaattttggcatatatagttatcaaaatttggcagcaaactaaatatagtcacttttttggcaactttaccaaaatttggtaagattgaaaatggcatcaaagtgaacaggcccctagtataataaatttgggacggaaggagtaagctagataaaaatgaagtcatttatttattgttgcatatttaatcataaatagagatatcaccatggaattagattggtgtatacgtatgcttcgtgctactgatccgaagactcccctgccaagggatcggatctcttgctcatggattatgcgtgtgagtagacagatgatctatgatcaccactgtgccatgtcgggcaagatttgtggcgcgaagttagcatcaagttggaatacattcaagaactctgttctggatgaatttggacatagcagaatgctaaatggcgacaggctgttattagagggcgatgtgcttttcatgttgtttcgggggaactgaagacactagtactgtagcacatacatctgacttgttgcttctgcctctcgaactgatccagcaatnnnnnnnnnnnnnnnnnnnnagtatcagtaattagtaagcgtataaggatggtattagtgttgatcgggatattgtagaaggatggatgtattatagtgttgatcgggatacttagaactacgagtgatagcttcgtgctacgctgttctatagtcaatgtggcacaggagaaacgctagtatggcctatcagagcactatcagctgccgccatcaagcaaagctgaggccgggctgtccaggttgcttcagggctttgggagctttcgattgctttccactcccctccatctccatggcgcacaacagcgacgccccgtgaatgcacgacgatgcatcgtgcaacgcaatcgcgtcgccataactccccgctccctttcacgccagcctaacaaccagaccccatcgtcccggtgtggcatggcaaggcatcgcaagtcgcaagccaaaccccgcccgcaagccgagagggaaggagaccaaacccccccccc

SEQ ID NO: 10207 - DNA, 21702 bp, Oryza sativa
aatatcgtcccgccgttgcgcccgcctcgtcggttttctccgcgcccctgatctcggtctcctccgcgcgcccaccggtaagtttatgcctaatgttaacgctgtgagcctgtgactgagatctgaagggttgtggtttccattatacaagagccattaataggtcttggttttttggggataactggtgggaaacgaacaatctttctgtacagaaactatcttgatttataccgtttccacaattccaattgctgtgtcgtttgttcagtacatacaatgtttccacgaagatcaggttgtggaatggggtgaactaatacatttggattggtgagatcaaggtgaatggttttttttttcagtttttttcctatgataaatttgggatgtttctcatttaggtgagatggttatgttgaactatattgtaggcaacactgacccttttatccttctcaaaataaatattatggaagctaggttgtatcattgatttattctggtgtgtaccattgctgctgtgggcagcagtttgctggttactggcagaagaaacctcataaccttgtttgcctatgtgctcaatgatgtatagttgacaccatcctccctgccgtctccacgcgtcccaccgcgccgcccccagtctccgcatagccaactgcttcctctcctctgcgcgtcatcaattgcctccactccacctcgtcaacagcctccgcacgcccactggtcccggcctcttcaacaacgtctcctgcatcaacctgattcaccggaaggtacaaatatcatcctccttccccctccccccctctctctctctttattcccatctgaaagaatcaaccaaaataaaacaacgagatgcatcattcatgtatttgatcattttacgttttcatttttaagtgcgactatccaccctttttgtttctaaagataagcgagggcatctatgcacactttttattttacaaaataaaaaaaacaatgacaaatatcatagtacattgagttgtacttcactggttctttgacgaataagtgtatgatatgcttctccataagaatggtgctggtctgcactatacttcttattaaagtcgattgcccatgcaacaaagttgcctgtatgggttatctaactcttaaatcagacaacacctattagcttgttgcacatgtcagttgttcatggttatttaattcaaggttacttaaatcttctcctatggcctttagtactgtcatccatattctgctgcagcttaactttttttcttaatatacatgtattatttacaatatatttagaaatttagtgccatgggactgactgcactgtagaacgtgttccttcgtgcctggtagtgctactttatttctcttaactctctactttgtgtgaatgaaaattgtggtggaatattctttttttagatgaatggaaagctatgtatatatatttgcttgtacaacgactgtcgtatgaaatgatatttatgttgttggaggtagaggtaaaatgtgtaataattgctgcgtattttgttgtttattatgtactctgaaagagtggataatgcaattcgggagatgaattgagaaatgaatttccaaatttgattgcatgacgtatccaatttgggaaatgaattgagatattactcctttgttcttatgtctgaaaccatatttgtacatgtcggtgaaaatagttagtgtcatgcatatatcatcagtttccatgggtcagtttaggttttctaagtaatcatcaattacatcatccacattgatttggtttttaatgaattttgctaccatttatgttgatgtgatcatatccttcttacacttagatatttggtctttgaagttctgaacataaaggttctaaaacaaacatgttgctgcttgaataagtggacaggaacaattagctcttttaatgcatagaaatacccttgaacatgtgaaccttattgatgatatggaaattggttattcccttattgatgtacacattattgtaatatgatacacaatatcatattattgtacttggcgtgaaatacatcttatgtacgacatgaattgagttaaagctcaattgtttagatcatagaaaaatattttttctatcatgaaaatttaatagttattaaagataatagaattacaccgtagtgtttagcatgtgcatattactagtctcctttgacaactgcaggatatggcaccgacgaccatggagaaggttggagaggtgtcgggatcccggtcaagggcgtagcggcggcggcggcaacgacaacgacaacggcaacggcgacggcacagcccgaccaaccgggcaggggtagctcaatcggaagctatggcatcatcgcaacaaggcgagaggaaaattcctctggagagaggcacgagcgagccggtggaggcggcggcggcgacttcacttggtgcatggcatgcctcctcctccacggaggcctcgtctgtggtcagctctcccatgcgttggccctctgtcccagttatcaccaaaagaccgcgagacgaataaaaaaaactaatttcataactcgcctggaaaccgcaagacgaatcttttgagcctaattaatccgtcataagcacatgtgggatactgtagcactttatggctaatcatggcctaattaggctcaaaagattcatctcgcgatttacatgcaaactgtgcaattagtttttctttttatttatatttaatgcttcatatatgtgtccaaagattcgatgtgatgtttttgggaaaagtttttggggaactaaacatggccatagttttatcgtgtttttatttttggaacttgtctcaccgtgcacttttgtaacttgtctcactgtgcagaacgtcaattgaagcttgtaacacttgaccctcatgttcctcgctcgtgtatgggaaatcaaaatcttcttcctgttcgtgattcttcgaccaaaacaattctagaaggagctaaagttgttattagcctttcatcttatgttggtatgtaatacactgcctttattttgtgtatattctgttatttatttttgctaactaatcattgcttttattgcgtgtttattttatgatttatttttcctaaccaatcattgcatctacagatggcacattaatggcacggtcatctggttttttcatcaattgggatgaggagagtaaagtgtgcactgtccttacatctgcacgtctaatctgctcaaagtactcatcgatggaccagtggttaggttcagatgagtattcacctgatgctacggtgagttcacatacaaacttaactgtagtctctttgttagttgacatacaaagtaataatggtcttttgagcttaggtttttgccacacacaaataaatacatgtctagcacacacatagagcacaacactttaattagaaagtaaaggaaataatacacttttgttaaataatgtgatttattcttaaaataatgtaacacatgtcttttgcatttgtatttttaggtttacgctcacttgctagataaagatgagacaactgtaccagcagccttgctacattatgacaggcactttaacattgctctgtttaaggttgatgtagactcatgtgctaagattcctagtttcagcagtgaagtgacttgtggtcaggacatatttgcccttggtagagatgatgatttaaatttgactatcaatcatgggcgtgtccaatttaagggtccaagtatgtttgagcgccactactatatgtatactggtttcacgactggtcaggtataaatatcactacgattatcttataaattagtattaacttttgttgcttttggttctgatatcgataatttaaatattttagtctggcattggagggccaattattaacttcaatgggcaagttttggggatgactaatgttctaggaatgggatttattccttcatctgttatacttcattgcttggatatgtggaaaaagtttgggtaagtttcttttgctgcattatataatactaccttcgtcccaaaaagagtttaatttgtctatctcactcatactaataatatagaacaacctttaccttttcaaactcaaatgcatttcacacatactaataaatgataattatgtgtagttatatccctcgcttgcatattgggatgaaactttcagccatgaagtttctagatccaattcatgtggagaagatctctcgcaaatgtaatattgattcgggtctaatagttaaagaggtatatattgactgttgtttcttactttcttaaacaatccttacctcttttatcacatattgttggctgtacatgacaaattgcactataggtgtcctatggatcaaatgctgagaatagaggagttagagctggtgatatcattcaatccatgaattgaaagtgtattgcaacaacagtggaggtatttattattaacagtaatagcagtaaaggtgatttattattttgtgagtgaagtggatagaaaaattacactttatgatctcctcattaactcacacatttattactcttgttgctgctgtcagttggagattgaacttatgcaaatatgcgaggatcatcttgacaaaggaagaggcattggttccagcgtagacatacaagtaagtttactttatatctgctataaatgtcattatgttggtccatagttacaagacatttttagcgggcagaccactaagagaggcaaaaaatataattataagatagcatttatttactacatataaaagacaggagcttttgtgacttctattttttgttttgatgagtgtttagtgttgctatttttgaatctaagatgtccatatttccattatagatgaatgggaaatgaaatattatatcaatagcagatgaaaatatagttcagaagccagatagaatgtaaggcaagcggaatctactaactacagtaccaaaggctagtctagaagagatacctgaacaaaccggagagaagagatacctggacaccaaaagcacatccttttcgccacaattctctgtcttccaggcatatcgcatcctgtagctgtcccttgtaggcatatcattaggagcatgaagtacattagcagaaacatgttgactagcagtcttgtaggcatatcattgggagcatgaagtacattagcagagacatgttgactagcagtatcacatcccatcatactacatgccaacatgccttccgattattgtaggagttcttatttgctcaccctgttcagcagctctactttatggcaatacaatcatggagaattatgagattgaattgtctttccaaagcagcctctatttcctgccttccattttgcccaacacaactgcctagcccagtgacatgtctctcttaacctttgggtaagaatttctcaacccatgaggaaaaacttgtagctgatctgggaatagcatcagcatgaatgaacatagcaatttctcttcaaacaacaggtgtagcacattcaaataagaaatgttggacagtttcaggatgattacagttaaagtatttgggatcacccagccatttcttttcaatattttacctttgtttaacagcatacctttttgtaacaaccacaaaaatgtttgaactttgacaggtatttagctttccatacgtgtgtaaaagaactatcaccataatttctcatcatctatatgaatttcactaaaaaacctgccttcgttcccccaagatcctgtggtaacatgaggagcaacagacagactaacatgttgcgcttgtgacagtacatatctcatttatcttttgggaaacctgttaaccatctcctaaaactttgctgccattggtatagcactgactcactaatttatccttgtcacagatatcataaatagcagatattattgagcaaggtttatcaccaatctatttagcctctcattatctgctattatcaccattacaatttacaaatgatgactttcctgcctttcaaatgaatgttttgatgaaccttaagtaggtcagcgcaacaagatgagtcatctaccttcctctttttctagtttccaccaacatttattaaggacacttacattcattgcctcagatttttaataccaagaccccctttctttttttgagtgacaaaatattatcctgtttgacctgttgatactatctttgtccaccactttgccagacagtgttcaggaataaggacatggacatacagtaaagtagggatgttggataactggcattaatcaaagtggccctgtcatcaatttacagatctccctggtagatatcaagcctttttattatttttctcatctactttatcctagtcacatgtgttctagatgcactaacagatgcactccaggtatgattggaaagtttcctaatcaacaattgaacatgtttgcataagatcttccccccataacacctcacctttagctaaatttattttgaaacctgtactcatatatacaacagaatcaccattttctggaatctatatttttcccaagttatttttaagactgagaattgtccttggtatattgcaacattgctatgtcatcatcaaataatgaggaatcaacccattattttacatttcctgtaccatcttatctatacgatcagcactgctttgcacctttctaactctggacatgtgtgcctatctggtttgttatttggcactaagtgtcgcattacacatgccgtttcaaccacccctgcctatttgggctaaaacatcatttttccaaacactagattactagacagggaatgttcatttgctttcttcttttggtttcatgtagagtctcatgttggggcatggtctcatctgttttattcctgttaatagaggcattttaggtttgtcttatcaatttcatgtaactatgtaaggctctaatctcaatgtcaattacaagttcatacaaataatttagcagatgggtccgccttgttgcattcagctatttgctcaacatgaccaacttttggaagaagtctagaagggtaactatcccataatctaggccactaacatcaaatttattgtcgtaaaactctttggagcgtttttttttttgtttatttcttcttcactaaaaggcttacccaattcaacattgtgaatgtttgatagtctctgccctgctaaatatattgggatcaaattgcctgcgctagccttaacaatccttacagaagtcattagtcagtagcatttctatctgagtttctgccccagtaataatttctccccatttttagatttggtattgttttcctttctactaccattaactatcctacaaaaatactctgtgtagttatcgcctttcctcaacagccaagtcaaatgtgttctttttgatcagatttatagctaaaggtagccatattttgggacagagggagtagtgcttatttttgcagctaaaacctcaacccaatctttgaaagcattctttctttttcctcttatattcgtattttgtcaataatatcttaacctgattggtttgtgccaagttctattaattagtcttgaaaatcagggtgttggagccaatacagctcagatttgagtttgagtgagctgttataactgagatctgctgttcctttttttacatgcatgcttacaatcccataaagaacctgtcaatttacaatttcatttttctatttttatttttactctttacgctgtaatttagggggtattagaatttaaaaggccctgaatcctcttcctaactttctgcaactttaaaattagatttattttcctagagcactatttttgtgaactcacaggaataaacttctctgcaccagagctcgagtgttttaaaaaacttcaataacttgatgaaatctcaccagagttctctcttatctgctaacccatacatctagcttttctcatgcatgtatctctatctgatatagtttgaaaggaatttgaggaatgtttaggagtacgttccaaatttctcctccttatcagtctttcagctttatcttgtcctttgactgggaaggccccctggctctaggtcctcctaggttgcccaaacattgacttgttttttctttccttttgtattccacaaccttgtatacatcatttaaagctccagcatttacttcaggcttacctcaggcttcttaagatcacctttctatgttatgaccataccttcttcattcaacttcttgtcttgcatattgtctgcatatgggttcacatttttgcttgactcagcagttccaatcatcaccaacttcattcttttcatcatatatcttggtttgaatgtaatcaacaaaatcaaacaatttttttctacagtggcagaataatgtttatattttttatatctgatcaatcatacttgtttacttctagatgaagaggcttcattccttctttgagaaaggatccgtttagcatatcgcccatgccatcttgaccatatgaatcgttaggaatttgtccaactttcttggttttgtccctgttgtttgcttcatctatcacacacctttttgacctgatgatgcgcataactcttctgggcatttgtaatgaactttttcacaattgtggctaccagaattgttatgatcaacaagatatgtctcccactctgaccttagcaggagctgatttgaatttggtcagagtaggttttgggttatagcaagtcttttcaccacgtataaattttttaggctttcttctcttgttcgatatttttctcccttttaaccaccatctttatcatttgaattgtttcaatttacaggttggtatattccgcatgtgcaaaggttccacgtgcactataagtctgagattaaatatatcaaatgatgtagaggtgtttgcaagaggtatgcataaatcctttcaactactacaaagcttttatattatagtaaatgcatatggatatgggccttggttctgatactgttatatgattttttttatgtctggatatttacatgtgtatttccctctgttcgtttctatatgagggacataacttgacaatgacattatgctgtccaggcaaatacattttctctgcaagagattgtacctgggtgtttgatgatgtgggcacaggtatttttaactttgttttctctttagttgctaaatattaatttatgaaacaaagattgatacaataatctgctattcttcttttttgttgcacttttaggtctttaatttagatgatgaatttaggccctaatattgcaagatgtgcaaataacttcatttgataatgtattagtacattttatatattttgtgaagatgactatccctttaggaagtattaagttgagttgtcattcccatgtttctaaaaattttgacttttttgtttctggaatttctcttattggccagaatgatctttaatcttgtggggtagaaaaggcaggagagtacaacatttcactctcagccacatattccttatggctttctcaatctagctagttgattgttgcatttaactggaaaaaggaatcaatcttgtacatgatcatttgataaagaaattataaaacagtgcttgcttagtttaccaaaggacacttgatctagattgcttgttgtcattctcagccgtttgtaatttgcagatcttcaatcttgaaggaaagtgatgtgaccatggctaccacggatgcaaccattgctcacatcatggatgaacaagaagatatcaaggtcaaggcatccaagtgctggaatccgattcggccacctgctacactgctgatttcaaacggccgccaaatctccatacaagctccgttttcggcccgtgagtacttgatggaaagctctcggagtcctctttccaacggatccaacctcatcaccaaattccatcccagtcaaccgcagatgaagaaacaaggtgcaacatcacctgtcatgggcctttgggcttgtaacttcgtttgggaccccggcccaagtggggcccatgtgaggtgcgccccaaccaggtggagcacaaccctaggaccctcttggtcgttctcccacccttataagtagctaggtaccctttcagggtttctcgggttttgatagattaaagtttagccattgctacttacttgcagcgcgcgtgtcggctagaccgtccgtcttcttgttcttcagaaccccaacttattatttgtattaaattcctatttgcaatatcagattgcttttatgttgttcttacttgtttcttcgatttgcttgcaggaatagggttgatctgcaccggcaagatcaacaacccacggagaggtgtatcgatcgctaaggcgcaacacaacgtctcgtacagttgtagtcggatcgtcaacgtttctcccaaatcgtagttatcacaactcaccgaaagatcgagccaacaacagccttgagtgtcgagaggaactcagggttcatcagaaagcaacaaagtgatggagtcctcgtacgcaagactactgatagttcctaggtagtttatatatgtactacggagaccagggtactgctattacactggctgtggcctgggctagtggtttcagggctgttggtcgaagttaatttatgtaaactttgttttggctgacccatttgctgctgatatgggcactcgatgaaggtttcagaggctgttgcttaggtaattaaggtaagcttattttggatgaactggtagttgctgacatgaacagttgaacatttccgccgggcatgctttattgaattattgacggtcaaaatagctgttgctagtccgtttgtctttcccttggtcaaaatttgattgtccagatttgctgtattttttaaattgctggcaaagatgcttatattgataagtgtccatcttgtgggtggaattaaacatggtggtattacttagtataaacacgagttagcaaatactccctccatctcgatttgtatgatgccacaagccaatggagtgaacaatctaaaatgagtcaaaatgtatgatgccacatggagtgaacaatgttccaccatctttcccttctccttaaaccatggcctgatggcgtgatgcggagccgtttgcatttgcatgtcgctgccgtgattcctgaggccacctcgaaccgccttatgctcatggctcctcgccaccgtggtggcagtggttgacggcctcattggtatcatgtgatgtagccgccgtcctcgttgtacacgatagagttaagctggtgctatgtttgagagaggccatgctactgttgcacttgcatcgcttgtgccgccgtcgagaaaaaatcgtgcgcgttggcggcggctccccaatgttgtgttgggacttgggacagtgggcttttgaagggaaaaaaagtacgaggatcgtgacaattaggatagtttatactccctccgtcccacaatataagggattttcagtttttgcttgcaacgtttgaccactcgtcttattcaaattttttttgtaaatataaaaaataaaaagttgtgcttaaaatactgtagataataaaataagtcacaaataaaataattaataatttcaaaaatttttgaataagacgaatggtcaaatattacaagcaaaaactcaaaatcccttatattatgggacggagggagtacaattttgaatgtactccaattactatattaaaagttgaggaatcaagccaagcagaagtgtccatattgagtcatttgtccatttgcccaggcagcccagccaaggcaaaccaaccagctgccgctgctgtaaatactcctgcaacagtatttgttgcatcacgtacggataaatcaaacgtcttttttttttcatatctctctctgcttacccatgcgtactcatgccgttgtcttctcgcagttgcgctggtccaaccgtggaaacgaacacagtgaattcgaattcacggttcgttccgtcctcctccctggacgccaacccggtttgcgaccgcacctaccccaggaacaagtccgcgtacgtccgcacccgcccgctgcatgccacctatgtctgcgttattgcttctccgccaaatttaagtcttcctttacctaccttctccttgctccaatcgatctcgccggtatatatactgctccatctcgtcgctcgtctctcgcgttaacccctcgtggcctcagctcgtcgatcgatcgatctcttagtccgatctacttgcgcgcggctagctgctgctgctgctgcgtgttgggggtggtggtgcgaggagtgattggttggttgatagattgatcgatcgagcgatggccgtggcggtggaggagatcgtcaggagggccggcgggtgcgccgtgatcgacggcggattcgccacgcagctggaggcgctcggcgccgacatcaacgacccgctctggagcgccgcctgcctcatcaccaagccgcacctcatcaaggaggtaactaatcttcttttcttctctccccgtagttcaccgaccgggccgtcgcgcgtgtgcctgcatgcgtagtgctcgtcagctcatgccacgcttgcgccacatgctgcatgatgcatcttgctgtctcgtcgttgtcatggcgccatggattgctcacgttgttgcaccgccgcgatggaatgtgtatgtgccagctgagctgcgtctctgtttgttgttcggttgaccatgtgaaaagctatatattagctgttgccgtgttggtgttgcgttagagatcgatgcgattattccacaggtgtatgtgtgttcttcgtccctttggtcttggaatacaacgttcggttggtaactgtgttatcagtcaactctcgtttccttttcctccacaaaaaaaaaaagtaaacaaatcttaagatgtgatacaaactgtaagtcttgctgtcttggtcttgacctggacaagaacactgtaccttttccctttctcacctatggacctactaccgaccaaccaagttttttttcagatgtgtctagattgctttttggaaaaaaaaaagaaacaataaaagattacctactctgttgagtgcgagaggaaaaggtaggtaagcacctctgaattctctgaatgtcgaacattctcagagcattcagtttcatccatccttttccctgaagtaatgccatcgtttgactcaatttaatccattgtcaggatgactattctagtgtgtactgtgtacacttgaattgtgtttgttgcaccaacttctgataggcaggaccattcaattgtgtcaaatttacttcggacgtgaatatcacgattcttttcgaaagatcaaatgtcacaattgtttcaacttctttatgcaggttcacatgcaatatcttgaagcaggtgccgatgtcatcatttcctcatcataccaggtatcatcggtctggcgatcttcattccccagctgacataaagagtaatctttcagtttcagcatcagagaaattgatgccttcctttcttgtatctctctgaaggcaactatcccaggattcttagccagaggaatgcttcttgaggaggcagaagggttactgcgaaggagcattgaattggcactggaagcacgagatgaattctggaagtcgacgctgaggaagtccaagcctgtttacaaccgtgctctggtcgccgcatccattgggagctatggagcttaccttgccgatggctcagagtacaggtaacttctaagattcagcactgcaaagccatggattagccatggatcggcacgcattgtaaccttaacctcgtatataatattttgcttgtgtcattgatgcaacattgtatctgacagtggatcgtatggagaagacatcacggcagagaaactgaaggacttccacaggcgccggctgcaggttcttgcgagcgctggccctgacttgatcgcgtttgaggccatcccgaacaaaatggaggcacaggtgaggctagtgaatctgaatctctgaaagaaaaacacagattgtgcaatgtgttccagacattcaatagcactgaaatgctgccacctttgatgtttcttgctgaaattggtgatcatgcatgcaggctttagttgagcttctggaggaagagaacatccaggtcccctcctggatctgcttcagctcagtggacggcaagaacctgtgctcaggagagagctttgcagagtgcctccaattcctcaacgccagcgacaaggtgaccatcgtgggtgtcaactgcacgccgcctcagttcatcgagggcatcatacgcgagctcaagaaggtttgcaccaacttccttcagcaccatcgactccatcttgcacacaccccaacattttctttctgcaccggttctgcaatcgtctgaaactctgaatgtgtttctgacagcaaaccaagaaggcgatcgcggtgtacccgaacagcggcgagatttgggacggcagagcgaagagatggctggtgagcacgacctgttacacttaatctgttctcatcactggcacgccaagaaagattagcacagatctgttctcatcactggcacgccaagaaagattagcacatttccgtgcgaattcttggtcgtcttgatcatcaaactgactggtttttttgatgcgtcgcatgcacagccggcacagtgctttgggcacaagagcttcgacgcgctcgcgaagaggtggcaggaggccggcgcgagcttagtcggcggatgctgccggacgacgccgtcgacgatccgggccgtctccaaggtcctcaagggcaagacgtcctattcagcaactcagatttgagaccgactacttggtagtgcaacttttaattaatagcgagaattataccgattcagtattagtttatgctaaattttgcagcggaaattaccgtctaacgatttgtaatgctgatgtgcaaccatcgaattttatacgagcattagcatggagagtgttgcagaggcctggggatgtgatttatcttctttatccttgtaatataaggaaagtagcagccatgtatcgaatttatgagttatctatatatccaaattgcactgataatgcaaaagaacaagttgcgtgtcctattgtttttgtgaatagttgttgtattggcaatacttaattccaaaatccagaacatctacagtctagagagaagacatgtagtatgaaactacaatatgccaacaatttcaatacctaatgcggaccatgaaccaagtcagcctagtgctagtagatgcgctctgacttgccaactttccaagtgaacagaacctgaattgatgacaccttcaaaatgactgctttatctgatgttagatctgcagtgatccggccaacaatcaagcatttggatgactcaactggtgaatccatatatgaatacccaccatttgccagatgatctaatgtttatcaacagctagcaaaaaaaaatgctagttcacctgtctatccatccacaacacttattacagtgttaccccaccatgatttcctacgtacaggtgcagataggctacacatggcacccctgtgttcattctttgtaagccttctgaattataatgatgactacaacaactctacaagcccacatgaagaaggggggtggcattagccattttactgctaaaggttataactttgcaggattaccaagcgcatatacaagacaggggataactcagagaggatcctcctgtttgatttcggtgtcatcttctattttcccaactttagttggaaagtgagataggaccaaatgcccctcggaatacccattcatcaggagctttcctatctttgtcttccaatctgtgccagatctctcgttccacctgtcatgaactacccggtcacggtaattgagcattgtgccaagcccagaatttggtacccaaccatattcttccaaaacccgcgcctctccttccgtcaaatcttcaccaatctgtaaaaaatagattagttcaatgtcctacaaactccttttactcatgaaagaactcatgagtaaaaggtactgaggtagcacaaaattataaactcctttcactacggaaggtacatatgagattggaccgttgaagctaatgtcctatgtgaacatatatctggtgctaaaattttctaaaacgagaaatatattcttcggaggtatattatgaacgatatcacaaacttagttacatcagaaagaaatatagaaaaagagtcgagtgcatgaatgtatgattgtatccagcttcaaaactagtaactgcgtattctgatagaggatcctagaaacaattgtcaactggaaaagaaactaagaaaggctataacacagtttattaatggttaatgggtagttgtgtacttgtgttcataagcaaggatagaagacattatgaaaagctatgctggtaacaggtaaactgaccagttactgtaatgtttcaagtctattccagtttaccttttaaaaaaaaaatcttacaatatatttttcctcaaatgtaaccttttacaatcaccagcttcaagattacatacaacacatcaaacttcgtataattttacccttgtactggctttatcatatctattggtcacagacgatataccagtaaccagcatcaatagagctgattttttttcctcctctgatcataagtcgataatagggccttttactttgaccacatttctacgtacgttgacagtcaaaaagtgcagcacaacactgggaaaatgcaggggaaaaaaataccaaagcaagaaatcttaccaataatggcctattttcaatcagagctgtcctgccacaaccactaagcttcattgcagtaaccatcctttggatctgccattgtattggcagtgatttcacaatctcaaagaagtatgtcgcatacccatattccggtcgctcaagaacaatcctgtgaaacaaaaaaaggaaggcataaaggaaagaagcatatcaaccattttaaccggcagtacctgaataatagtattggctaagaaagattacctgttatggcttttaaaaataaaaataaatgattgcaggtctctacaccatccccattcaacaggacaatcacgaaactgaagatagcgggactacaagagataaaggtgtataaaacactaaaattgaaagcctcgtacaagtgagaaaataaaaatagcaaatgttgtctagatgtggataaatacctgctcgatgagagaaattaaacaggtcaagcagtatatagccttttcccccttctcatgcctaagtgcagatttcaacagggatgttctttgcggaaacaactgtgtattgaacaaataaaacatgtcagtaaactataacatacataaccaccccatgccatttgctcttcacaattagcccataatactaaagatgcagatgtagtccctcaaccttggggaaattaggccaataacctctaagtcatctgtatttacagacataacacaattcacactgaacttcctggtgacatgaccaacaaatgaaatcatgtaaaccaaatcatagctgctgtattgctgggggggagggtgattatatttttcagttgggaaggggaaggaaaacgcaaggtaactaacaaacatgcaaatgtttcctcttctgttgttgctgagtatggaaaattcaacattctaactactcggagagttaggaacagtaacaaggagaagcaagaacgagtccactaatacaacatggtcccagtggcagtggaatgcttctgaaaagatgatacattatccttttccttttcttcggcgttgcttgtcacatatgaagctggagcacttaaggtgtctttgtgaaagttttgcagtggtgttcgctacatcatgacaatggggaaccacccgtaggggtttactgcacaaggatcacaagggccctgcagaggaaaggcttgacccaggctagtagaataacctctacccgctaaaaatagcgggagtggtatgataccatccgaaaaaggtaagcaagtgaggcatatcagatgttatgcagattctcaacaaaccattttcaacatgtcaagtggtggggttgttgagatatttcaatgatatactgtacaatgtattttctttctcaaagacaaaaatacccattcttataagactaagtaccattttaaaatcttacttttgtaataacattttcaagatcttgaaagtcactttctgtgcagtctgggaccatatcatcttcttcttcaacaccgtagagtttaatctctttaaccagtattcctttgtccagaagaatctgcaggcacgaaagatacggaaacacagaatcagaagttggaatgaatgcttactgaataccgttattgaattaaaatagaactatgaacacgacaaatgggtacctgcagtagtcctggggcatcttcttcaagtgccgtttcaattgaatccctgcgtacatcacgtttgttatcagattctcaaaaatagttgtcaacattgacagaagttactcatgtagcatacgttgctgtttttctccttcgcctttgacgagaaaagtaagcagtaccctcatcatttctgagggaatcttcttcaagcgtcttttcacttggatccctgcatacatgatttttataagcataatctagccaaaaagagaatcagtgtgaacattaaaaatgttgcctgtgcagcatacctcagagtcttcctccttttcctttttcgagaacagtaagcaaggaccccgtcatggtttagagtattggtttttttggcagtgagctctgcgatactgatagaagtgagaccacacacaactagaggtaactcactcccggtaacttcgctttttattcgtgatgatggcagtaggccttcaacatgagaattctctgggttagatcttgctgcttctgatattcttttggagatcgctgaagaaacagagtttatagacccaactagattagagccctcagtgccatgatttggatctgttctctgtacagaagatgtaattttctctgtgaaatcccctgtgacatgcaagagttcaaaatcaatattgatgtcttttgggttttgacaaacatatgctggtgctaaatcaatcttccagaccactgttgtttaaggaatagtggtgagattttgctcaaacaaaattcagatggtaaatatcataaccttccaatgcaggttccaattttatgtcaaccaaaagggtcctatcatctgtcccttccaactgaatgtttttatccccaaaagttggtgttgaacttgaagaagggtcgcgactataaataagagtcttgccgtttaccaatagatcatgagagcacacaacttgacattgtggtggagcagcagaagatgatgtactcaagaaacctgattcacctgcagtaagttgtttatcatcacttgtttcagagtatagtaatcaatgctttcttcaccattgacatgtggaagtaaggactcgaattaaaaaagaaaaggagaagagatttacatccagcctcatgactttgctggttgtttgaaagaccttcagttagcaacctcctgttgttatcattgtcgatactacctataatggccggtgcagaagaaatttcctgcatataattgcaaacaattgaacagacccgtttctcgtttccctccctcccacagacaatgtgcaaccttgaatcactaaattcagttggcacaatgaaaaataaatttatatgttcttgatagaaaagctattgttatgcgcatgcttattgaccaagaatggaagttgtgataagtcctaatgaggcatcagggataacaaaggacatttcaaacatgatattagaacataaatttaatgcataaccaaaacagttgagaaagtgtgcttgtacctgcaacatgctatacataccatccctgaaggcagtcccttcatgaattctacatgcaaaattacaatatgaacttcatatcagtacaaaccttatatagagcatctttcttgaattacacttgtcaatgttcacatcaattcccaaaataattggagatatgttactttttttttctcttgcgaatgcaatcaactttgactttaaagttttactatagagcatccttctctatatctccatatttaggtaggattattaagaacttagtacacaggaaagtggatgtaccataaggacgggtgtacagggatttttttttctcagaaattatagctacctacattaaatgtatacattttctcaccccctcaccttttaggaatcatcccattagttccaggcttgcatgaattctccaaaccatcaattgcacattgttcagaagatactacagcagaggaagaatgattttctgccataagaattctgtagcgctcttgcagagacatatgatcaagctcctcgatttcatcatgatcattaatttggttcccaatatgcatgttgcttaccacattgaaataacttagtttgtccagattaggacatgtccctgtttgcgtctgcttttgcttgttttcattgcctgaagagaattcagtgtcatggtctatgttacaaaaaatgcatttaaaataaatggatgtgaatgaggacacgaaccttgaacagaactattttcagtaatcatattaaaagaatgattgtccaactgtaattcctctttggaatcatcatcgattgcagaagcaccctgcatagaatttcagaaacaaacatctagcatgtgttacttaaaattaattgttataaagccccaggaaattgagtgcctgttaacttcagaaagttagcagaaatcaactacaatgaatgaaaactttacaatgagtacaagactagacttaaaaattaagcaataaataagataaagaaatgcaaaacagctacagccgaatatattcaactaaggaaacaagaaacagattgataccaaagaacaggtaaatgacgcaaaactaaaagaatccttgtgatcaagcataccagaatcacagtacctactctgagtagagtcaaggtaacattaattgcaaaagcagtttttacttaactagtaggatagcatccatgttcaagtaaactaaatgtgaattagtatgaaaatcctgcaaaagaactgaacagtgttcattggccaatggatcaaacaaaagtcaatttttaaaatcatgacagagcctctcgcaatttggttccaacacgtttaatataacaaattgctaatactaatccaacaaatgtagcttaaatatttgccttgcagtgtttttttacaatgatcagttaacttactttcagaattatttttaaaacaaaaaaaaagagtcaagggtgacagggttatctcataccatattaaactacaagaaaaatacaaggataagtaatacacctgtgctgactgagcgtgagatttctcagcccatttaaattgatttttttctaactcgtagaatatctttgacaccacc

SEQ ID NO: 10208 - DNA, 39594 bp, Oryza sativa
ccccccccccccccccccacacacacacacacacaccctcatttcctcggcccaaccaacacccacccccggtccgtcgccagccaaacgcatttaacgcctcccaaccgcgccacgcgcgcctgcgggtgcccgaccacccaatccccgctgcttctccccgcgtccaacgccacgcgacgcgcgacgccaagttgccacgacccagcgaggtgaggagtgcgcgggggagcaaaacccagcgcagccgcgctgcggccaccggcaacgccgcgccgcgaccacgcaaccggggaaaaaagcccatcttgtcaccttcctcggccattaactgcgatccctccagctagccaccacagcttagctcgcgccagcctcgcgtccacacgcccacccacccacccacccggcgctgagctgcgcctcgtccgcatttactagcatccgatcggtctgatgcccgtgtgaggtcgtgaccgtgatgacccagccacgcaacgcacgcagccgtcgagtacctggatcgaacggccggctttcatcctcaccggggagtcgaccgtcgccataaatgtaaaagcgattaacgtcctccacaccggagcatgattgatgttttgaggcggaacggaaactgaggaagaaagccgtcttctctattcaaggaagagcctgtcccggaaaacatgtcggcacggcgactgcatttatttacgtgttacagccgtataaacagagggatattggaaattcgacaaagggtaagaaagggataatcagacaattttggattattgtacatctaggggcaagggcatgtttggctttcagctcctccgaagtgaagcgggctagaccgcttaagcgctcccaccgagactgtattgggtttagtattgggtttaggctactccacaattttatttcaaacctaactattagagttaaatttaaaagttggagttattctcagctagtcctctaattgtcaaccatagcagatcgggcatgtaagtaaacccacgtcgttgtcagaatttataacagaaatggaattctagcttaagagaggaataaaacgtgagctaatgagcacaactcacttcaaccagtaattagatggatcatgtctgaccggttgcatgaagtgcgagtcgattttaatctagtaagatgaactcaacttcagttagtaattagatggatcatgagttcggttcgagctaaaactcccaacgacggatcatgagtagctcgtgccctctccttcagatttttttgtacaatctcctaacatattccatttcttatcaccaaaagttttaagaccggaaccactgatttttcaggaacaaagaaggactgaaatatctcagtataatactacctctgtcctaaaataagtgtagccatggatatccgtacccaatatttgaccgtccgttttatttgaaaaatttatgaaaaaattgaaaatatttagtcacacgtaaagtactattcatgttttatcatctaatagcaataaaattactaatcataaaaattttcaaataagacgaacggtcaaacgttgaacgtgaataatgcaaaactgcatttattttgagacggagggagtacgcagttgtaatcaggtagtcatctcagtaataaattacgcatgtctgtatttggaagagtaatgtagtaatactgtactagggttttcgcaaatcaaaagagattaattggtgtgcagtgtaggcctaccagtctaccagagactatgcgtgtatccctttcgccagtaacgatacggattgcaactggagcctatgagattcgatcacgcccctcaattccccaatccctctccctcttcatggatcctgacacgaacaatcgaacaaccacggccacgctaaattggaaaattaaaaaaatatataataattaatctcctgtgaatgatcattccttatgtgacacatcagacaaagtatatcgatttaatccgtgtttatagcgaaaaaaataaaaataaaaggaagacaagaaaaaaaattaagaagcgagggaggggaaaggaggaaagaagaaaacaccacaaattaagaagctccaaagtttgaggacgcacgcttcgcgggtgacgtacaggtgtaggggaggtaatgcggcggcggcgcgacggccgccggcgagggcgaggctgaggctaccatggattcgatcacagcttgacgacctccgggatgtcgacggggtagcggtggatgcagtcgtcccacggcccgtcggcgggcgtcttgactgtgcggaggcacttccagacggcgctgttgcacttgaatccgctgccgaagccgatctgccagacgcggtcgccgcggcgcatgcgccccttggcctcgatgtaggcgagctcgtaccagagcgagctgctcgacgtgttgccgaaccggtgcagcgtcatgcgggacgcctccacgtgctgcgcggacaggtccaggttcttctgcagctcgtcgatcacggcgcgtcccccggcgtggatgcagaagtgctcgaacgccagcttgaagtccgggatgtacggcttccacttcttgttgatgagcttgcggccgacgaggcggaagaagaagagcagctgctccgacatgggcagcaccagcgggccgatggtggtgatgttcgacttgagcgcgtcgccggcgatggccatcagctccttggacagcgagatccccgagtgcccctgctcgtcctcctcctcgtacacgcaccggtacgcgcggtcgtcggcgcccttgtgcgtgcggaccacgtgcatcagcctgtacttggccctcctcgcctccctcctcctgttcgacagcaggatcgccgccgcgcccatccggaacaggcagttgggcagcatcatgtcccgccgggttccccagtagaagtttggtgtgatgatctccgtcgacaccaccagcgcgttcgagttgggatgcacctgcgcgtgtccgtccatgtcgctcgttaatggctcacctgattagttagttagctaaacagtagtaacatcaaagagctggctagtacttacctggagcatgtcgcgggcgaggtcgagggagatgaggccggcgctgcagcccatgccggacaggttgaagctgcggatgttgctgcggagcttgtacttgttgatgatcatggcggagagcgacggtgtcggggagaagagactgcagttgacgacgaggatgtcgatgtccttgggcttgagtccggtgcggcggacgaggtcgtcgatggcggagaagattacgagctgggcctcggcgcgcgacgcctccatggacgggttaggcgggatgtagtggttggccggcgggaggcaggtctcctccccgagccccgaccgctcgaggatcctggtctggaaccgcacgctcttctcgtcgtcggtgatgaggcgcgtgtgctccatgaacgtggcgaacggcacccggcagctgggcggcggcttgtagcaggagtagtcgacgaggtacaccggccttggccgcgacatgaagtacaccgtgccgacgaacacgacgaggaacaccgagcagaggatgtggacgaggtcgagctgcagcgaccgccacagcgacagcagctcaccgggccccatccgcgccagctccagcgccgtcgccgccatcaccggcaccagcagcagcgtcaggaagtggttcaccagatactggtaccccagcttcacgtacttcagcttcaccgacccggagtaccccgccgcccccggcatgatcgatgctctcactacttccccgcgcgccgccgcgcaccgcaccaacgctcgcacgccgcgtcctacgtacgactttagtttcttcttttttttgagcggtgcagcgtgcacaatttgtaggtgcgatgcggtgcggaggcggatgggtttgcagtggtgtgttggtgatggtgtgtccggtgcccggttggggggtctaatataggggacgcgcgcacggtggcggagacgagacgagatgacgaggagtaattgataaatctggggcggatggggtagtttaaagaggccggtctaccgccaccaaccggaagcgttgggctgctcttattagatttctgcatcatgggggggacacaaggttttctcccttgttttttgtttatacaagtgcaactcgtagtgacggttaacggcttaaccccggtgtcaatttggatatgtcatatgagtatatgattgctaaggagtatcatactcctcctatagctcctggactctggagaggaccatttttcagtgacaaccttgttctgcgggcattatcggaggaaaataatagagttcgtaattaagtggagtaatacacaagcaatgtgcacaggtactgtactgctcgcatctggatccaggtgagtacgttcagagtttagtcatgcatgatacactgaacataattctcttatgttgctagtagctgctgtctgtcccatctaaatttgcatctgatttttgagcaccgaatgatgtaacaagccaataacaataagtagtactattatcagtagttaatcaccaagtgtccaaatcataaccgagttagttcaactgttaagacccttgaggtcttgacccgtcgaaaaaactcttgctactctattcgtcaacacctgatttgagtccaaatcaggtcctctcctatcgccgagtgaacttatctctgaagataggtttcaaaaacttatctctgaagattggtcctgttttcttttttactcacttccttttgagatgtatgcaatggtagatcagatgagagggtaactttccctgcggaagtacggcaatacagataatggctgggactgaattgggctcccttgcatctgcaccgtatagggttgtgtgtttcgcaatggcatcaggttcaggactgcatgtgcaaattactctgttggtaccctctgcttgtacaatttaaagcactgttgttgcaggttgggtacccatcattaaactacgagatgaacactcatgtccaagtcttgcaaattcacatgtaatcttgtaagaactgaacagttttacttcgaaatagtactctttaaatgttgactctgattcgatcggatcgacttcgtcagtgtgcattacaagctctgtttggacaaattctgaccctgttaagcagctctagctggatactacttctatactagtacttttttttttgaaagatcaatagtagatggtactcctattaggctattaccattactctttggatggccacatctaagtgcctgatctggtaatgctatactcctagtatccttgaatcctgataagggtagtacagtacggagtatactcgtatttttgttacgagactccacttcataaattcatatactacagtagtaatagctcagacaagttcaggcagagcagtgatagctgatgacagaatactccctccgttccataaaaacgaatctagaaccggatataacatattttagtatgatgtatatccagattcatagtattaggatgtgtcacatccgatagtaggttggttttttatagaacggaggagggagtagctatataggtgcagacagcttctgagcttgtaagaaagagttaattgcgtatgcagtgatctgcgtagcaatagtgcaactgtacaattggtgaaaatctccctaaaaaatggctaaatatatggcctcctattgtcccggagccaatgacagtgtggtcctttggctgcagccctggcagcagcattaacgtagtagtgagtgtccagtgcgcagtgatccaatcaaaattcgagacaggatcctccgggaagcatcaagcatcttcgcgtacgagtcgtgagacgatctgtccatgcctctgaagaaacggaaaaccacggattgttcttcttcccctcgcgctgatacgagtgaaagtgcagccgaagcagctgtcgtagtggccgcgtgaaatgctgaagttgacgggtctgaatatgtgatcggtctggaggacgaatggacgatgggccgacatgggatggagttgggggttgggagaaagcgtggcgaaacgcgctgtgtttgctcgtcatcgatcgaccagaggaagggcagagactcacattaataaagcttagctgcaaccatacatccgccgcaggtgtgcaagggcaatcctgttcggttcacgtctctcttgcccttgtttcgcacgagcgaattccgtctcttcgttttggacctgtccctcatgtactacgacgaacggcacttaggggatcgacatcttcgtgggacaggattgtaaacttacaagtattattctacctgttcccttcatactacacattaaatgtgatcatctgcttatttaaaattgatcatgacctgtccatcgcgccaaactgccaatctgtattaggtttgacagaggccattacctgcaaagaaaaacgcttgcctaagttaatgctctaactgtacgtgagtacatcctgcctagcgagtggttctgattgctgggtcctttactcctgaaaagtcagtttaactataatcagttgcagagataatcttttttattttcataaacaagtattttctctgtttatgtttttatcaataaaatcgaacctctcagactcaattctttgaagctcggaggaaactacggatcggacgtccgattcctctaaaaaatcggagggtcaaatattgtagttgaccaacaagtgaaacattaagttatgtatggtgaaataaaaaaaatcagcaactgaaatatttaaaaattttatgaaacatggtgatgatacttgttgaaacatgttactattatgtattaaacaacgagtgttaacggattgaaacatatgtttttctttcgtcaaaatatagtcatgcgatatcttgttataaagatttaattacaacgaatacaactgtgtgatcggatcgtagattggataagtagtttaagaaaaaatttattttgaagattattaaaatgcatatatgcatggatagaagggagagagagaggagagagagagagtagtggcaggtggtttcgtgaattttatgaaacacattgaatatatacattgaaacatatcaatatcacgtatgaaacattcagctttaacggtttgaaacacatgattttattttattagaatataattatatgatatcttcatgtaaagatttaattacaactaataaaatagtatgatcggatcgtagattggataagtagtttaggagaaaaacaatatttaaaaagagaaaaaaaagaaaaagaaactagcttgtagcgagaatgctcgccccgggtgaccggcggggggtggagcagatcgggcgctccccattttcgatgtacttagtgaaacaattccgatatacttggtggaacatcgtgcaatatttaaaaataattcaataataagctaaaaaaattttgtccgaatatatccatgtgtggccttgttttgaagatttaattgcaacgaatttaatggtacaatcagataatgatttggataaataatttaagagaaaaattagtttaaagcgggtttgcacgcatgcgtggcactgacgtcgtgctgacatcagcgcctgatttttgcacgcattgatcgggatcgacgcccgatcggtagttccctccagtttacagtatacttgcatgcatgaatcgggcaccctattgtgagcattctcctcgaaggttacgtctcaaacatttctatttcactacatgatatttttatgttaggatgtatgtcgcatatcgaattttgagcagtgtctttaattaatatgtaaacttattgagacggcagccgtgtcaagtacgatacatacccttctaataggtcctacaagagctcaaaaacattacaagcttttagtgtccatgtttgacttatgggtaaaatgcccatacttatttgaatatacaaatgttattgtatgttattaatttgatggattcaaacaaatatatattagacttagactattgcataatatcaatgactaatttgtaaatcttgtaaaagtattgatgatggactaacagcagaaccaccaccaccaccactatcgttttttttcagtagtatagattgatgctcaaagcatctatacacttcgagtgccatcacaaagcccatatttgtttgcacttttagcacattatacatacgtacagcgtttctctaaaaaaaattccacgttttgctatcgatggacgatctgttctccaaaatatcatcaacatgaatcctacaaaataccatgttacaagcatttttcattttttttatcaccattaggtttatatctatagaccttcattagttatttaaacagaggccatttttccctaaaaagaccttcgatacacccatttctacagttttttttggggggacatttctatataatttgcatgtgagaatatgcaaacaattttgctattaaattatttatgagatttaagggtagtttgggtatttagcatgatgacaatcaaattatagggacaaaatggtcttcttgaagacgtgatggaggtttatgaatgaagacttaacggcggtgggaaaaaaaagagagaaattgcttacattatggcatgttgtagatgtccagtttgtcgatatcaattcatagaaccagttgcttatcaagtaaaatgtagaatttctcaagaatatataagttgcatgctcgttatactatttttttcagcgttttggctgggctgaacactaatgcaaaacgagtcagatcatttgctcatgattaattaagaactaactattataattaataaacaaatttgtttgactatttttttaaaaaaacttttatataaaaaggttttagacgaaacacgctatccagtagtttagaaaacacactcataataaacgagaaaatagcccataacgcacccttatttgcactttccaccatgtcaattgcatcatggcttcactttataccagtgtgggcatatcaatttcagtttactatactacagtacatcatacaccagtgagtaggagtatgtcataaggcttcactttctccagattacgtcctgaaatctgagtcataaaagacgagaataactcatgagactccttgaatttcattcacgtactgtacgttttaggaggtccatgacatgtactattacaaagataaagttgagaagtgaataatgaacagggcaagaaacggaaagttgactatgacgttacgcattaacttgatgcttatcatatatcctatatatctataaaatttatcgccactaaatatagttaatgctaattttcttttctctcatgaagccatatcactttaattgtttttagtctttggatgattaatcaagggtgtaaagtacatctcttcacatcaccttaactatttttagcctttggatgatttatcaagggtgtaaattgcatctcttccctctaaaagacaccatatatacaatccaatcatttataacatttagataatttataaaggtatgcatgaaaaaaatattatagtagataagaaagaaaattttagaactcatatcttctatattatcacacaattctaccgcagcaaccatctactcctagcatatataagacagaggccgtgtttagttcaccccgaactaacctaaacttccaactttctatcacatcacatcacatccaaaacttttctacacacataaacttctaactttttttccaaacttctaactttcctcaaacttccaacttttgtcactccacataacctaaaagaaacaaatgcgtagctctgctgaacagacaacctcactcgtcacaagtttgtgcaccttttggttttgcatacaaattaagcaacaaaagcaatccagtttgcagaaaaatatagtaatatttttaatacaaaataaatatattattaaaatatattcaatgtcatatttaattaaaccaatttggtgttgtagattttgttaaatttatttataaacttaataaaacataaataagtttggttagaaagaaaaatcaaaacaacttataatataaaaatataaaacgaagggagtattaacctattatatgtgcaagttggatcgcagttgggcgttggtaaggttggttgtttcctgccgtcgttgcaaggacggtaaggtggtctgaactctgaacttcgacatcacccagaatcttcagtttcgcggtgcatatcacaatcgtacatgacatcgagagatacacggattcacgaaaggccaaatcttacatctagttttggtggacatcaggagtgcatgatttattaacttttttcagacagtcgatcccaactcccaaccgaccgccgtgagcccgtgagaaatgaacatttggagttgccatcctccattgtgtgcaagaaaaaacgatcgattccaaccatgatagccactgacgctgatgtgaacgacacagcctttgggactagaatcttgacgtatagacgactaaagaacgtactccatgttagtttattataagcttaatcttttcgatcggaaagaataagcaaccagtctatgaataatgatatcaattcaagctcatcatctcgttgcagatttccggagttagagccagccgctcacccaaccgtttccctaatccgtcattaagatttcaataatcacgtgttggtgagccgaaccagattagctcccgtacgccatcaggaaaatcaatctaccgccgtgtacagcgccagtaatgtgtcacgccgtacgtacaacgagattataagaatgtaacgcatcgtgagcgtgaaaacgatcagctcgcttacgcttcgcctgcatttcctgcagtttcggtaacatgcgtatatggaggcccatttagggtctctgtttcttctcaagttaataaaaaaaaacagcccacaggctacagaattggtgtatagtagataaaaagacacaaaaatgaatgacaggataactactatactcagggtgtgtttgaggagattgggaagatacgcaaaacgaggtgattaattgagtattaactattttaaatttcaaaaatggattaatatgattttttaaagcaactttcatatagaaaatttttgcaaaaaacatcccatttagtagtttggaaagcgtacgcgcggaaaacgatgtgcattcttactccctatcacccaaacaaacacagccttagaacacatataccaatatatggattaggattactggtgatttgggaacaaccaactagcagtcatcttaaaaaaaaaaagagaagtcagaagatagctacagtgaattcattagtgtccagagagtgcttgtttgacaagcaagtcaaaagtgtcaaacattgataacatcaggacggttggcatgcgatcgtgcaggtttaaatgcagtcaacaaagaagtcagaaacgactcattgtacgtgtacgagtacggtcgctgttttgctttccgtgatgcggttggacgttaaggtctcatcactagcgcgatgtcccacagcgatccagccagcttcatatggttgcatatacagaaatactactactttgcattatcaactatgctccattcagcttcgtgttcagatactctctcgatacttgcgtgaagagagatcagatatggacaacgaagacgtgcaacgtgtgctttcaaaaaaaaaaaaaaaagacgtgcaacgtgttacatgaacagtacggcaaatgcgatcgaggatgttactcgagttattacggcatggccaatcaaagttgacagttaaagtccaccctcagcgaacaggtgattgatcgattagtactcctaacgctgctgtacttctcgaataaacattgggttattcaaaattgttggagtagttataactggaggagtcatacaattattataggactgtgacctcgatcaggatggtttctaactctgttcctatcaggtagccttcaactccaacacaatctacactctgattgtatttacaccctgtatatgtactacttcctccgtactcgtcgttttggtcgggactcgggagtaaaatggagtttaaccgttattattttctactaagcaacttcaaagtgaataggtttaagtgtatgtaagatattggtaaaatattttgtcgacgtttgatgtcgcgattccggtatttgaatagtatggggattgtcggagaatgaactcctccaccagggaaccgtgaggcccccctttgtgagttcggccgggggcagcgggtgagattcgaggatttggtgagcgaaactgtgtggtcttgagggggttaggcccctccaagacgatcagaccaaagaggtttatacaggttcgggccgctatgaagcgtaatatcctactcctgtgcatgattgattgaatgtagaacaccagtgcttggggttgcgagacccaagcgccagttcgctccgaagtccctcccctccaccactaggcctagacctccttttatacctcaaggggttaccacatgggcccaacaacctaacctaactccggtggagaagtattataatctttgcattaaatgcatgtcttgtttcttgacttgggaagccaagcacacgtcgtcttgatgatggggcctgtcaaatcttgccgcctgacacggggggtgcccctgtcaatcaccatttaatgggtgaaaacttctgggctccttttacaccgggaaacgggagccttgctttgaccagagcgggaggaccgactccggctgggataagaggatgagaacctctcaccatcactatttgatgggacatgtcaggctgcacaccgcctgacacacgagcagcgcacaggcgcactagccagtctcatcggtcattcgaccggtcacagaccggttgagtgcactgcacgccacattaaatgcggcgtagcgcgaccgcttgggacgccataaatacgggtaggcggacacctaacccaccgtacgtggtgacctagagatggggtcgggggagcccgacccctagtcacgggagggggcggccgccgcccgacctcgggcctgatcccccctcggggggggggggagccacgtggcgcctggggcggccttctccctctagtctcggccagggagtggccgccgccctacctcgggcctgacccccctctggggagggccacatagcattggagggcagcgtcctccatccaatttctgggaaggagtggccgccgtcctacttcgggcctgactcccctcgggggagggccacgtggcatcagggggcagcctcctccgactagtctttggggaaggagtggccgccaccctacctcgggcctgactcccctcgggggagggccacgtggcatcggggggcagcctcctccctctaaacctgatacccccaggcctatatcaccgacaaggatcgttggtactaggatatatgcgagattgaggtaaaagagacggagacgatgatttttatacaggttcgggcccctgaattatcaggtaataaccctacatcctattggccggagccggtgttgctctttattcactataatcacaccagtacaatatttagggtagcctatctaactattgtagacttggcggtctgaaattctaactcgtatcgacaacagggtagtcttcctcctcgaatccgtgcccggcgagatcagagatagcgctttcgtctctcctgacagtatccggagacaccgtaggggactagccgtgcttatccctgaagccgctttcgtctctcctgacagtatccggagacaccgtaggggactagccgtgcttatccctgaagccgctttcgtctctcctgacagtatccggagacaccgtaggggactagccgtgcttatccctgaagtcgatatccggcgtcttgtcttggcttatgttggcttgtatgttgtggcttctgttgttccgtctccactctcctcttaggaggtcttatatttatacccataggtgtccccttgtccaagtagaactagggaaaccaatatggatacaatccgagtagtccttgtcgttttcatgtggaactctattcatccttccttatgcggaactcctcttatatctgaaggttgtttccgtataagagtatgtggtgggtcctgtcgagatttagtcaactactattaggtatgtggtatctataacactgacatattttccatcgcaaaactaataataagtagtacaacattgatgctaaataattagattatttaagtatcaaagctaagcaactcaaagtcaaaaccgatgattaacagatgaagtattaaatatatttttttgcgggaatgaagtattaaattttgacttaggtattattatatatgttaagtttcaagttatcatgcatgtaacatcatgtacgttttcacgaaaatgctcacacccgcacgaccggcggggtggagaaaaatcggacgttgtctaccactacagtatgcaaagaatcttttcttttcttatttattcaaaagatttttttatcgtaaactatttatctaatctacgatctgattgcaccactaaattcgttacaattaaatctttacaataagaccacacatgattatatttcgacaaaatttttattgatttttttaatgttgcatgtggtcacttatgtttcaactagtagttttacaatgtttcagctagtgtactcatgatgtttcactgtgtacggatcaaatgttgcagtggaacgtgccgttgcaataaatcacccacatattttggaaaccctctattaagggaattttgtttattttttgttccacaaaaaatgtttcacctaatgcactcacaatgttctactatgtatagatctaatgttgcagtgaactgaaatatatcattgcaacaaaaaacccacatattttggaaaccttctattaaggaaattcgtttcattttttgtttcaccgaaaaatgttacatctagtgtacttataatgtttcactatgtatagatgtaatattgaagtgaactgaacattcttccgctatttgctgaaacattgtttttatataaggtgaaacaacaccagatttaaacgagtgaaacattttcgagaaacaattccgatatatctggtggaacatcgtgcaacatttaaaaatatttcaataataagctaattttttttcatcggaatatatccatgtgtggtcttgttttgaagatttaattgcaacgaatttaatggtgtaatcgaatcataatttggataagtaatttaaaaaaattagtttaaaagtagttttgtatgtaaatcgaacgctgacgtcagtgtccgattttttcctaaagcatcgaacgtccgacgcgtaccctctccatgttttcatctgcaaaaagtgtacaaatgagtattaattggcacgtgtctgagtctcagtgcccatgcatgttccgcttgttttaattcagttattttcgataggcaacaaacaaatgcaacttttatatgcacaagaaaaggatacagctgccgaacgcacaccaacaccaacagctcacacggttgggacgtgttgtcacgttgaggcgccgttgggcacgggtggcatcactccacccgtgggtgggcaggtttcacccggatcgagccgtacgcggacacgcatggcgtcgacctcaccactgcaaatgcgtgcggttagtccaccggtggcggcctcacatcacatggctcgctctcggtctcagccaataagccaaacgacaacgaggcaggcggcggctggaaaagcaaagcgcctccctggccgcgccgtacatgattcgagcgcgtgcgcggcgtcgcgaactggctggccggacgtgcccggatgagatagcgcacgcgccaacgtgcatatgcctacacgccgcgcgtgcggtctgggacgagtttcggtgcgtgagatgacggacgatgttcggttgcggactggcggcgatggatgacgccacgcgacgcaccgcgcagcggctggccgtttttcggttaatctatagtagctgagctgggtggtagtacaaaattatatattttttaatataattttacttaaaattaaaatttattaaatagttaccttgttgtcttaagattttgaaagaccaaacatatatattaaccatttcattattaatcttacaattattattctgttttataatccgatcacactattgtattcgttataattaaatcttttcgacaagatgtcatatgactatattctacttaaagaaaaatatatctttcaacagttaaaatttaatgttgcatgcgtgataatgtggctactccctctctctcatattacatgcatgtagtaatttttaaaataaattttcttctaaactatttatccaatctacggtatgatcgcaccattatgtttgttgtaattaaatctttacaacaatatataacatgattatattttgatgaaagtaatacatatgttttaacatatgttttcatttcataaactttttaaataattcatttgctatttttttcagcatgtataacttaatgtttcacccatgatccattaaaaatttaatcaaccatttatttcaaggacaactgtgttattgcccctattttatgttgcaattatgattttacccttcttttttagattggtgtttttacctttactttttgctaagaaagcttcagtttgccccaattctaaatggttgttaggtggcccagatttgtgagataaaataaaagagaaaaatattaacgaagtgcaaaaggactattgtacccccaacacagtattcgttcagccgttcccattcaaatattcctatccaagtcctgtgtagaactcgagcagttagcggctgaggctgggggtaggcgggtagctggcggcggctctggcacagcgccacgggaagacaacagcgggctacggcgagccagcaacagctacggcgcaacacacgggaaggcggcagatcttgcgcatcaccacgggaaggctgcggcgagcggccggcggcagcgctccggcgcagcattacaggcagttgagcagtgagcagcatggcgtggcacgacggcaacaacgacacatatacggcgggcagttcgtccacaaagacgaacgatgccgttgctgcttgattttccttttgttttttcccatctcatagtatttgtgacttgcgaggaatttatgtaaatattagtgctgaagtttcgcaaccattcgaattatgtgaaaatgctatcaaaattctatgaaattttgggatacaaattctaaaatacatgtctttttacagttgaattcacacaccgggcaaattgaattttcgtttgaaaaaagtagggatgaaaacacaaatcctaaaaaaaaaggtaaaatcataattgaaatacagaataaaggtaagaacccgtttgtttcagaattcatgcaacctgctgtaaacttgtgtgtcgggggccttgcaggcttgcagctacggtagatggaatgatgagttcggtcaatatttttttctttcacaaagctaacatgtcagggtaatcagatgttaccgtgtaacacgtctaattaataatctaaaaaagaatatagataatacacctgatcgtgagtgatgttcacccttgcggccttacctagttaccttcattaatgcctaaaatgattccgaaacaagttattctccatgccatccgtaggctacaggttccctttatagtcgactagattcattgcagaacgaacatataaattccttccattgtatatatgttgtacatctaaaataaactcacggcttttatgtacatatttgagggcacaatttcatgtgctggtagcctggtaacgtggtagcatagtacgtaccatgtgaaattgagtacgaggacgtgaaattgagcaagttcactttaggtacctcaatttatctctcagtctgaaattcatccctaaactaaaatgacaggtatagcaggtctttcaatttacaaaaccggatcaaccgagatcctaggtagtattatcaccaattttaactgattgacaagctgggctcacatgtcagtggataacatttcccggcgccatcctccgtgttcatcgtcgcgtcgatctcgtcggccagatgacgacgcacgcagcagctgtggctctgtggtcggtcaccgttagggaaggaggaggtggtggtcacggcagcggccatgccggagccggccacggccacggcggcggacatggcagcagccacggcaggccggacccatcagagcaccacccgggcaagcgcagcgcggcgcccggtgtcgggcagcctcctgcgccgctgtcgctctgcttcccctctgaatgaatcctgacccgaaccgcaccgcacccaatttcaaatcttgaatttaaatcgattgatcttgttgtgtacatagaatgaaatgaatccaaaggaattttttgcgaacgcagaatccaaaggaatcatagagaatccgcccgattcgggatttccggtgagattttcccgcatcttcaatctgcaatctatgtgttctttccaagaaatcaaggttttttcttggatacgttcatagaatcgaataatgcattgctaaacctaaaagggttcaaaaaaaacgtagtcagctttcaagtcgcatttaaatacgtagctacggccaacctgcgaaaccgagacaaattcaagagaaaattcctgtgtacccttaaaaattcacctaatcccttatacgtccttgaattttacttattttcttatatacccatgaattttagtttggatctcttccatgcctttttccgctagttgactattagttaaccgttaaatttttaatgaaaaaaacccattttaccctctgctatgaaaaaacatataaaataatagagtagaaatttgttagatgggactattatatttatgagttagttatgcaccatattatttgcgataaatatacttttagatataacataaaaaatagtacttacttattagttattaaaagttttctatgtagcacattagtatatttttcttatacgacaaatttgttgtattactgtcaaaacacatatgctacataaaaaaaagttttaataactaataaataagtactactccgtttcacaatgtaagtcataaaacttacattgtgaaacggagggagtattaattttttatatgatatctaaaagtaaatttgtcataaataatattgtgcataacaaactcataaatataatagtttcatcaaataaatttctacactccaacaatctactccattagtttattatgtttcttaatagtaaaggataaaatagatattttcataagaatttaatgatcaactaggaaaaatggcataaaaaggatccatgtaagtaaatgagcaaagaatggattaggtgaacttttatggatacatagggagttttctccaaattcaatgatcacgaaaccatggctcctgctcctcatcttcttcctcctagccgtgttcttgcaacgggtgattcttctattaacgggcaagcgattcatttcatcctctccgttgactctctctgctcgtgattagattgatctgatcttagtggtgttcttatcctctcttcctacaaagttataatccattaattactaaagcttaacatgtaaagatgacacatcatcgttcactaacaatcattaaatttaaacatcatgcaaacatgctatattaactataattttataatttattaaattttagatcttttaaaatgcaagcatgttaaattattatcccacataattcacataatatttttatatatatcttgattgtttttttatattatactatgtacatatatagttcatcatcacttagttctctcttctctcattaagtcatatcacatcaattgtttttagtgcttaaataaaatctatggtccaaattagattcgtctcatgaattagtccaagattatgtatgggttttattaatagtctacgtttaatatttataattagaacatccgatgtgatagagacttaaaagtaagtttcagtcccatctaaacagggtcaaccagcccggcaccacccttcttgtgacccctctgtcacgaatctccaagcagtcagacggtaaggatggtgggtacttatgtacccgagctcaaatctatgttatatatatatatatatatatatatatagattaatcatctaaaggctaaaaattatcgagatgatatggattaataagagaagaaaaagagagataatttggaccatagattttatttaagcactaaaaacaattgatgtgatatgacttaatgagagaagagagaactaagtgatgatgaactatatatgtacatagtataatataaaaaaacaatcaagatatatataaaaatattatgtgaattatgtgggataataatttaacatgcttgcattttaaaagatctaaaatttaataaattataaaattatagttaatatagcatgtttgcatgatgtttaaatttaatgattgttagtgaacgactattgagcctaattaatccatgattagcctatgtgatgctacagtaaacattatctaattatggattaattaggcttaaaaatatgtctcgcaaattagtttttatttatgtaattagttttataagtatagtattctggcagggagggttaaatgtagagcatggagtaacccgtactattgctacacagggaccgagagcaagaatcccggatttggccttttgctgtgtgaggaagcgtcttacttattaaaaccactcttggcgcaggctcttctcattcaccaaattaaaatgacatttacaaaataaaatatcgatctattatatatacacacgctgaattttttttttgttgaaatgatatatctctattcaccaaaaatgatatttacaaaatgaagtatcaatctattatatattttgactttgtttttacaggcatgatgagaacagatgggtggatggcaacccaaatttaaagggcaaaactagataataaggatttcagtaaaagtactaattgatccatggcaaaagattacaagaactcgtgtgaaatcaaaataaccggaagatatattatagaacggaacataaggaaggcaataaccttctcgagaaacatgagaagaaggtagcagtagcacccagcaacaggccaacagctagccttcgagaactggaactggaaagaaaaaaaacagtaaattgcatcttgggctattttttcttacctgtactgtaacttagaccagtgaaaaagtaaacttttcactttgaaccgggtatgtttacacaatgtttcaatttagactctcttcttcttcctccaactccctttcttcctctcttttctccgtacagctcaaggtctctttctcgatcaggtgcagtgcatgaaaaggcaagaagcaaaacctttcacagggtagccacccgccgaagttgatttcgagctcaaatgcaggcggcactacgaaggcggagcttgagcgctgcaaaacttgttgaagctcgagcgacacatgtggaaatttagcgcaggcgtgcagcataacatgtagcactagctgaggtcgagcatgagcttgagagcgtggctatctgctacttgacttagttcttatcgtcagttcagaaagtagcagcaactgtctgccattgccggccagcttcttcgtatgctagttgctaccagtaggaatacttgttgtgcaccttccgctgtccttgaaattaagccacaagcactaggtagtcgagattgaaaatgcaaactaccctttgaattctttggaagattttacagattgaaggggagattgggggaagagagttggaggaagaagaagggagtccaaattgaaacatcatgtaaagatactttgcccaaattgaaaaatttagctttagcctagtccaaattgtaacaatggtaatcaaaggtggctcaaagttcaattcactaaaaaaaatgcagcaagcgaaatacaaagagcatgcacatgaactgggatttttttttctcaagatcaaccaaataatttttcacatcaaggcaggaccttccatgactgtttcctcgccagagagaggggagagagagatcgggaggaacatgcagtggcgaaggatgaggtagctgcagaaatcctccatgtcggcctactctcatgggggatgcgattccgaaattatgtgcgcaccgctggttccgcaacagctttatctgccggatgcccagatcatcagcttcagcgctcttcgcacacatcataaaaaaacaaatcaaataatggaaataaaattaaggaaaaaaccaaatcgaccaagaacacccgattcccaaaaatccaaagaaaactcactacttgggggcagcggaagcagccaccgccgggctgcgctgtcctcggtcctcgtcaacccagtgcctcctccctacctcgctgagacatggatcgagactagcagctacgctgcgctggcgacatcacatcgccatggacatccacacgaattatccagcgctaggaggaacagggccgtccgatctatcgcctaggaggcggagggctgccggatttggtggccgtggacccttcccgcgctgacccacgcaccatgtcgctgctcaccttcctactcccactcctctcactccttctcgacgccgacgcgcgccatagcttcaagatccggcgcggggtggaccaaggagtctcgagccagtccttgtggtggagtcaagctcgagtggtcaggcggaagcttgccgcccctcaccggacaagctcgccgccggtccatcgtccacgagcgagggcacagcccgagtagtactagaagggcatttcgggtaaaactacagtaccattgtgtacccaccgtccaatcccaccagctcctattaggtgaaagagctacttttgatagagcagatacacttcactaggggtaaatgtaccatgctttaagattcgtgtgcacacgtgtagggtgcagatcgtgggtgcatatgaacccaggtgcagattatccaactcctataaataattactgcctcatgttataagttaaattttaactgcatgctatgtacctggtggggagcaaggtgagtgggttagaggctgtatcaggtgttatttaatacgtagcaccttataacttataagatgaggcagtaattattttactcagccttcactaggagtggtgtacaggcaaattagaggagagatgatccagtgatttttttacttgccgtacaatttttttactcattaagcgttcacatcaccagacgagtaactttttaactcgggacaaatgggatgggaaaagcctttgcaggcggtggtagtagtaaaagcggtccatgaggatgcggcacatgagaaaggcgagaaatccgaagttggacccagaaaaaactaaaagccaggaaggcgagcgctgagaggcgcgctacttccttcgtagcgccaccatgtgcgcgcgcatatatatatatatatatatatatatatatatataaaatatttacaaatagggagagaaatagaatttacaaagttattacatcaccgtgtatatccatgatttccaaataagtctttctactttcaaataggcccaaactatctcaatatttttcttctttcataaaatcatatcaccttacttttacatttaatcatcattctatatactattaaaattaaattatcataaaccacgttaacttacgtaatcttatgttatgtacctatgttacacattgtttttacttattgttatcatactaagctcccgcaacaatgcgcggagtttcatctagttgtcttgatgcgtatgtaccagcaggagctaaggagacgacgacgaaaacgttggttggcgggcagccgacgtccagaacgattgggaagagggagaaggggagagagagaggagaatgaaagtgctacccactgacatgtggggcccacgtgggtcccatgctaagtcagcttgtcacgtcagttaaaaccttacacaatactacctagatctcaggtgatccagttttataaattgagagatcggttatatctgataatttggtttagcaatgaatttctgactcggtgacaaattaagggatctaatgtgaaccgactccattttaaatcgagtgaccaatcgtagagtccctccgttccgttgtttcgtgaggcgtgcactcgtactcggtgccgaaagcgtccgctcggccacatttaacccaccacagcaccacggcctaaagaaactattttgacttccgtcggcccagcactcaagttaattaacgatttaccgctcgctgcgcggaaaggaataaagtccatcagaggtccctcaacttgtcaatgaatctgattttcatccctcaaacggaaaaccagacacaacgagtccctcaactatcaaaaccggcgcagattaggtcccttagcggttttaagggtggttttggcagacgtggcgtctacgtggccaattggactcggtcttcgtctgacgtggcattgacgtggcgcttacgtgacaattcgatcggaaaaaataataaaacccgtgggacccacatgtcagtttcacattaaaaaaaggtgggacccatgtggggcccacatgtcatactcacagccttcctcttcttcctcctctctccatctctctcccctctcctccctcctctcgcagtctcgccagccggcggagataacgacggcctggagaggcgtgacctcctccgcttccgccccctcgagcctatcgccggcggccgctgggaaataagcagcacacgagcgtcagccggagggaggagaggagcggtgcgcaggcgcgggcgtgggcaccggccggaggaaggagaggagcggcgcgtgtgctcggccggcggaagtataggagccacgggcggaggccaaggggagcgggagaaatccgcgacgcgctccgcgtccacatgctctgtcacggcgccccgcgcccccaccgattcaccacctacctcgtcacgcgcgtcaaccactgcctcccccactcgccaccaacgcctcctcatcctcgagggcgatggcgggctcgagaggctcctcgacctcctcgacgcggctgacgccggcgtcgatgcgcgggcggcgcttgagcgcgacgacggcccggtcttcgaggccgtagagacggacgcggagcacggcggtggcggcgcagagggggggcgcggcggtggtgcggcggaggcggggcgcgaggaaggaggagaggcggcggtgcgcggtggaggcggggcacgaggaatgaggagaggcgacggtgcgcagcggcgtcggggagacggagcttgatctcgacctccatcacgggaggcatggaggagagggaaggctagggtttggggttgcgattgggattggtagggaggctgatgcggttggacttggagggcgcggcgccgggcagcgggtggaggaggaggttggagttggaggacggcggggtcgtggtcggagtggatgaggcagtgggtgtgctggctgccgcggcggcggcggcaacgtagaggtggtcttcgagctcgtcgcagttggaggtggtcttcgcgcgccgccgctccggccgccgtcgccccacttcgcccgctgccctagtgcacatcgtcaagaagagagagaggataacgggaagaagatgaggggtaggaggatgacatgtggggcccacgtgggtcccaccatttttattattttgtatgtgaaacagacatgtgggtcccacatggtttattattttttcggatcaaattgccacgtaagcgccacgtcagatgaagaccaagtcgaatttgcgacgtaggcgccacgtcagccaaaaccaccatctaaaccgtcgagagatcttatctacatcagttttaatagttgagggacctgttgcatctggtttttttggttgaaggaccgcgcggaaacgtcgccggtagaggcgtagagccggtagatttgtgacgacgtcttccgcgccgccagatcggcccacttctcatcttctttattgtgaggccggctccatatatatcatatttatggccggctattacatcttcgattcctcctccccaaacgcaaggcactttccttctcctctctctctctcgacgcatcctccaacttgtgcacgtcttcctcctcgatctccatggccgagttccttcgccggccggagttttgtctgcccatgcacatatacacatcacgcggatcgaagatgggatgaacgtacgtggagcggtggaggtgcaaccggcaggcacggtggcatctcgatcgatctatcgatcgatgaggaggccacggtggcgtctcgatcgattcgcgacatgttcgccgagatctatcgatgaagaggccggatcccgaccgtgatgcgcgtgcgggcgtgcggcgtcctcggcggcgccgatatgctttgtggtcgggtatggatgttccgtctcaacgtcaacatatcgagctaattagtatttctttggacaataatggcgatggagatctgtgctgaagctttccctctctcaaggtaggttatcaagtttgtttgcatatctcggagctgatccctatcaacggaatggatttttgtgtacaacgacgagggagaagagaatcagatatccagttccggtggcgttcatggccgcgagatccggatccggactccccattccacagtagccctaactagttgttcaatactctagatctgaatcttattatcacccttagcatgtttccattaaattttagcatctccatgagtccatgaccatgccggtacgtgcatgcagtagagtgccgccgccggtgtactgcatgcgcagtcgtgttcccaatttgctccacatgtgccttgctgccattgatgacctcgaccaccactgtgagctagtaattcaaaaggcatcagcagtgccgtggtggtgggtggtgtgagcttgaaaaggcaaatctcttcgttagaggtgggcagcatgcgtggtgggggatgggacaggggttcagcaatctttgtcctcttcatttaatttcttactcctagctgttagtagaaattttctttaccaaatttgtttttgcagattcccaacgctggagaaatcttactgcgcagactcgagagacaccgaacgctcgcacaacactaattggatcactgaagtgcatttttcaaaccgaggaagcaataaactttggatctctgaagtggcaaaaattaaaaaaagaattcgttctctcaatctcagaaagagtcttgggcaagcaaggttctctagctcaaccggatgtatacatgaacaactactcaaggttagaaacctacttttttttcctcgaaaacacattagagaattgttcctcatttaattaagaagaaagataaagaaaacaaatacaaaagagagaatataaactgtcctccccataaatcacaaccacccatccatacaccaactaaaaggcgcgacgcacaagaccagctctagctgtccagattaagcgacctacatatagaagcttatggaggacttgggctccagctaagcaccacaaattactctcattttttactgctctaatgcttgtgctaattttggtgctaactgctacagttttattcgctcaactatatccatgctggactttctgcagaatcagttaagtttcctttagtttttcttctgtatgtatgtactccttaagattttcagaaaaggctacattagttagacctgttgtcaattaaccgtgtgctttttgattcttcatgtagttgccgttcccatgtttgttgaagaaactatcgggactatgtttcgccatactcctatacacacgttttgctggatatataagaaaagggacatgtcagttatcactttgcaaaggattcagatggtcttcggcctaggaaggtacgttctacggcctttttctatatatttattctatttttttttcaattacaaaggctagaactcccaaacccaatgacgaaccttgcctgcctgcccttcagagggaagcataagttcagaaaatgccactctcaaagacatgatctttgggataagacagttgacctcccatgaaacactgaactgtgcaaagcgaaaaaaacgacttaatgaaacattattgttgactcagagtacaacttttttttatatcaagggacttgaaacacagccaaattctaattgaagcatttttatatcagacgtgaaacatatagctctaactattgaaacattacaaaaagtatttgttgaatacatccagaaaatatgttgtgcaacatttgatttaactgaaaattaccacctccactaacctcttcctcaaacaccgcccgcggctatgccatcatcaccaattctccttcaggctttgttccgtttagaggggattgagggggaataatttcacaccacaataggtgtggaataaatcccctccaatccctttcttatgggggttaaccgaacaaggcctcatagagcatggccccttacatcaccccacaccccctttttcctagctcggatctatgccattatggcactgagctccctgtcccctaggccaccatcgtcagttgcttccccttggttcctcccttcgcctaggtcgctgtcacatactataccctgagccctccccccctctcccgttctgcctatgcctatcttgagcttccgcactccggtagtgagcaacggtgtatcaaggaggatcatcatgatgagatgttgttgcattcctatgtttgaggagggagcaagaaaggaatggtgagatctggaggtagcaaggaaggagatagagtaaagctgagagtgggggggtgtgagggtgcccagtctgagtggttatcggtgtgctcagtggcgaacccagaacaaaagttaccgggggtccaatacatactaattatctaattattgactaatatattaattaatatagtgtaatttatataggatttgaataatctacccggtatcttgtgacaccggatagtataacctaggcacgcccctgggtgtgctacgggaaacattttctgaatctttgaaatgcccactagctctctctgtgacatgcatgcttggacccatattcaacgagacttggatcattgtttcgcttggacccatatacttgtctagtaaatgctataaaataaacaacgatgaaaaaccaaaaaatcaacttcaaaattaaattttagctataaaataatccacgatgaaaaaacacaaaaacatatttaaaattaaattttagcttataagcataagtataaatgaaacgaaatagtggggattgcctacagtgttgctggtacagtagcagacattgatattcaacagtattgtagaggatctacatccgagtgcaaatctctttacttgtggcatttcctttcatctcccctccatgtgccttgcagccgtgcttcagctccaaagtagcgagattactaagtagtgcatgtgcgctagaaacatatctcgcgcgcacgtggaaacgcggagactggggtggagacgacgtccttaccgtacgggatgtgtacgttgtacgttgatcattttccttaaaaaatgtaatttttctttctttttttttcaaaaagagtgtcaactccttttttttaaaaaaaatgacaacattctattgaaatatttacaactttatttaaattgaaaagtaaaaataaaattaattaaattataaaaactttcgactcaaatttcaaaaacttttgacttaaattttgaaaactgtcaacttaagattttaaagtttttttactcatatttgaaaactttcaacttaggattttaaagttttttactcacttattgatttgatgaaactaatttagtattataaatattactatatttgtttataaacttagtcaaacttaaaactgtttgactttaaccaaaataaaaacgtcttatgacctgaaacagagatgtcacactagcacgacttggcaataggcaatagaagcacgagggtggcgacaagcaaggacgacttgtctcaaccaaaggctggaccaacagcacacatcggtctcaatcatccacttgtgcgtgatgctctaaaatgatgcaactaaaaacaacttcacaccaggccaccaggggcagaatattattagaaaaaatggctttgccacgtattagaataatcgattttgcaactcaaggaggacctacagttttttttttcagtcgaacaccctactagtagtatgctacataactccttttcgaggtaaaatcccctagcactgctgatcgtatgatgcgacagcttgtgtagtttcctttaggaggatcaattttgcaacaagtgaatggcatttattctttcgccacgtatatgcgcatgacatgtggtccctggacctgattgtcatgtactcgggccgtggccacaaataagcaaatgcgactcaactatataaagggtacaagagcacatttccttttcgaaaatggcacgatacgtaatgtagaatgatttcctgaaaccaaaggaaggtatttgtgccaacactcaattgccctgagtatttagggcagtcctagtggtggtggagctagaaaatttttcatggttatttatgtagatttggatggatttatatgaaaatttaagagtctaaggatgaatgcgaaaaggctatggagtcagctcacacatggcagcgccaccaatacatatattactaatcaaatgtgctaatttaatatcacatctcttacatcatgttttcgatactccaggtctcatgccaaacataattccatcatttttttctcatttagtatggagccttcgatgtgcatactccatgtagttgggttcccaaacggggaaaaattctccacgcgtgcatcacttctctttgccatggtgctcacttgtcatattgtgttttgtgacacgctgaggtgctgataaaccttcttttgtgacgctgaattatcatacacccaaccattcatttcattttacgcgatgcgagagttggttttcggccgccgggatgccggcccgtcccacagtgtgcagcctggcctgagttggatgagaggcctggagggcaaattcccggtgcacatcagactacccatcgtctcgtcctcttgctgtctagcataaataaaccaccaaccaccagagccctagcccgtaggcgccgtcacacgagaaccctcggagcctcagccgcctctgcgaagtcgagccaaggagctgcgccggcaccgcctccacgcccttccaccgccggctccgtctcgttggtgccctttcgtcctccggctcttgtgcaggtcgctgccgcctcctctccacgcagatcgagatttggctggtaatatactgctcacgcgaatcttgcccttccgtgtttagattagattgaagagtgggagaccatacaattcaattcttagacgtaggatttcctacggaatcaaacctagctaggaactaggaccaatacataaatggaacatattattttagcctgcaatatctcataagctttgtcaatcgtcttggtctcctgactctccatgtttcgggttggaagttgccttgcagtcaccttgcagcgcaacagggtatttacctccacccgtaattgattgatgaaattgttcttcgtatggacctgtccaataacaaagaaaaacatatgcatggttgtctacaagtgcccatgttgttgcagctacccttgagtataaattgcactcccatcgggtagacacttctttccaatactgtgaatacattagtgggtctgtcagttggcacagaataaccacccactatgtgcgcccagtctttttgtaacagatcaataaaaaaaaaagatgtggacctgattcagcttagtcacaaaaatagcatgtggaatctttctgacatttccttctaatcacagtctttattccttttaatgatgtctttagttaatgataaatgataaattgccaactgtaaattttcattggtcacatgctctccaatatgctgtgctggaattgcttctacctagtcagacttgtaactgtaaatttcaatgcgccacatggctgaattgcttatgttcatagttctctggtttgtctgattaaggtttaattatctgtatactatttcaatagatggcaccaccagacaatttctccaatgcattagagagatgggtataccgcaactgtgtcagctctatcgtttgtgtggagctccgaccagaacctaatcttcttttagactggcagaatcatttgtttcctattcctgatgatccagaagcggatgatcagcttgctcagagggtggcggactgcctagtccccgtgcattgccctggtttcgtgatagaaccattactacaggatcccttgcatattcatgtgttgacatgtgcacatgcactaggcccagtgttcaatgccgagcagccaatagatgtagacgatattaatattctgtatcaacctcatattatctgtgaccatatgtagcaagcgtacctgaatgagctccagcataacaatcagattgcgagggagtatgtaataggaacagtgcttgccattgactgtgctagcgatttacttcttattcagagcacaagagtccactttatgttgcgctgtgggatgcctcaccccccattacctattgcttctcagtttcccaaacctctcagtaaggttgtcatggtctcttggccacatcctacgaggaatcggactgcagtcactggagagatctcacacccgggtcgacagtttgatgagttaagcccagtgaatcctttgggttttacaacgatgctgtctgaggttcaaattcgatcagaacaaggaagctccggggggcctttgctgaatggtcaggttcaagttacgggcctcttgcatggtggcaatggcagtttttcattcttcatttctcttccgaatggggtaaggcacaagaacgacctaccttctaatgttcacatatgtttcctaatttaaattaatgcctattatataagtttctaatttcgattgtttgtatttgtaggattccttgtatgatttgctggccctgattcaacattgctccgccccctttacctctttctggatgctgtgtgtatgggtgaacatgctgcgacttttttgagatagttgcaacttgctctacgtttgcgatgatctatgaatttttggtagaacctactttacctgtctgttcctggtaaagatgagaattttgtacctaagatattttccttaagctcaaagattcctggtcctgtttgaaaatgatcggatacggttatatcttaaagatgagaattttgtatctaagatattttccttaagctcaaagattccttttcctgtttgaaaatgaagatacggttatatttgccaagtccaataatggacttcgttatgaagttgtgcacgtgtatgtgaggctggatgtcagcatgtgtggttagtcgttgaatttcccttgcaacttcctctgcgttttatccgatgttcttgatttcttattcctctgcattttatccgatgttcttgatttcttattaatattttcactttgcaaaatgacaaaaaccattctagcaataactgaacaaaaagaaacatgaatctgcataagattgattggttccacagctgtgggaaaagtagaagccggtttggttagagcagctgtgaaactgtagatgtagaagaaatacatgttatgaagaaattttaagcataaataattttaagcattcgtgatagtacttgacaaactgaaattgttcactatttggcaacttagaagtataaagcataaacatgtataagagcaatcagattgtgacctcaccaaagctgctatatgttgtcagaaaccaaagatatatagaaaatagtactgattgataaagcataactttagcaccataggtttcaattttatgcacagtagaattaaagtttgaatgtaaaaaaaaatgtattgcactctatatttctatataaattatagaaaatcatagaactgcttggcgttggcccggcagtattatcaattgattgattctgattatctagaaactgtaatatagtgagtgtaaatttcatagtaattgatatagtctaatattttatcagaagttgaagcagcctaagtatcagtctacaaaacaatgcaatctatttttgtgtttttcaacagtcataagccgaaattaaaaaaaaacagctgcattgaaaatgaacttgtcatatatatctatagtcataagctactctaaggctcagttcgtttgtgatggttcccaacctctcattctcgatttccgcgcgcacgtttttcaaactactattttgatgtgttttttgtaaaaaagtttttatacgaaagttgtttaaaaaaaatcatattgtttcatttttgaaaaaaaaaattagctaatacttaattaatcacgcgctaatggatcgttccgtttttcgtgccagagccaaacattcccaacctgctctttcgaacagagcctaagttattacaaaacatcctaagtatcagtctacagaacattgcattccagcctatgttttccaattctcaaagaaacacatgaggtgcttcaggctgaatgttttggttcaagatcacaaaacacatgaggtgcttcagtctgaatgttttggttcaagatacctttcggcggcggaggaacgacggcgtggctccatatcggcagcggttgaggcggaggccgaggaggaggtcgccgaagcagtttgtcggaggagaccggcgatgcgtgacgattttggtagcggagggacagcggcggcggcagtgatgccggttgagatggagtccgaggagacttcagcggccgagggacagcaacgggagaccggatcggcgatgttggttgaggcggcggtggcaggtagtcgtcggagaggcggcgaagaaaaaaattccagatctagaagagaagctatggttaacgcaagaaaattcaagaaaaaatgggtgggagatagagggatgatggtcatttcatattagcttgtacattcaaactaattttattctgttcacttataaaatcatatcaagagatttttatgaaatgaccatcagacttcataattgtaacgccccgattttcgttcggaattaaaaattattaaataatgcattttctagaaattaaataaaagttaaatcaatttaatcaagtgaaataatgggagtatttgaaatttcctttaaaaatcattggccgagaatattttgtaatattttttgtgccctaatatactctccggaattttccgtaaattttcggagctcaagaagtaattttaatagcacaaagttcatttaaccaatttaataaaaaaaacaattaaatctcccctccttcactttgggccacttccggcccaagaatccttcccctcccccgtggcccgcgcgcccctccccctctcgggcctctctctctctccccctcggcctgctcgcccttgaagtctaaataaccccctgctccctctctccctcaggccgacaagtgggaccgcgggatccacttgtcaggtccatccccaaccttcctccatcccggccagcaaccgcccgaagccgccatgccgcccgttgccgcccacgtcgccgccgattccgggtcctcccgctcacgccctcgcgcccaaaccaagtaaaatcggttccccaccacctcctccaccttttcccctacttttccccaatttttggcgccaaattgagctccacttcgcccacgtcggcgtcccacgtcgccggccggttgccgcccgatcccgcctctcccggccacgatctccatccccgagccctatataaagcacccccgtgctcccctcttccgtttcccctcctcgcccgagctccccgtgccctttcccgctctccccgcgtcgctacctctctccactgtcgccggcgagctccagccgcctctagccgccgctcccgccgtccccgcgccgcgccgcttgtgccgccggcatcgccgctccacaccgcaccccggcccccacctttcttcccctaaccgtcgccgaaaccccaccgccaccgccgacccgagctacatcaccgccagccacctccagccgcacgccgtcgccgcctgagccgctccagcaccgtgccaccaccgcagccagttgcgccgccgcgagagcaggcctgtccgccactcttctccaccaaaacggctccgcaaggacgaggatgtcctcggccgccgcccctcttcaccggaaatccgccggagttccccttcccttcgcgcgccggtgagctcccctaattccttcgccttcggccggtttttcccgctgcttcacgccttctcccatcctcctaaccataccactgcattccccatgtccttgcagccgccgtccgccggttcccgctcgcggaacgccgccggaccgccgtcaccgttgtctccccgaggagcgccgccgccttcccgtcctcaccttgtcgtcctgttcgctcggtgagcatccctccctctccctctatctccccttcgccggtcgcccgcgttgcgccgccgccgccggtggccatccggctaggccgtcgtcgccgccgttcgccgccgctcggccggccggtctcggccgcgcccgcccttccctgtggccgtccgtggaccggcgtggtcctggtccacggcgcacccgaggtcgcggtggaccgtgtccaccgtgggccgcccccttgagccgctgatgcctggggcccacctgtcggcgctggttcccctttgatgacgtcagcagcaggcctttcctttgagaaattatttaataattgcgtcataaatcaataataattctagaaattcatataaatggctcaaaacttctaaaattcatatctaattcattcgaactccaaattgcgccattcaacttgcaaaattcatctaaaattgagttctacatgtaagtttactttttatgtaatgtttccttggtttttattagagtttttcctcattttgcgtgccagcgtgtagaatccgtcgttttggaagtccgcggtcgtgaggaaaagagttcggaagatcgaagtgaagaagcaaggcaagtcacacattccccttgagcattttgatcctaatttataaacgttttaccgtttgtaaataaacatgcatgtcttgctaattacatgggatccgggtattacctatctgcttgcttatgccatgtttacttgatatctgtcccttgtcaatattgggtaataaatcgactagctcatgttacttatgtgacctagctagaactatatgcttagccatgcttaattacaactagctcagttgatatgataattacagtattagacctttttagtatcagaatgagctgcgtgctcgagacatctggccatgcttcatggtcgtaattatccaactaaaatgcgactgtatggtgggctgtgggtgcatggctttgctaatcacacccatggcagttaaggaccggttcgcgggaaaccctggaagaattcagcgtacttaccccaagtcagcgtgggcaacggctgggcttgtagtgtagctttcctctagctaacgcatccaggcaagggtaggcgtgatggagtttggatgggccctgcgacggcctatgcagcttccggattcacctaggcacgagaggggactgcccgctgccttgcgaggagtggggttgaaacctaaggtgtggtgtgcttggttagagggggttatgcgaaaggtcctgtcatggcctctttccggtatgtcgtggtggcatgtcagcgcacggtaacatgtcgtggggctgtgtcttgtgggcagttgtacacctctgatcagagtaaaactattcgaatagccgtgcccgcggttatgggcggtcgaccagattcaccgtgattagtcccaccttaataaatcgactcaatgcactgtagttcaggtgttttggttgggcctgttcaacgtggtgtagcgttgatcagtggagatttaatgctactttaattactcaacagtgttactgttttgctcaataaaacgttttacaaccgccttttatgcaaatagcctcaaaccatccttgtattccccttgcacgtctgcatcgttggtgtggcttgctgagtacggtggttgtactcagccttgctattattcccccttttcagaagtgtagtgcttctgagctgaagacggagttagaagaccaaggctcagaccccagttgagttttgcctgtggagtggagctgaagccccgctaggatcgccttttttccactgttgctgcttttgtttcggtgtgaggactaagtgcctcttctgtaagtattttacgctttatttatgtttggaactgtttattacttgtcgttttgtgtaccctagctgatcctgtacagggatttaatgcacaaaatagtctgaaaatttgggctaaatttttgggcgtgacaataatgctggatcatataattatgatggtgtttcccattcaacaggtttctgacaaacaatgcacatatacattacaagagaattgtctgtgacgtcgcagatcaaaatggggacatgtgatcaacctaacaaactgggtatttcttaaatgaacccaccccaacagaagaaaagaaagaaaaacaacaactgtccggtattcctctgtctgcaatgtagggaaaaatcattaccaacggaaatcatttgtataatcaccccccccccccccaatgcatcagctatcaatgtagaccaaaagattcagcaatatgaaagttgaattagggaaaccattattaatctacctataacaggaaaagataatctttagcatatcattttgtacccacagctttttcacataagcattttaacaaacacaaattgtgcacacacctgatgaagacaaggaagcagcagtcctccacactcacactgccacaggagtaggcgtcaacggcggtggcgttgtcggcgggggattcagtgtcggcgtcggcgaggaggagtcactgcctggggtggcggcgtctgtggcaggtgggcggaaggaggaaaggcggggggggggggggacaacgtctgcgctagtcgtc

SEQ ID NO: 10209 - DNA, 83263 bp, Oryza sativa
ctggcgccccaaaaaggaccatttttggataagtttttttaggggtctatttgcgaaataagttttttaaaaggaccaaaatgtgaaaaatccagatttgcacaccctattataccactaccgtcagttgactttgcgttgaccgttaactcaaaagtgaaaagacgtatttgtcccctctaagctgttaggcatgtagtaggttataatgtcagattttttaatttggttgacatatatatatgtatgtacaacatttcagctaggcattacacatattttgaatacatgaatatacagcattaatttatatattgaatatacggatatttttcagtcacataatttttagccactaccatcacgtatattttccacaaagacattatacatgtacaaaagcttcaacatgcagtaaacatatgtttccaaatcatacttagggacaacattgaagccatataatagatcgctaagaacaatatttctgtgtttcacagtataacaaacatatcttgtttgctggagcaagaacatatataaacagcggcacagaaaattgaacaaaaactagccgccgcccctccagcgaccgggcgccgccaccctcgcctgccgcctgcctgctccgacgcctcccctcccgcgaccgcgaccggccgtcgcacctccagtcgctagccctcccgtgaccgaccgccgccctccctggaccaagcgccttcgctgcgccgcctgctcaggggagccgcgccgcctgctcaggggagccgcgccaccccggaccgccgacctcgccgcgccgcctgctctcctccctctagggttttgtcgcgccgcatcctcactctgctcaggtcaatgcctcctccctgctagggtttttttgagaggattttgggcttgggccatttaggccaaaggctatttttgtcatttttgcaaaaatctgacaaggggttagttcctaacaactggcatataagggaagagccgattttcagtgacatataagggatcgggccaatttttagtggcatataagagattctctcaatttttaaaggttccaagaaaaataaataggaacagtggtagatcgagcaaacaaataaaggatgatatggtttgatctttcaaagtcttaagacaacatgataactatttaataaattttaagtaaaatcatattaaaaaatataattttgtatgttactagccccgcaactgcgcgggccacccaactagtttatcataaaataaagtctgtaggactgaaacatctcacatgtaagtgctctttgatttctttttcctcactttcatgaagcttaaagtaaatttaacggtttaaaattatataaaagctatatacaagtttttctgttgttacaacgtaattatatttatattaatattgtatttgttaaatttttaaaagaaaaattgtcgatagtttatagcaaaatcgatgccgattgaactttgcgtgcgtgattgcagggaatcacacgcaatctccggctaatcgtatgtctatcagtggtagacgggcaaatcaaccaactaacccccataattcccctcccgccgctgcgcgcaacggcaccgccaggccacgcatgaccacaaccgcaggtcatgcggccacgcgcacccgtacctcctagctaggcttgcggacggcgacaggcacgcgggggggcgtgggcgccggcggcaacttgagggggcggccgcggtggctggccagaggatcgatcgatcggtcagatatatctggatgcgacgggccgtgtcgtgcagcagctgcctctgccgagccgtgcgaacgctggcacggggcgagccgcgcgccaagcgatcgggcggcgcgcgcggtatacgcctggtcggaggaggaggcgtgtcgcgagtccgtttccgtgagacgcaggggggatatcatatccacgtatatagagtatagtactacgtgtagtagtagcgaccttagcgagccaaatattatctgggcactgtacggggcaggcgggcagccgtgcactgctacgattagtcggtacatcaatctgcatgcgaactgttgcgtgttccatccacggcgccgtggaacggtggaagcaagaacgaccggccggctgtacggtggagatcgatgggcacgcataaaactgcatttactcgaaagaggccggtggcatgggcgcacaggcaaagtttaatgatcgaaaagaatgtcggggcaagttgtacgtactgtgacgctgatactaggcggtggggatacaatacaggagcacacgaaagcggttttcggctgtggtaaatggtgacaggtttattgttttcgttttcttcctttattttgtcctgttagagggattcgggctagtttgatttgaggccggtttttctttaaaagttttggaataactactaaatttgttagagtagaatatttattagtataggcaaaatttttcatcaaacaaatattatacaatactgttaaagttgttaaaattttggttggataaaaaatagcttcaatctaaacaatcattggtgtttgattcttgtcattaagggattgtatcatactgttatcaataatcatttttgttttattatcgctgtacactacagtttttccaaatactaaggggagaaaaccctagctgccgcctaagcataccaccacggtgcaggcgcaaggaaggtggctatggggctttcaccgtcgcgtgtcttctatgtggtagccattagtagcggctagccacaaattatcgatggcctagcgtcgtccggttgaggaacgtgtggatggatacgatgacaacgggtagtttcgccaacatcaccgatcgatgaaaccacaaccccgtagcactatggtgatgtttcgggttgttgccgcagtggccgcctcgacctactttacattgctgactcctcctgttagattgttggtgccggtgccacttcaaaggacatgtctcccatactatagcgttccgagtcccttgttgtatgatcgcctatgttgtttctctatccatattcaatgcataatcgtttcatcctcgatctcgagagattgggtatggccttgaggtcgcgatggctctggcaacaaagaacctcaccagataagctgtggcagggactaaatatcccaattttgcagaaggaacacaaccttgtctcgattctatggtttgctcagtgggcgatgggaagttggtactgttctgggaggattgctggctacagggctcttcaattcggtcactcgcgccggctgtctacgcagctgttcccgctcggttccggaacaggcgaacggtggttgaggctttgcaagacaagaggtggactcgagacatctctgcggcgctggggatccaggcaatactggaatatctcaagctttgggaccttcttcgatcggttcagcttggggagggactggacacgatctcttggcgttgggagagttcggggatttactctgcacgctcggcgtatcgtcttctcttcttgggaagaaccaacctcaagcacaagccaatttggaagtctctagcgcctcctcgctatcggtacttcttgtggctggtcgccctcaatcgttgttggacagcggatcgccttcggagttgagggctgtcacacccggctcactgccttctttgcgatcaatgtgatgagacgattgatcacttattggacgcttgcccgaagtctcgctggctatggtggattgctctttcagctattggtcatctgagtgtctacctctcaatgagcactcttttcattcctgttgtgtgacagtcgcaaaagaatggcaaaggagcatcgtcgaggatttgacaccattgcaactttggtagcatggacgatttggaaggaaagaaacaatcgggtcttcaaccagaagagcaggacatgggcggaaattgctagggccattacgggcgaagcggatctttggcggttggctagagccacaataccggccatggcgattcctatgtcgggtgaaagctaaggtctccaaatccgttaggagattaggcttttgttttcttcctcttccccctcctgtatcttgtccccttcgtttttttgagttttcagcccgcactgtaaatacttttattccttcttaatacaaagatgcgcccctcgcgtattcccaaaaaataatcgttttgcgacatgtgcatgctttgggcgagacgttagttctccctccttgcgaggagagatgctatccgtaattcatttactctccgatgagatcttccgcttcgattcgatgtcagtcattaatggtgatgtgcacgtgaattgatttgcagaacgatcaagcgataatttcagagtctgttttcaacttcaagtttaatttcaaaatttgggaaatgatcatccaggttcaaggtaaggaggtcttcatggttagtagattttatccacaataccaagacttccattcctggatatggaggacagggttaattcgattgaagaaggatatggagttaacgactacatgcatcttacaagctgttgttgaagagacaatgattgtgtagactttcgtcacctatgaatagagattcaccgataagattttttattgataatgctatccatgtcttttagactggtgtttaattattaaaaatgttatggctttttcttttagtagaactcatatatcgtcgtgtatagtcttatgtgtacagcttcattaatcggaatttgatatttcactttagtggggttagaaaaaaaagacaagacaatagtaaaaggaattctaccgttcagaaattgaccaagtttgcccaaagtcccaaagtactggagtagaaggtaccaagatacatcaagtggatctgtggatgcctggcggatatacatctggtggatcttcagccttcaggagtactagccatcgctgttcacggcctatcacgctgggtgggccacgcggcaatttacgaggcccgcacaaacaaacccataaggcctagttgtctggctactccttttgcccacatgcagcccgcgtaccggcttcccaccgcattgggttgggctatcccggaccgcagcttgggagactgagaattggcagcctgcctgtgctgatgtggtggaagtatatacttcgtgaaaaaaaagtgaattgttgttttgtctagtccttcatccgtcagtgaatataatggattatatatttttttaagaactaagaaaatagtaaaaggacatgtgatgggtgaaaaaaataaagtagtataaaagttagtaggtgggagaagaaattagtataaaaatagatcatggaggaataaattagtataaaagttggtcggtgaagaatatagtatttgagattctaaaaccccttatattttaggataaattggatggagaaaatcttttctattcatggacggagggagtagtagactagtagtgagagtggattataaactctcaaatgacatcctttcatggtttacatatcatttaaatgattatgattttttttaaaaaaatatttaataagataaattaatactttctatgttcaaaaatatagtaacgtttagctatgaatttgaacaaacaattatccaatttcatagttaaaaatacttatattcaacttatccaagttaaaaataaataaattaaaccataactaggatgaggagggagatccttcttaggactggacccgcgaggtactcatacggcgtagactgctacgctgcggtccacgaggttcgaatacgcgaggacgacatgccggactggcaaaacgcgctgcatcctgcatgcattgtggtagcccggtaggctggttatgtgcgaaaagtgtagtgcaccaacgttcgcgattataatccggcaaatcagtcggaagggacacgcgaaataggaggacacgccattttctcccattttcatttttttctcttcttttacgtgattcttctttaatccgttgcaagtatcaagtatttctgttttttttctttcacttatgtttatttcttagatttcttttttcgttatacacagtatttttttatatcttcttaacagaaattttctatatataaataatttccatggaaactttctatataccgtgatattttatatatgtaaactttatatagaaattacatcatagctagaaagtttagtgcagaaataacaaaatactaacatggaatttttcaaatgaataatatccttggaaaatttctatacatagactttctatatagagagattttatatatgtaaactttatatatatggactttgaatatataaactttatatatagaaagatcttgttttctgttcgctaggttcgccgctagcgagctttcgcgcattagacatgcctggttatgtgagcctactccatcagagctcggcagctcgcagagaaaacgaatgctggagtactcgtgaaaacgtctagccccatcatttcacatataggagaaaaaaatcaaaacgatatatttgtaaattaaaaataatttttaaataaaactcttatatatatgtgttcttaaaaaatatctaaaaacaaatgttaaaaataaactatgatgaaaaaactctaaaatcaactctaaatttaatgttgaaaacacaaattttggttgataagcgtaacaatactgcttgcatactagggctatgttcggaatcatctgttcccagcatggacagtgcgcacggaaacggagcggtccattagggctaagtattagtttttttttcaaaaatggatcaatatgattttttaagtaattttcgcatagaaacttttttttaaaaaaacacaccgtttagcaatttgaaaagtgtgcgcacggaatacgatagagaggaattgggaacccaagcttccaaacacagcctacttgcagtcatttgcagtataaaacatcttttgtgccatttaattttgtcatcacacagtactcctacttggaaagttggaaacagggcaacacagcctgatactgcctgcggccaggccggtcttgatgtggctgtagagcctcagcaaaaccccagaaaaaacaaaccaaaaaggaaaagaaaaaagaaaaaccgaagcctataaattactacaacatttaatttgggacggacggagtattccacctaggaatagcaacaggtcgggtaggacacgggtagagcgattccatgcctgaccggagacccatgtgcccgcgcccaacccatgcccacaaggtctatcaggcaaaatcctatgcatgtgcccatgcccattgagcacgggcacgggcatatcgggcccgcctgcaccgtgcgccaccactgccgtcgtgcgacgccgcctgcgccgtgcgccaccagctgccgtggggattgaggtaggagaagagagtggggaattaggttagggtttctattagttgagtatatatatgtccctggttagtgggccaagagaaaagggtatgaggaataagagatgggccaaaattagcaaatacatatgtatcgggtcgggtatgggttatccgtgggcaaaaaataatgcccggctgctgtctgctatgttcttgggtctcgggctggcatggccacgggcaaaatattacacccatgcccatgcctatcgggccgggtattcgcggatacccggaccgatgggtaaaattaccatccctaattccacttgggagtaggggtgaaaatgatacgaaaactttccacttgtgttgtaccgttgagacttaacaattggacttatatgattgtgttttatgataaattgttgaccgttgagacttgagaattggatttatcagtttaaggggccttttattccgataaatttttgttactgtatttgcaccggttcgtttttgcgtcgttttcggtttcgataatatccggggtttccaattccgattcagattccgaaaaaaaatataaaaacgaaaacgataaagatggtttccgtctattttcgtaccgttttcatccctactcgggagctaccggaggagcatggagctaccggtcttatgtggctgtagagcctgcagctaccggaggagcttaatgcaatgacgctaagctaggccctgccatgccatcctatgcctgtctctttttcttcggttacagttccaaggtctgaaccatgtgagatcgatgagggcgtcatgaagacttgctcatcctcgagaaccacatgagtacctcgcgggccatggggactggaccatcgagaaccacatgcaggcagtcggccggcctgctgtccatagtgaatgtgacaaaccggcctgtccatagtgaggagcctacatttgctcctcgccgtttgcgtgcgatgttctgcacaaccgagaaccgtgagagagaaagaggctgcgtgcgtgttgtaggctcctactacttctgtagtagccatgaaattcaaggcgactactaacgacgtgcaaaatacgggccgtgcatatatagactgtacgcggcgcacaacacgctgcgtctttgcgtaatgccccaccccgtacacgagtgatccacctccctcttattacagtcttactgttgggatcgacatctctcaatttgggatttagcgtgttgtcagcgacaaatagaacatgtatcttatatgctaaaggtacaccgatttaatttatgtactcgtacgtgaatatttacaagaattacagtgaggtacgtagtgatggcctcttaatatagttgagcagtggctaactaatatgttttcatttacttgtatttcagatctgcctgttcacggtttgggcacaaaccgttcaacccgtgaaaccaaaccaacccaaaccgtttttccatttattcacgggttggtttggaaccggcgtaacccgttgaacccgtgtctcgtccttccccctccgaacctgcgctgagcttccgcggcaacaagacgccatggcgagaaggcatctgcgtgatcgaggaaaccaagcaatagcatcggctatttagctcgcacgtaagtgcaaaacaccgtagacgttggtgccggcagcgccgatgctggcgacgacgccgaggcagccaaacggcggctcccatccgaggaggaaacaatcgctagatcgccgccgccgctggcgtgttggtgtcctgcttgttgcctgcctgcctccatcgcatggaaaggctatacgagccatggtgcaatcggctgctgttgagcttggaaggacagccatggctgtgttgctgttcttatgcttgatccccttctttcacgtacgccggaagaaagaaactttctacggtttaacccgtcaaacccattgaaaccaaaccatatgaaccggtatttctaggttggtttggtttttctgaccaaaccgccaaagttgatgaataccttgaatttcagatatacacaaccattcaaacattttaggatggtctatggatttctcatcttttgtgaatatattattgtattatttttaaaaaacaaccacacttaaatatttatcttcaaaactgaaaatatttagtcacgtgaaatagaaatatctgacataacattagagcatatacaaaagactagccattaagttagccatttcaaaatatagccaacaaaaaatgcttaaaaaaagtatgaataagaaaacacatgattcttgtttttcatgcacaagatgcttacgagttacaagaaagaggctaaagtggactttttttctataaaattatagatagagaataatgttcctatgaaaatcaagatagccaatcatttaaaacgaatgcatctattagtagctaattcaaaggaactagtatcaatctttcattttttccttcacatttccttcatgccgaatgagcccatagcttagttttgtgtattagagattactccgtatgtcatatatataatgaaaccgtggggtgtttcaaataagcgtaaacattgcatgccattccagtaggcatagaaaagcctgaattccggtttgctcttataggacctatgctatatgcatgaatgcagatcgacttcaatgcggtgtataagcataggactccatgtactgtagcactacacgtctgccctctacacactgtgtttagttcgtgaaaaaagttggaagtttagaaaaagttagaagtttataaaaaaagttaaaagcttatatgtgtatgaaagttttggatgtaatatgatgtgatagaaagttagaagttaggggtagttgggggtgaactgaaatggccggccaccatacgccaaactagtcgatcaactgtaaaaatgcagttctaaaaaaaactgtaaaaatgctctgtatataaagagttccaggtctgtaaaatggccaggtgccctcctctctctctctaaaagaacacgtgacgccttcaaagaaacaaacaccagttgacatagtactagtgtactccactccactacggaggagtactatactggctgtgcgcctatggctatgtatgcggctacagcgaaacatgggagctacaggtagaattttgtcgtcttcacttgtcgcctgcggcctcaccagacagcaggactgagccgacgctgctgtagacggagtaggactgtaggagtactcgtactagtagatgcgtacgcacatcgatacgcatttcctcccatctgcagagaatttttggtacttatgctatttatgacgggcttgccctatccaggagagccaacctgagagatttgctgaacgaacctgcaagtgcatagcctcgtttcttgctgccgcctccctggagtcttccctggcccggttaacctggttaactcgtgagccaacatcgaaccaccgaggtataacgatgacaaaacatcctcgatcgtcttgtaaaactaatatgccctttagttttctgctccttctctttagacagtactctttccgtttcacaatgtaagtcattctagcattttccacattcatatatatgtctagattcattaacatcaatatgaatgtggaaaatgctataatgacttacattgtgaaacggaggaagtattattctctttgaaaaagtgaaaacctaggtgctcttaagtctttgaacaagtgagagaatacaatttactcatctggccataaaaaagttgcatattacaatagtttaattaacgataaatctagtaacatctattttacatgattggtcttttttattttattgctattaatagttaaagttaaaaatggttgacttgatactatgttaaaaatgcttatgttttggaacggaggaagcaagtttttgttttgagagttttcgcttgatgtagcttcacaaacaatccttatttatatgaaataatacatattctcacgtaaactgtggctataaaatattaaaatatagaaaataaatcagaaactaactaaaagctagattctcatgcattatttctcagaatacttagctcggaaatactaggaccttcgtacgtgggcgagttgaatttgattgacatttcgcattggcagggaggcgcaagcagacagtaggacagttggagcttcttcctatgccttcccttgttactggtcgtgctaggtgtgaagagaaatagataattatctatataaatatataggattaactcatcatatacttaaatagttctgaaacgtaaatgtaaagtccgtttttcgtctgacgtaaacagagccgtccgtactctaacagcccgattcatcttccacggcaaacccaaatcggatccacaaaaatctatcgccatctgattttaaccaaacatccagcgcggcatgtggcggcggcggtgctcggggtcgaggccctcgcgtcgggaggggcagaccgcagacaggcaggacagccgtaacgacgtactacgccccatgggagtacggaggggatcagatcgatggcgttggtggcgaacgttgtacaccgcaacagtggcggcgtcgacggctcgacgctgcgctggccaggtcagttatctcgcttcttatttgagaaaagaaaaatgtaaggtgtggacagtttgcctcatattttcttctgttagaaacgtttgctctaatgcagtcatctttaaacacctaccattaccaacaacgcctctacttcgcccaaaaaaaggagaaaaaactctacttcacccgtagaggttaatccaattttgacatatggcccgcgttgaaataatacttttgctgaaaattatacaattcgtcatagtattgattagagtatgtgccttcgcccttcgctaaacaagtttggaagagctggcttgcggtttcgcacaatagccaatgcaatatttattggatttacacttttggactataggacatgtctcaagatttgtagtcggctccttctccgactaactccttttcttcaacactagcgacactccaaaatcaacagatgacttgtggattaggattgtggtcggggtaggaaaaagtttgaaggaatggccgtcgaggatggtacttatagtggacgattgccggagaagtgggaacccgggtccccacctctgattactcgggacatcaaagatctccggaacaggtcacgcggtactgcatcccgctagtcaccagtagactaaggctttgtctcttggtccaactaggtgtgccccaagctcatggccctgagcttggttttctgctcgttactcgggtcccctagtgaaccataagtccataacgatgatacgacctgaaccatcatttccctcacgtctcacggcgatctcacatttaatgcgaaggatacaaatcgaacgggcatgcgtgaagagcaacgaatgacaagatggcgcataccgaccataaacaagccatcattactcctaaaaacccaagggtatgggctagcacgcgacatggttgactgctatgtcacctcgtcgagccccccctcccccaaatgggcatgcctctgcccaacgtcaacacatgttaccaactccaagccatgcactgacacgaggacgaggtagttgtgcgaccccactgcatgcaagcgccatcgccatcttctctaggggagctcttagggggtctagcacaacccccatatgacagcatatgaaaatactcctcttacatgattcccctatgtgggctccatttgtaagtgacgatcaacgtagtatctagattcgggaagaacctatgcccgcaactccgcaaggatggggggtccgattccaaatcagtatccgacagggctagctagagaaagaaaactttgcacaccctgtaagattggcaaaaaagattgagagaataactcgagaatatggtattacgctttcgtgcggcttgaacttgtataaagtgcttgcctccatccatttcaccccatcgtgaacttatgtccgtacacctgctcccttgccgaatccagggggttgtgcttctacttgttattgaagcttgagctctggcagctggcaagcatggacagacggtggggatgatacggaaattgcgcagttgaaggagggtggtaggtgggggtgatggtggtgctagggcgctaggcaaatcatcgccacccaacttagagaagaggagaggtggggagaggggaagagaaggagaatggccaacagagcctcgtcggtgctgattagggggagggggggagagcgtgctacgcaagtgagactgtaacactggatgaggaggtgtcactttgataggagaacgaggagtgcagaggaaagataaggttatactgccgtttaatattgattgagattggtgatttacttgcaaattttccatagccagtcccaaaatttattacagtatatggaatcgaactgtttaaatgtgacccacaaaagaatgtcgggcatgagggagcctagaaaaagagaaggaaaaggaacatctctggtagggcacattcctctctccaatctccatggggcctatcacaaatccgaagaaaccacaaacagctggccagccgaagaacaaagtgattgatttggtagcagcaaatcaacaccatcattgcgcaggaggacaacgagagagattattcgacctcctggctcctgctgcgtgtccggcccgaactaactaaaactatacactaaacgcaacacagctgggaggaggataggagaacttatccagctactactggtcactgctggttcggtggttcccgggacaagaagctaggcacattctcctcccttttttcccgtggcgagacgaggggccctccgccattgccacgcccatgctgctcctcgagggaccagcgcgctagcgctcgcgtttgaaacctttgctgcgtgcttccatcagggagagaggatgatgcggcagctagcagcaatcagccaagcaagcatgcatgcttgcgcaggcaacttttgttttcgcgggcaaagcgcaacggatcgaccgatcgatccggtggtttcttgggtgcactactgcgtaggcttgggcagctgggctgggtatgcagcagtacgatcgtacgtagggcatgatctgaaggctgaagctgccatgcatcagacgagttcatcatggtgcggcatgccggcatgcagctcgttacggcgacggcaacttgggccgtgctaggtttcatgggctaatgtttagccttgaccttttagctttaaattagccctcagagcagactattagccagctataaacatattctaataagataaaagatgagagagaagagcagcgggctatagatttgtagccagctgcagcacggactccaagacacagtgtgtgtatgacaggtgagaccatatattaatagtatagtaagcaactattgtatgaattagctattagattggttatagatgaattggagccagtagtggcctatactattaaacttgctctcaaggatctaaacaggtgggctaattttgagctaatatgaattagcctccctcaaaacattaccctctccaagggacgctaatggggctaattttgtgttgggaccatcaaaatcagctctctctctctccttccctctcctatctttctactctctctctccaccttttagccttgaattagcccatggatccaaacatgccaccctaggctaatgtttagcctactaattcatgactaaacattagctctcaaaattagctctgggctaatcttccaaacagggccttaggcctgggttcagcacgtactcttctagtagtctagcactatactgtactaccaagggatttacagcttttctttttagggatttacagctttaattagaagctgcccaaacggttcagcttttgatttaggccgagtttagatccaaagtttttcttcaaactttcaactttttcatcacatctaaacttttctatacacaaacttccaacttttctgtcacatcgttccaatttcaaccaaattttcaattttggcgtgaactaaacacacacttagattctaagaagctagccagaagctaaaaaaaattagcttttccatattctcaaaagctagataccaaccagctacttctcataatcttaagctctcccaaataggccctctattacactaacacctcacttcccagcttcgagggcagcgacagaagacttctcaaattcttcgaaatagtaccaagcacattaattcaagggccatatttttcccttatcaaaatttaaatcttaaaacttacttttttagttaattttatttttttcatcacagtttcttttcaacattaacgtttaagtcactaaaaacacatatgtaaatattttaatcataaattatttttcatcgctattatcagtaattggccaaccgatggcaacccaaaacttcaccgagcatatatgcattgcacaattgtatcacttgtgttgttagggtttcctttggattattgaaggattttcagatgaaaaaatcttaggaatttttttctagggaagttgtttgttttgtagaatttggtttggcaaagtcctttggaattcatttcctatgccctaatttcaaaggattttaaacatgggtccaacctcatgttatccgtttcctataaaaattccaaagtaacatctctctttcactctctttatcttactcaatcaaagtaatacattaatttccctaaaaactaaagtagtacgcaatcttaaaattcctatatttttttctaggagccatccaaacatatgctatgtacaagcatgtgattttatttctcatagggtccaaccgccacaacatttcaatccttttttttattcatgtgtttttagaatgatgatgtgttcctaagaagcccttattgcttacttctagtactactaagagcactatctatttatagtaccgtcttatctgtctggtatttcctctatcctaaaatataacaacttatagcacatataatttattccaaaatacaacaacttctacaccaacattctttttccaatcaataacaacctttcaccattcacttttcttatatatctctacttctcaaccaatcataactcatccccatttaattatacataatttcttaataatcgtgttcaactctaaaacttcttaggccatccctaaccatccatgtcatctagtgtccataccgttaaatacattgtcacatagcaaaaatccgatgagataagagagttaatgacgatagatgtaaaaagatgaagaaatcattctcatgcaagaaatcatctatacacaagaatcaagaatgaaaacaaatggataggtggataaaaggagagagaacagaggtgattggataagaattttatttgaaggcaccatccattcagtggcggagccagaaaatctacacgtgtggggctgaattaacgggaagtcaaatattttcagaattacatggtatttttcaagattacaatgggaatcatggagctagtcatggggctcaagccctagctgccccatgcctgtttccagccctgcatccattggatatatagtttctatacatggtgtttatatgatacggtaatatggaactacttgatagtttctgagttggggatgaccttaatatagtattgtacagaagtgaccttaatatggtattaaataggagtatgttgttgggaacggtgatgaaggtagtgcaatgcaccaaaggatattggggagtcaggcaatactccctctgtaaaaaaaatcaaatctatttagattcatccataggatttgattgttttcgggagagagtgagtcgtcattagcaatagagttcaaaattgcaggcaataatcattcgtggtagagttcaaattgcaggaggaagaacagtgcacaaatataccaggaactcgtcctagccgttttattgaaatccgatccgattgcccataaggatagctacagtaacgacgctgcatgctatacatacatggatgcacaataaactcagagtattgctacattgcattgctacattgtctctgtagatttctgtcccatccgccacagacacactgttggcacactgcttctctgccgtcatagccagatccacgttccaaaccggcccttcacccccgaacaacaacaggaggtctggtgacatcgaatcacaaaacaatttcttcttcttctctctctctcttttgaaaattcacaacaatttcttcaatattgaatactcctactactactcctactgcattgcagtgaattttagtatattcagatcaagaagcacactttcagggagaaagaagaagacaaatgctgtttcctctttatggcaattgcgtgcactgatttccctcctaaattttaagcgatccgtatggaatcagaatgtttggcttgggcaaaagtgaagccgggctggcttttatcatgccagtgggtgactttggggccctttcctcatcattcctggaacatatgtgaaggctggctaccaaagacccacacaaacgcacagcacaggcattctttgtctgcatggctgccttgcgctgtgcttctttgaccaaactccaagccaaaaacaaacgcacacagcacactagtgtataatactagtagtaataccttgacaaagcacaagtgtttattacatgcatgccttgttcatccggttgatcagaggtgaagcgcgattaactaatgcacgtatcaaccgccgctaatacgtgccaatcttgctctttttgagctttctagaacacgtccaagttgagcattgtttcagtgaagcagtgtgctaaattgaatagcagtactccggttaagataattaataggcgggcttgattcgttcgttcgctcgcgggctttgctcgcatttgcgacacaagcagtgcagcccagctaagctagctgttactgttgcgaagtgactggctccttgtacagttgtcctgccgtttcaatctctgttagatacactctccccttgtctctctctctctctctctctttctctctccaatgtccatgaagtctgtggcaaaagcagccttctttcagccactctgggcagcatccagctacatcgtctaggcagcagtagcatatggtggaacagagagaggaagtcctggccatcctgtccaatggcaacttcacaattaaattcttgcatctttatgggggtgcttgtttgtgcttgtgtgctttgaacagcatggtgcttaattgcctcgataagaaaaggagagggggttaagcagctaggagtaccagtggtgttcgtggcttcatgtcatgcaagagagctcagctcacagatccctatggagtggatagctatcgtgggagaggccaagaacaaactgctctagattttgtatcgtatcctcgcgttgcattacggctactactgctgctgctgctacttatccaccgcttttttgctttggccctctcattccttttgcagtttttttctgctcagctcaccgggtcccctctctcatcttcctcgtcgtgcaccttgcatggatgtagaagtagcgagctagcgcgcggcgactgcgagccgagagagcaacgcaagaacggcacgagaggctggcagcgagcgagcgtgtgcatggttggtgcgagcaaatggccagcggcggcggcagcagcaactggttaggcttctcgctctccccgcacatgccggccatggaggtgccgtcctcctctgagccatcgactgctgctcatcatcatcatcatcatcatccacctgctgctgctgctgctgccggagccatgtcgtctcctcccgacagcgccacgacctgcaacttcctcttctcccctcctgcagcacagatggtcgctccttcacctggctactactacgtcggcggcgcctacggagacgggaccagcaccgccggcgtctactactcgcacctccctgtcatgcctatcaagtccgatggctccctctgcatcatggaaggtcactgttcacctctcccttctctctcgatcgatttatataatctttgtctctgacattgatcttcttggtgtgaagtaggcatgatgccgtcgtcatcgccaaagctcgaggacttcttggggtgtggcaatggcagtggccatgacccggccacctactatagccagggccaagaagcagaggatgcaagcagggcggcctaccagcaccaccagctagtcccctacaactaccagccattgacggaagcagagatgctgcaagaggccgcagcggcgccaatggaggacgcaatggcggcggccaagaacttcctcgtcaccagctacggcgcctgctacggcaaccaggagatgccgcagccgctcagcctctccatgagcccagggtcccagtccagcagctgcgtcagtgcagctccccagcagcatcagcagatggcggtggtcgctgcagctgctgctgctggtgatggccagggaagcaacagtaatgacggtggcgagcagcgtgtcgggaagaagaggggcaccgggaaagggggccaaaagcagcctgttcaccggaagtccattgacacgtttgggcagaggacatcgcagtataggggcgtcaccaggtaatctgcttacaaagattcagcttttgtgtgcatcatgtatcatcagatcatcatctgtgagctgtttgcacatagggtgtagaggccggaaggttccttccttgttatctgaaaaaaagagaaaaaaaaactgttcttgccatggttcttgtactgactagttggcttaatgtgtttttagttctatctactgataggcatgtgtgatctcttctatgtggcatttgatagtttggttagtacacacttgtacattgctgtttttgagctaatcagttattgctcggttgccatttcttgttgtcactcctactatactagtagtaatagtactagtttccagcattgatgagttcttcattccttcttacggctctgctgctcttgttagtcagtggggcgtctactgtttcttgattactactactaataatcagtttaatgcataacgctgcaatggttggatttattctctagaagtacctcttattttggtcctttgcacaagattatggcttggggtggctctgttacatctgatgcctcttcagttccttgtattgatgaggcacctactcttttgtttttgagcaaatcatttgaccctttttatattgaatgacgaaggtttgtgtgtgtttgattcactggagcaggcacaggtggactggaagatatgaagcccacctctgggataacagttgcaaaaaggatggacagacaaggaagggaaggcaaggttgaaccttgaacatctagtactactacaacatcaaaatttgttcatcttaaaaatcttgttgacaatgtcattctgatttttatatttcatcatattgggcgttaccatgaccgaaatttgatcgcttgcagtatatctaggtaactgttgccccttacaatttctttgttctcattgtacttatattttgtatctgttgctgacctttttcttcgtgttcgttaggtggttatgacactgaagataaagctgcgagggcttatgatctggctgcgctgaaatactgggggctatctacgcatataaatttcccggtatggatgatgaaaccgtgtagtacggtgggatatgggactttgattggagtatccattttctgtaatgtggactaatttattgtgtttggcagttagaaaactaccgagatgagatcgaggagatggaaaggatgacaaggcaagaatatgttgcgcacttgagaaggtcagcagcatgctcattttgcctgaattctatgattagattattatcagattgatatgtactagtaacaagctgtttttttaaaaaactatatgtactaacaagctgttcctgctcacaggagaagcagcgggttctctcgcggtgcttccatctaccggggagtaacaaggtgtttcattttgtgctgaacaagcatatgcatttttcttgataattatttcaagaacacattcgcatcaagatacaatctcactgtgttaaatgttaactgcattgcaggcatcaccagcatggaagatggcaagctcggattggcagggttgctggcaacaaggacttgtatctcggcactttcagtaagaaagacagtgtactctatttgatcttagaatctaaacgctttcacaaagtaatgcaccataaccataagtcattgcagcttttagcactaacattaactaactagcgttcctttgggatgtgactatcgatgatctatggaaattgtcttgtcaaagtagatttgccaaagaagttagtagtagacatcaatcagcagcttttactgctaatctctagtattgtcttggagtactgtacatcgttgatgcatttctttcctgatcattctttgcttttccagatggttgttcttttcataaggctgtgacctctgaacaaagcaatcagttgactgttttaactctcctttggactaaaagatatcattatcatgatgcaaaaataaccagattgtaaattgtactttgcagtaggatctacattggtttttggatgtataaacaagatggccttattacaacggagcgtttccattggttaatctatttttatgcaatacaggcactcaagaagaagcagcagaggcatacgacattgctgccatcaagttccgtggcctgaacgcggtgacgaactttgacatcacaaggtacgacgtggacaagatcatggagagcagctcgctgctgcctggtgaggcagcgcgtaaggtgaaggcgatcgaggcagcgccggaccatgtgccaataggccgcgagctcggtgcgaccgaggaagcgagcgctgctactgtcacgggcaccgactggagaatggtgctccatggatcacagcagcagcaagctgcagcgtgcaccgaagcaacggcagatcttcagaagggcttcatgggtgacgcgcactcggctctccacggcattgtcgggttcgacgtcgagtcggcggcagctgacgagatcgatgtcccgggagggaagatcagtggcatcaacttctcgaactcgtcttcgctggtgactagcctgagcaactcgagggaggggagccctgagaggcttggcctcgccatgctctacgccaagcatcatcccaccgccgtcagcctcgccgccatgaacccctggatgccgatgccggcgccggccgcagctcacgtgatgaggccgccgagtgccattgctcatctccctgtttttgcagcctggacagatgcttaattagagccatgttgctgcttgctcgatcttgcttttgatcggctctttttgtaaactaaagcaagatcagcagcaatcaggtgcttatggtacttaaattagctggaagcctggagtagcatacttggttatgatggtaagcactaggctggtggtgtaagtgtttaaccagtaaacccataggtaggacattcaagcaaaatccaaatctctagagcatccactggtagtagtagtagtagacctttagtgttagaccggtagtgttctttgcttcttttgagcctctttttttgggggaaatttggttggaatgtatggctttttaacacgaaatcaggaatgtatggcttttaacacgaaatctggctgtggcattaaaaggaaaaggttcagtgagagctgacatggtgtctctctgctggttcgtttcgttcgttcattcattcattcatcagttaagttggttttgtaatcagtggggtcgtggggaattcactgcaggtatgatcttttgaccggagtcgtcgtcccagctctctgtctctctctctcgtgttgcattcttttgctttctctgcatggcacggcatctcttcatgatggtgacgagaatcataaacattcccttctttttggttggggaacgttgccacaaggcttcctacattccagccccaatcattccaaagggtttctcctgcagattcccacggcaatgtttccatgtcccagcctacagcttcatgatggcatggcctgtgaaggtgagactaggctgacatagtcctcgttttgcttatgttaattacttccaccctcccagaatgtaacaatctagggcccgtctcatgtctagatacattttcatcctattttggttgctatattctgggacacaggtaatataaaccgcaacaacttattgttgaagatgagactgacatagttatcgttttgattaggtttattataaaccataacagattatcaataacttgaaaagtaaataataaacgatacttatgtatgtttatagcaatttaaaagtaaaatgctgaaaaagattgtaaaattactttaaaatttagagttttaaaatttaaattttgcgatttgcttataagctgaggggttccccatcgtttacactctcttcgtatatttttttttcgcgctgtacgtacgtcgttgcatgaggataaggggcttaggggagtcggagttgcagcacgttgtgccgcaatgatgtcaatgatggcatgtaccggaatcttggcggtctcttttaccatgtcagtgtcgtggcggcacagggaggcgtttgacccttgtacattggctgcaaaccgagagcgggcgataccccgcaacagtgacgcgcactatctccccccctttgcctttggcgcttgcttgcaattgcctttgcctctccttacgcgacagcctgtgccgacaggcgacagccgcccgagatccagcaagcgccaagtcgaatttagccaaaagcagatgtacagcttcctccctagcgaaccatgttgctcgctcgcagagtcgcagtcgcaggctcgcagcggcgcacagtcacccgtaccgtgcgtcctcctagcgaaccatgtgcttgctcggccccggcgtcaggcgggcggcggggcgacgggccccgcgccgctcgctcgagcaggcgcgtgggtgcggtggtggcggggtcgggggggtcatcgtctcgatcgcgcgggcgtgtggttgcacgcatgtcatgtgatgggcgggcgcgggcacacggtcgcggtgttccgtttcgtcgttggcgtttgtagccgctcgcgaggtgacaagcgaagcgaggcgggttggtttggttcgaacgcgcgttttttgtttgccgcgcgaggggtggtagcagcatggcagggcagcgtgctcgccgtcagcagacagagcgcggtgtcgtcttgctgcgccccccgcctgttttgtcgcggcaggatttttgcaagttgcaacaacacggttgtgtgagggttgcaacgggagttgtgattttcacaggggggaacagcgttttgtttgttcggtgattgattcaagagtgcctcgtctgtcttcacagttcctgctcgttccgtggcaattgaaatctgccccaaaaactgagacaatcacgtgtcaccagttcggtcatcaatagttggcatctctatgcccgcactatagtagtagtagtacgatctgaaaactttgacaccgtaccaaaaactcgggggtgcccggttaatcgagcttagatttgcttatttacctggctcgtcctatcgaggctgaggaaacataaacacagcctgtgatgcatgatgcacgccagccgtacgtgtacgccaaccgtgtcgccatgcgtaaaagcgtttgctcgcgggcgagatggcgtctgggtccgccagcgaccagacggtcaaccactttgattacctctgcctttggcgttgctcgtgagaaacgaaggtttatccttctgcttcacgtcgcaccacacgtctatcaatgtccttctcgcgctggacagattcagtgacttgacacaaagtttcatctcttccttttttttccagtaaaacttttttctttttttctgtttcgagaggggcccccgtttgtcatgaccgaaaacagaagaacccggcttgaaagcccatcactgtttggctggtatagccgaggaacaagttccctttagttccctcaatttagcgtacagtctgattttcgtccttaaccaaaaccatataaaaatatacaacccgtcctctaactcacaaaagtaatgcaaacgagatccctcgataatactgtcttcgattttagttgacgtggtgcctacgtaggttctttgactatgtcttcatcgcacttggcatttacgtgacgcttacgtggtagtttgatccgaaaaaaaatagcaaaattgaatataaaaaatatacaaaacatatcatgttggatgaagacctagggttggtttggtttgtggcctaaatagaccttaccaaattttgttagtgctaaattttagcaagttttggcatgactaattttggtaaggcaaagttgtgtttggattgaagtcaaaataacctaaattcactattcaaatggcctattttcttagtcatgctaaaatttgacttcaaaccaaatagacaataaacactattgaaattgtcaaatattgataagcctaatttagaccttaaaccaaaccagcccctagtaaaaaaagcaacgtaagtgccacatgtcaatcaaatttggggacaaaaaagtagtgccgagcgacctcgtttggctggtgttgtaaattggagggtgcgttatcaagttttgttgttaaggaacgaatttcagacatagactaagacctaaagtgaacttattcctatagccgaagtcattagcttcataaatgggccattcggcccatcagatcagctagcccgtacgtaaccctacggcccaaagctacggttgcctcctcttcagaaccattattgggaaaattgtaaccattccataatatgccatcttaacccacgacttatggagtcctatatgtcattgagatactgatggcatatgtcgggtagacaccgcttcagcctctgcccatccaactcgcaaaaattccccacgattccacgaaagtaggaaccatgaagcttcggttgcgatccatggaccagcgcggcggcgccggcggcgccgccgagacccaccgcgtgcagctgccggacacggccacgctctccgacgtcaaggccttcctcgccaccaagctgtccgcggcgcagcccgtgcccgccgagtcggtgcgcctcaccctcaaccgctccgaggagctcctcacccccgacccctccgctaccctcccggccctcgggctcgcgtccggtgatctcctctacttcacgctctcccccctcccgtcgccctcgcctccgccgcagccgcagccacaggcccaacccctgccccgtaaccctaaccctgatgtcccctcgatcgcgggagctgctgacccgaccaaatctcctgtggagtctggtagctcctcgtcgatgccgcaagctttgtgcacgaatcctggcttacctgtcgcatccgatccgcatcatcctccaccggatgtggtgatggcggaggccttcgccgtgatcaagagcaagtcgagtctcgtcgtcggggatacgaagagagagatggagaatgtcggtggtgcggatggaaccgtcatctgtcgccttgtcgtggcgctgcatgcggccttgctcgatgccggcttcctctatgcaaacccggtggggtcttgccttcagctgccacagaattgggcgtcaggttcttttgtccccgtatcgatgaagtacaccctgccagagcttgtagaagcgttacctgtggttgaggaggggatggtggcagtgctgaactactccttgatggggaattttatgatggtgtatgggcatgtgcctggggcaacatcgggggtgcgaaggttgtgcttggagctgccggagcttgcgcctttgttgtacttggatagtgatgaggtgagcacagcagaggagagggaaattcatgagctgtggagggtcctgaaggatgagatgtgcttgcctctgatgatatcgttgtgtcaactgaacaatttgagcttgccaccgtgcttgatggcgctgccaggtgatgtcaaggcaaaggtcctggagtttgttcctggggtggatcttgcaagggttcaatgcacgtgcaaggaattgagggatcttgctgcagatgataatctttggaagaagaagtgtgagatggagttcaatactcaaggtgagagttctcaggtgggcaggaactggaaggaaaggtttggagcagcctggaaggtttctaacaataagggccagaagaggcccagtcctttttttaactatggctggggtaatccttatagtccacatggctttccggtgattggtggggattcagacatgctcccgtttatcgggcatcccaatctccttgggcgcagctttggaaatcagcgcaggaacatctcacccagctgcagttttggtggacaccatcgcaactttcttggttaagtcatttcgtgggttttgctagtatgttaagaatatttcatctgaaaagctacatataacatattgtacatattttatagttggcactttatgcatgttcagttgttaactgtattactgtactcgtaatcttttctttctttgttgatatatcctatattttcttgtagtaccagtgttatgcatgccttaatcatggtaaagtatcgtctgtttaattctctgtgctacaatatgcatttcaaacacttgtaacttgtaagtctcatttgttggatgcctttagtcaatctgattatttcatccatcaacggagaaacaagatactggtcatgttatataccatcatgatctgctgatgagattgaaactgtcacttgtttctaaagtttgcgtgaaataactggaagcaggtggtgtctttctttggtaaaagaaaagtattgtccttatcatctctttgttcttttcgttttatatgctatgaaaagatatattcatcccatattccgataatttggaatacttgcttgccttttgtgctatggcaacttatgcatattattttgttatttttatgttcgtggggggttgtagcctcacaggttgtagcctccatactgaatcgtgcaaaactgctatcctacaaagaaggacaaacaaactggataggctgtactcattaatcaatgtctaagctagtgcgattaacttgggcagcatatggtccgaaaacaaagaaggaaaaggtgaacatatatcaggaacagatcaatagacttatcacgagactataaccactggtgccaaacgaattagcaaacagataataccttagaatttttgtatttggcaataaaatctagtaagaatttgttgagctgcactacaaacatgtatagataagaaatagcatccaaggcgaggatgatatgttgttaagacatactatcgagcaaatcctgtggcaggtttctcttacaccaggttttacctatggtttgtaagtttctacctgattttcattgtatatattattttgtgattacacgaatcaattgtttccttctatatattgctgaaaccgagctgccctgtttaaatgcattagttaatgttatacgttatctgtgtttgataaaaagcttctatgaaactatgaccactgtttgcttttgttttgatcaagctttcagtgcaaggacttttggttgtgcacacgtatgtgacatttagtggattttttaaaatcaaatacattatcagtacttggggctggagcaatctgttccctggggatacttttagcaggaacatgactgaaacattatcagtttaaaacaatatgactgattgtcatttccttattattgtaattgtatttagcaggaacatgattctgaaacttgtgtcttgatgatcagatacatgcggttgtatgatgtgtaaatgcatttactctgaccaaaggaaggatatcgtactagctgataagtatacctgtggtaattatatgcagaagcccgtcacacaacctggtaggtgagtaatatatataagcactctggggaactatttatttctttctagaaatattctgaatagttgttatgttacctgcatgcctaagttaatttcttattccctttgtgtcctttttgtgtttgtctgttactttattttgtacaatgtttcgcagatcgtcaatattctcgtggcttgcatctcaattggatttctccaactgatgcttcctcctaacatatccatttttggttgcgcgtacttgttttatgataaaggagaataaaggagtcatccttttttttttcacttcgacttacgaatatggtttattttcttggttgtcgatgcaccactttatgaatctgactgtagtatttgcttttacttttatttttccttcgcaataggtggcttattatattagtctaccattccctactttgccagtacatcactattgggttgagtttgctgtggtatcatttggttgatttggttcaggtataattttttaagagattttagtcttttgtcctaagtgaatatgggttgcaggatctatatgacaataaagttcttgattttatacagaagcttcacatttacactgcagtcactacttgaattatcaacatttctcactatacatatataatcagctgaacgcctgaaccttttgagatatttgagttatgactagaggcaaaaatggatagtttctttgtaaaacgatatataacaatcaataatggtttttcatggacttctgaagcaactcgacattgatgttcccataccatatttttcttgaggctatgatggttgagtgaaccatatagctcttctctctccatagtccattggagtcttagacctggggggccaaagattgctccattttcttaaagtgggctttatattgaccgcagggagaaatatcacttttttggtgtaggcgtgcatctatctactttgcctacacatgttctattgactattggactcatctgtctttatgttgcataattaaaccatgaaatatctttcatgagatttaactttttgatcacttctctttggactgagactgaaccaccgttacgatactcaaatgggagctgtacggagtgtcacggagtccaagaaaagctacaactttcagtaaggggagtactctttgcttgtggcttggtgcactgaaaagattgtgggggaaggagtatgggaagaaagagtttataaatccaaatgggtaagaatttgagtgttttactgccaggatatctcaatgctatgattggtgatctaaattatggttaaacgttactctgtggttccatgaactttggctgctctatgaaaagtatttagtttcagttccgtgccaaatacagcatttgagtttcagttatgtggcaactaccgttcatacgcagccttatatattttcctcattgttccttttaccaatagtcctgtaaacccgaattcttctgtttcacattcaactttgtcctgcatacagtatgttttacgttctcagcctgtgctattattgaaaggctattgcattgcagtggaggacctgaagcgatactgcatcccagcgacccagctcaattcacgcatccagttctgttagcctcggaacaatagtactcctacagatagctggctgatactgcacaagctacaggcagcctcagcggagtaagtacaagaatccaattcgctgccaacacacgtctgcctgccgctggcaggatgctcctgcagcaggcattcactttgactgtattattccactgccaatcaatccttaccagcttcccccatctgctggtgcctgctgctcaacaactcaagcttcagcatcagcaaaagatggtggcaatgtactccagattccaaagcctcttgaagtgaaacagcacagtgatgaacttctatgattgacacttgggcaccctgctttgagctttgccttttgctctctcatctgctactagtagcatgctggaccttatccttatgcaacacaagtaatatactaacaggtattgcttgttggagaaggcctaaccaggaccgatttttaagccaaggtggataggataatcttgtggcaattgaaatctgcaaatgtgcaactagtcttcttcatgaagggaagttgtacttctgctatgcttacaccgaggtgtaatcaaataaagacactgggaagctggtggaagcagcagtggtggccttctagtatcttttatttcacccctcctgtcctagccacatgtctctgcatgcagccactacatggtgaacactattcgttctaccataggctggtgagtaactaacacctctgatcaagagaggtggagcagagaaagtggcagcagccctcacccccgactggtaataagaactctccccttccatcctaaatatatatcttgttcaatattttctacatcaattttatgcattttggcagaatagtttctttgtagacagtgcattgttttttcccttgatgaaactacagcacaagaacattattagctgtttgctcattaagtgccaacagcctttttactgaacggtttctgtgctccatccaagtccttttgcctctcctcaatctacacattaaagaaaggggagaagtttcaacgttgtactaacccttgtccttgcatctgggatcaatcaatttctcccttctgaatttcgagatagcccttaaactgtcatggtagaagctctgaattggtgagtagtacgaagtgtcgacagcctgtgtaaaatcgggcagtcattgtcgtgcttgacagatcatttacagtgccagcaccaaattcggatgatggtatgtacgatactcactgttgagagccgaagaatccctctgctttgctactgataacaatcagctctctttttaacttttatcgatcatagaacctaatcacttccctggtttctctgatgatttcatcgaagctttgcacattcttagctgttgctgtctttgttgttctgtggatctgattctacagaacgaacttctgacatttccattcagatttcagagcgacagtttgaactgtgtaacaactaaccttctgtccttgttacctctagcctcacatccaccccagtgaatacgcaatctgagtctttgtgttggagatttcgtttaattacaaattaaaaagagaggactaaggtttagtctgtaacattaattaccacacttgaaacgacgccttacatctaggcactgccactgaaaggtgggttcccttttctcctcttatgcaagaattgttgaacatgttaagaataagactttgaaactaaaaacttgtaagttgggtttatcagaaaaaaatggtgaagaagggtattaatccagtagtacaaaatttaagagggtttaaggctttaagcaaagatggatctggttcattaattaatcattaaccttattctgggctggcccatacagtggatgacaatagcatctgttctttggtttggtcttcattttacagtaccacctgcaatttatcttaattcagagaattttattctgattcatggatgtgatccagctggtgcatggttgttagcagtaccgacaattctattccaggactgtggtttccacctttgcccttgcgtttgtctattgcattaggcttacttaacttttcactttggacaatctttatgtaaggctgcaagggttagttgttccttgttgagccttgcaagaaattgactgccacagctcccgatctaccctaccctttaagtaaagcccattcacttgtcaaagctgacaatttagaaggccatcacgcatttcttaaaatgattgcaatatcaccctgagatcaagtatcaggcacaaggttggtggcttgtttaatttcttcatatgtatgttcttgggagttgggaactagcatctatctaatctagtacacactagatgacttatctcagagagttgtgatataatggtcatcatgtgattgatcatcgtttcttctgcagatgtattcccctccctgcagtgctgctgcaagcagccaagggcattgtttcgcggtcggagctaaccagcttgcttcgcttgaccttgccatggacttcgacgagcctatcctttttcctgtgcataatgcaagtttgcaagaggggattcagttttacaatcctaccggcggtatgtctctctcgttacctatgttctattttcaaggataaccacagtatcctcctctctttttttttttcaattagataaccacagtttcttaatttgtgaagttcctaactattacagtttccgtgttccaactccccagatactcagctaagtagaaacatgagcattgacaagtgtttgaagggcagtaaaaggaagggctcaggcgagggcagttcatcgctacattcccaagtaacaagttaattagaagctctctttgcttagcttcatcgggtgggagcacgtttcatcgtgaaaatcgtactactgcaggaggaaaccggtgaaatgcctcagagagaactcagcatggagcatgccggagagaaggcgggtgatgctgacgctagcagggaggagtacgtgcatgtccgggcaaaacgcggccaggcgaccaacagccacagccttgcagaaagagtaattgatctctccaacattaatggaagatctttctgtgtatagattttcttgctcacacagcttcaccatctgaatgcagtttcgaagggagaagataaacgaaaggatgaagcttctgcaggacctcgtcccaggatgcaacaaggtagcaacgaaatcaataactctttgagtctgtgatggtgtggtgtgctctaacctgtgtgaacatgttgctcttgacaaagcagattacagggaaggccatgatgctcgacgagatcataaactacgtccagtctctgcagcgacaggtggaggtaagtgtcccgaaattacacatcttgtcaacaagaatttacacttctcaatgccaatcactgactgaactatccatgaagtgcttatccgtgccgggttttgcagttcctctcgatgaagctctcgacaatcagtcctgagttgaactctgacctcgacctgcaagatgtaagatgaaaaaactccaactctgaagaacaaataactcatctatcaccattgctacaccttgatcctttctttttcactgccatacagatcctttgttcacaagatgctcgctccgcatttctgggatgcagcccgcaattgagcaatgcccatcctaacctttacagggcggctcagcaatgcctctcacctcctggcttgtacgggagtgtgtgtgtcccaaatcccgcagatgttcatttggcaagggccggtcacttggcttcgtttcctcaggtctacatctaactccagtgaatacagtagttcaaatccttcagaacagccgagagttattcatgttttctttgctgcagcagagaggcctcatctggaacgaggaacttcgcaacattgctccggccggtttcgcttcagacgccgctggcaccagtagcttagagaactctggtatttttcagagctccactgccctacttgctttttttaaatacatttcttctgcagctgaaattctggcgatcgtgatgctgcagattcgatgaaagtggagtagctagtcagcagctggtgatgaacaattgacacgcctgaaagtcctgaaatgatcgcgcgttggactgctaatggagggatgcactctttcaggtttgcaaaggctgcacacaggtttccattggggtgagcgaatttggtggtcgtcgaagttctcgaggaaaactctgtagcctaatcattgtacagtttgactaatcgaaaagatgaaagtttgagatttggtgtgttgtactgtttctgcttggattggttgtgtaactgggtttggtggcaaatgggtctacttggattattgccataaaatttttgctacgatttcttaaaaaaaaaaactttttacaacgaatttgtttagactacttgtgctaacctatttattattccctttatttcaaaatataggaactacaactggattaaacattactcctaagatcacgaatttggacctagattgtgtttaatctgatcgtaggttgctatttttaagacaggcggggtaggttataatatataatattcaatttatcattaaaaataaataagtagattgtccatcgatgtttatttacatttcatctgtttgctcaatttcaaattatttgtcattctggtttgtcttgagtcaaatgtttctatctttgatctctacttatagaaatatgtatattttaacaacatacaaaatgtatattatgaaagtatttttatagtgaatctaaaaaggtaaatgttatgatgttaaactataccatcaaagatacacttaaagacaaaactcctaaaaaacaaagtaatataaaacagcgagtgattcaaatgggggcttaggatagatcttgattgcttacgaattatggattattgcatacatgttctccaagctcctaaacaatacattttctgaaaaaagacatttttatcaacatttattggtaaacttcttttaaatcaaatcatcaacttttctaatatttaatttttttatttgtgccaccgaataatggtcataaactcgatcagattcacccattcatctaataatacctataagccgaaaaacatggccggagtaagataaaatatagggtaagacgtttgtagtttcactttcagtggtccaaatcttatggtaagaatcgaaagcgaggaaaatgatttaattctaaaattaggtttcaaaaattgaaataggacgtgattaaaacaagtaggtaccatttgctaatgaattgattatttgacatatagttattattgtatgtacaggttttttaggatttaggaggaaaaaaatgtttgttttcaagcctcaagtataaaagtttgggattgaaaaaaaaagggaaataagaaaacatagaatttggatagaaatatatgtgcaaaacatataaacatatagaaatgatcgtttgaatagaccatagaaaaaacataggaatagaattagagagataagtcttaaagaaaattcttcaagagttggaaatttttgctaacttcttccacaatcttcatagaattacccattctatagaaattttaaagaaaatgataatattttgtttcaaaggttttcttaggattttctttttaagattgaaattctttaatttttctatgttcccctataaatcaaatcaaaggagcctttaatctggcttcaacttagataaggatactggaaagttgttatctatactactagtaatggtggtgtccattctatcattcacccctaccactaatatttggatcccacaatttatattattactagaaaaaatgcccgtgcgttgcaacgggtaaatgctattttaattctattattgttataactaggataaaatttattgtgggaattcacttggatattttttcagaaaatcatgagctgcaattagaagtctgtatttcttctcaagttagcatgtgagttttttttttcaaaaaatttcttatatgactcattttatacttctaaaaggaaacaagcttaaaatccaactcaaatacaaatatgtatttcgaaaaacgaaagaaaattaaaaccgactcaaatacggataacgtaccaaaataccataaaacattttcaattaaaggaatcaagcttaaaatccaactcaaacatagatatatatatttccaaaaatgaaagaacttgaaaaccgactcaaatacgaatgacgtatcaaaataccggcaaaaatatttttaacttttataataggagagatatactatcctccaatgagtcatcctgtttcactgctagctctccctaaattttgaaatcacatacttattcaataagaaaaatcataaaggtactgcttgtactaaatacgtgcataactgacttgataaactacaagctcaatttgtttttcgttgcaacacacaggctcttggctagtaaaaacaaataatggtggtgtccgttttaaactgcttttcgatttagctgctttcttatctttttcgttagcacatattttaaacttttaatcgatgtgtttcatacggaaactttattatagcaaatactttaaaataaaaaataaatataattcttaagttttaaaattttgatacttaattaatcgtagcctaattatctctctcgtttttgcctacgaataatcagccgtttcaccacgcttactctctgagactgtgaccgagagtaactgtaaagaacctgaaaaaagtatagagataaaaaaaaggaagaaaaaaacacacctgctttccaatcgcagctgcctcccatggcgaccaccgcctccctcctccctcctctcctcccggccccttcctcctccccccgccacctccacccctcccctcgccacctccgccccttgccaccgatccgcctcctccgcgccgcccgccgccgccaccccgacgccgtcgtcgtcgtcccggacgcccgcccctgggtcggcgacctctcgggcgccgccgcgtcctaccgggacggcagggaagaggacgacgacgacgcgggggaggaggatgacgaaaacgacgacgacgacgaggaccgcagcctggacctcctggtccgcttcctgcactcggtgttcaggaaggtctcccgccgcgcgcgccgcgccgccaggtccgtgctgccgccttccgtccccgctgagctggtccgttcaacccttccgtttctcccctttggtttcaatcttcttcttgttcaaattgagcggatccttctctgtattgtgtgatctggccttgatatgtttagtttatgcttgtgcaggtgaagttctcggtcaacggcgtgcttgttctcacgtttctatgggtcctaaaggggctacttgaggtgagcaattcatttgtctgaggcttgtttcaaaattgtgagctgattgtgatcatgcccttgatatgaactactaagtgttacactgtgatactatccagtggaggattcaggaattttcttgagcctggtcaaacctagtgatgtataacaagtacataaaaaatcagtatagctccatacttccatagaccatatactatgaacgcaagcaaaaccgacagctgccaagttgtgatttaggaagagcaaaaccagtacgtacgagagattatatcgttgagatgatggctgtctattgccaatgggctagactatggggctattatcatcctgacaaatgtggtgatgagtgctagcttagagttgtgtcggtttgaccctcgtgcagcaaacattcaaaccggcatatcaagtagtttgcttggttggtttggctcccattcgaaccagcagatcaagtagtaattgatggagtgctgtcttgctcatgtgctgatcgcagagcctggagaccagccacagttgctggggcttggctcctccgctgatactaacagtgacatataatggaataacattatatgtccagagaacaaacattgtgcatgcttctgaatttcatgtatgtccagagaacaaatgggtgttctaccttcgttgtcattcgcttagagagtgaagaagacaatcagtgtctgattacatgctgatatgacacttttaaatgtttgatttgagttttttcccttcattctgatgtctcgtaaatttggttttcaaattttggtcaaccaagtttgatgaacatggatgagaaccagacaagtgtatatgataccacaaaaaagattgtccttttctctaactgtcacgtgtagatgagaatcctcactttgttgaagtgatgccctcttttcccttgtactagatgcttgctcccagttttgagcataaaacaaaaacatgttctagtacagagtatataataatgtgcatatatactcagagtagggaatggtgcacatcagcacatggttcaatcattccttattgattgtctactctttgattggagtcatgcttatgatcaataaacagttatgctttcaattcagaaaattataaaaaaaaattgtgatgaaataacaaatactccacatgcattacaagtacaagtttgtttctgggagacatacaagtagtttagaatcatgagattacttaatgcttataatggcgttttcgatggatgaattcagaccaaatgagaatgaatcttgtattcttttgcactgacactttcagcaaatttcatttcttagcattctggtagtttggtcatgtgatttacctctggtgcttttggaatacgagttttttattcgttgtaacatttcctattgataatagatggaaatggttcgtcttattaagatgattctctttagtgaaattatgaattctgtttagtagagaaagagcctactgctactgctgtcaagtttgatcccatacccaccccaacccccagcgtctggcgggcttccccttctggatgagctcggtccaccgctatcctccacaaggtcgtgccattgtcctccgtcgcttcccctccctccactcctgtcgcttgccttccccttccttccgtcgatctgaaggcagtgagcagagaggccaaggtggtggctgcaaggagtagatggcgatgtcgcctggatccaagagagagagaaggggtaagaaggaatatatgctggcaaatggggacagtcggattttgtaaaattatttcataatcttgctgagtggattgccatgtgaccaaattaacaccatgtagtatcaaaaccactccgttttttgccaggggggtaatttgtccagattcaatagcttggaggtgtcaaatgtccggtattgtagtgtagttcgcgcagggcgggtgggtgtggggtgtaaatcgtacggtcctaacccttataattgcatacaagcttaaactacaccctggttctcaagcagggctactgagtactgactgttactctcttcaactgacacccctacacactgtcttctagtgccatgcctttccttcagtaactgtttatattgtttgtgctcaggtggtgtgcacatttggaagtatggtgttcgtgaccatccttcttgttcgtggaatatggtctggagtgacttacataagagaaaaccgatatagctatattcgccagattgataatgatgacaaccgatggagcagagtacagactgctggctaatcatttgatttccttgactacatacatacactttgcaccaaagggatcatcagtaaacctttcctcactgttaagacagcatgctaccagttcagcaccaactgccaacagctgttgctatacagcagagttgaacaagaacaaaaggaatcccatgtattcgtcgaataagtggaattttcttcctctgcacaaatgcaggagggatggttgagctgaacaagattaatacgcgtgtaaaacaatccagcacactgatgaatgagagctgctgctgtgatgcattttctgctactcttttcttgaagagatgtatcggtccttattagtgtatgtattgttccatgctgttacaactagccggtgtagaaaaactcatgtttgttgtattgaaaggtggtgcacgatacctttttggttaaaaagtgaatatcatttcgatttcatttgaatctctcagagaaatatgaatcaagtagtacgtcttttggtttgatacctgaattctgaagtgattgttctgggatgcaaatgtgcaacgaacctgaaatagaagccccacatccggattagcttcagatcatgccggggcgatggggccggacaactgtcttttgatcggcaacaggttgtcggatcttcggtttcgtcctggcttttcgttgctcattcgggcatttttcttcgtcggcgtgcccgtttgattttcgtgcttcatttttatggctgcaattgcaacggtttgttcagcattacttgataacaatgacgtctcaaatgcttagtgggggaaatggtacagtagtatataatttatgggccttctcttccaacaaaaagtttcaacgtcctcccccttaatttgtaatcgccgtagtgcttgccgaattgcagatatgtcacatcagatctgcgtggcatgcactcgtgcaaaagtccagggctccaggttggagttagacaaggatcactccacgcagaccaaaaaaatagaaaagaaaagggaaaatgcagttcatttgtctcatgtccttttgccttttgaacctggcccggcgacgtactaaacggcaaatgcatggctggaatccattctttggtgggttcttctctcatttgccaactttgttcttttgtttttcatgtgtatattttttaactgctaaacagaatattttttaaatatatatatatatatatatatatatatatatatatatatatatatatatatatatatatatatatatatatatatatatatataggaaagttattttaaagaatcgtactaatctagtttttaagtttttactaatatttaattaatcatatgttaataaggtaacttgtttttcatgcgggaagaaaaagttcttttaactctccttctcccgaacgcacgaggtgttgtttggcgtagtcctcttatcctctcctagctaaggggggctcccatcggatggcctaataagctaaagaaaaagctaaattttaaatttttaaacttaattctaagattgattttgagatattttcaacgtagttttttttcagtattggtttttaagtcaccaagaacatatatataaaagttttacctacaaatttatttttattctctaataagtcgttttgacttattaggaaaaaaaaccaaacgatggggcctggggtgtttgggtgtcaaaaataagtttttaggccccctttgattcaaaggtaattcataggaattttaaaggattccattcctatagtaatttttcctatatagccatttgaatcaaaagaatgaatcctatgaaatcctatgaaattcctatggaatgcctaaagacatgcaagttttggaggaaatctagcatgaggttctacctcatggaaactttcctatgaatcttcatctctcctctaattcttgcgtttttcctgcggtccaatcaaatagccattcctgtgtttttcttgtgttttgcaatcctctgttttacacttacactcgtaccaaaatcctacgtttttcctattcctacgttttttcaatcctgtgattcaaaggggctcttaaaaagggacttatttttcgtgagatagcacccaaacaccccagtacgagcttctcttaaatgtacaactctcggaccaaacgaatattctgatcgaggccatcaaggcttcaggtttaatcatccagagactcgacagaacgcacgccccagcggtgccacacggttgcggtcgatctaaaacaataatactccctccatattttattaataatcgcattcgcgaaatattttattaataatcaaggccttcaactgttcaacgagacaacgagttatctccagcaagccattagccagctagctaggctcatgctcgactcgacaggttcagacaaatgttcagtagctctacagatacgcagtatatgtgttatacgtagtgcaaattataaacctgaaaactaccgtatatatactacaatagttttcagatttgtagtatatacagggatttgcactacatattatttttttggtgcaatataacttaactgcacatgtatgtatttgctcgtactaaagcagccttaacctcagattgacaatgacttgaacccaactaattaagtagtagtgtagtacacactcaagctaactaagcaagaataaattgaaaactatacacactctagtttctactataggactaaaaagattatgcttcgccattactatatttgacccacctgatgttatcacgatggagacgtcagcgtgtagataaatgctacccataccactgacgaaacgaacgaacaaattttaagacacgtgtgttgcaacttgcaagtgttgcaaacctgcaactgactcagctccaggcgggcctagcttgaccctgtttagatccatgattaaattcctatcatatcatatgtttgaaccctaattaaaaatattaaacacaaaacccatttcataaccctatactaattcgcgagacgaatctattaagcctaattaatccataataatttgtctctcaaattagctctcatttatataattagttttattattagtctacgtttaatactctaattactgtccaaacatccgatgtgacgtagaatttagggtgcgatcgtttcagcttttcatgattagattctcctcgttttccgttagcttttcaaactgctaaatgatatattttatgcgaaaactttcaataaaaaagttgttaaaaaatccaacaaatttatttaaaaatatatatatattaatacttaattaattatatactaagtgtattttccgttttgttttgtgtgcggctaaacagtccaccgtcactgctggaacgatcgaaccctttagtgtctgatcaaaacaccaccagcctccaaccagacgcaatgaatacgtacgtacgcgaatgcgacagtcctgattggtcctcttttcttttgttttttccattgttttctcgctacttgccagagttaatccctatattttctcccaaattaaattgagtgccatgcatatccccaaatccctaaatcaaagtaacatcccaaatcttcacatcacaaatcctaagttacttatacacacaaatcaaatacatcacagattatacatctcatatttatgcaatgaatcacaaattctaaaataaagaaattatacatcttagcgaatcacaaattatatataaaaaaaaagaaaggatgccggtagaggagagggcgccccgcctccatgcatgcgcgccccccgccccctctcccgacggccggcgcctgccgcctgcggccccaccggccgccggatgggaggggaggaggagaggggatgatccgatcttatctaaatatctcggtgatgaggaaagtcttgtctaggacttaaccgatcgaagatgggagagaaatatttactcccggtttagtaactccaaccgggactaaagatggatttttagtgccggttggtgttactaaccgggactataaatctctggcgccctgacatcctctgacataaatagaactgggactaaagattctatagtcccgctgcacttttaaacctggattaaaaatggtttttagtccccttttttggttgaaccaggactattgtagattttgggcaacccggcaaagatcacttctccagtagtgtctacagtagcgttcatattggaagttgatatttgaaaattaaaatggtaatctttggggtggagttctgtcgatagctacttttctgtacggcttcggttggtcccatatgtacatgtgtctgcagtgctgtagttttcgcggcgaaaaggaaatgcatcaatcatgccgaaaattcactcaatgttgcctagtagtactacgctattgagggtgcgtcatcactgtttcgatggtcagtttgaatcaacacaaagccccctcgcatgccacttctttgatattacatcatgataaatagggttcgactcgttcatgtctccacacccaggttatgccgcaacatcctagattgaaatatgacagcaaacatttgctatgggcagggattagtccacttcggtaaaactgcccaacctgtcacgttttggaagaacttcggaataggtttttcctagttaggtaactcggtttagacaccatgacccctatgaattatcaagttgcagcttcgctaataagttgtttacaaaatgaaagaagaaaatacgaaagaaaagcgtacgctaaattttaggggctgctacaggatgggatcttgtgcccatctctccaaacgatacttgatgtcagactggtacaaggtttgatactcatagataccaaacttatacccccatcaattccctagctcatacccattagtatcgtattcatggtgggatgctatcatgtgaagccaaattgtgtcgtctcgcttagacttgcttttgaggatatggattcaaggaggcacatctaaaatcgacggcagtgctcagcagtaaggatggtttgccttggacggatgcatggttaatggatgaaggtcgatgtggtggcgcaggttgacatgaatgaacctagtgtggtggaggacagcgactgccacgatcgcaagttgacggtcggactttgcgaggaagatggcatcgacggtcggattgggcggtccctgtatgctctcaccatcgaggcatcgacacataggatcatggttgtcgtagctacatggatctaggcttgtcaagatccttcgcccgaagttgaaccatgcaagtgagttaggccagtgccaccaaccactagtgacctcctagatctgcatcgtcgaggccatccctgatcttgctttacatagcctcgttgaccctagtgtcacaacctaaatctcattaggcttatccatgacggcttcctccacaacctcctagatcttgtttgtgtacgccagctacaaccttgctcttgactgcccctcctcctgccaccgccatcgcttccttagggaaggtctcttttgtcacaaccaatgccattgtcgatcctgccgcttcctgatgagactaggcggttaggacgggatgagcaaggcggaggattggggggaggggttggggacgaggaattcaaggtcgtgggttcatgttgtcacatcgtcccacgagcaggatcccaactttctattgtatgcattttctttttttcttaagacatcactactaactttataggatcacaacatactcggaacacatcctgtagtaggcataactactttttataggaacacattctgtagtgttcatgctgtcatgttgtcccacaagcttgatcatttaatctctatcacagtaccctttcttagaaagtgataaataatttaccactcatcctcccaaagtggtaaatagttaaatagccgcgaagtgagcgtagtcaactggctaggttagtatttgtcactttctagcgtagttcaagtcccaaacttgatacggatgctcatatttacggctaattattctttcagtgttaggaaatgcactcatcgatagcgagatgcctatggagatttcttcaatctcatgatatgttggcctagtcttttgtcggaggtgctcataggggtagggtgtgcctgtgtgtcttcataggggtgagtatgcacatgttgtgagcttctgtttttgtacagtgtttctaaaaataatacaccctccgttcaagtttgattatcacatttcaaaaaaaaaattggattttcaagtttgatcgtcacatttgcaatcggcaagctgtggcccttttcagttgacatgcgaaattaaccagccgttgtgttgacgcctcgggagcacttctcaaaagctcattgcatgcatgctaaattaatgtcatttacaattagctacatatcgtttgtttcaccttgattgtcaagcttgcacggcccattacgataggcatgctggtcagttggtgtaggaatagattaggaagatgataagagcgagtataataagatgatgtaagcgggctatatatgttgccacatcatattcatacttagagcaggtacaatagcaggcgataagccagctataaacatattttaaagagataagaaagagagagaagagtagcgggttacaaatttgtagtcagctgtagcacggactcaaagacgtaatgtgtgtaccacaggtgggactaggtattaattgcatagtaagcaactattgtatgaattggttattacattggctatagatgatttgaagttagtagtggactatactattatgtggaggaaatagaagaggagagagagaggaaaatggtgtagtaacatatgtgagagagaaatgtggggaaaacattaatggtgtagtatgtatccatagttaactattatattagtaggctattaagttagctatagatgatgtgttaatttttggagttagtagttggctatattattgctctaagtgtgcttgttgttcttggtccttgtatcgggtcaaaatatgacgattaaacctaaatggaggatagttaaataagctctttttcatagggaggcaaatcaggcaccttattaaaaaacacttcatattcgtcttatttaaaaggtttatataatagtattttttgttgttgttagataataaaatataatactttatacgtggctaattttaaaaaaaattataaattttttaaataagacatgcggttaagtgttggacagagaaacctaaaaatgaagtctctgtgcgtgttaaaaaaaaaagtctccgtgggatggaggggtatctcgtgcaacaactgcagcatggtcttcagccatattgaccatgcttttagttttcaaaaagaaaaaaagaccatgcttttccttttttttttcctttttgttagggggcgtgggatgggggttgggtttgtagaggcggcatgatggggccagagcgttgcatggctttggctgaaacagatcaagcacgataccctacaatattggagtgtgttgtagtcttgtagaggcagcatgatggggttggagtgtaccttatctgggacgacagagcaagcatggcgtgttacagttactcgactttacaaactaattatttttagtgctggataacgtacatgttaatatgaagacttttatatcgatttagtctctcgaagatgttcacatggtaagatgtgcgtattttgcatgtgtatataagtatatgcatttgtattgttttttaaaaaacaaaagtactttgatagtaaacaaaactaaaggcatgcttttcatttaatgatatgagacaacttccttagttaatttagatagtacccatttcctcgtgtaaaaaccaacataaaatataatatggtattggatatatttaaatttattttattagaacacgtaatatccattctagcatgtcctatgggatggagggaatacattttcgtctacttgcggaaaagagttgcatctatccctttaggtaatgtttggtttagggataaagtgggatgggttagacctatcctagttttgcgggatgggatgattccagttatctgtttggtttatggtatgggatggttatagttttctgtttggtagaagggattgaggtgggatgagatggacgaatttgtactcaccgttagtaccgtctgggggcggagtagctcggcggtgctcggatctgagaggagcagcggcggcggcgttcgcggaggtggcggcggttgcagacaagcggcggttgtggacgagacggaggcggcggcgggtgcggaggcgaggcggctcccggatctgagaggagcgccggcggtgctcgcggaggtggcggcgctcgtggtggtggcgctcacggaggtggcggcgctcgtggaggcggcggcgggcgcggtggcgaggcggctcccggatctgagaggagtggcggcagtgctcgcggaggtggcggtgctcgcggacaagcggcggcgctcgtggaggcggcagtggtcatggaggaggaggaggcggcggcgctcgtggacgcgcggaggtggcggcgggcgtggacgaggcggcggcgctcagggaggcgatgacgctcgcagacgcgcggcggagctcgcagaggtggcggatggcgcggtgacgccgttcgctcgtcccaggtgggacgagttcgtccgctagttttttggagatcagttggtcccagatcttagaggaatattcctctccagagatcaacccatcccacccacccctaaaccaaacacctctaaaagtgggttcgccccatctcatcctatccgatccttgcaaccaaacactacctcagtcttcaaacccaccttgagctaatgatttttgtttgaatcatggatctgtagctaataaagaatttgagatatatgttggccttgaagagttgaaggtagcacagctagctaggcgcgcacatgattggcccctgcaaggatgcacgcacatgtgtggattcgtccttaattttaaaaaggtgaccatcagatcgcatcaaataaatgcggtagtacgcgattactaaattgcaggctaaaattattcttgttatttctatttaaacagcactgtttatcgaccacgtatttaaataaagcacaacaataatgctagtaaacaaattaaggaaagatagcaaagccaggtttgcaaagaacaatgccttttcaaaattatcttccattttaattatttggtttctttattttatcaaaatatataatgtatgctacattaatgatttagaccaaccataatattatgaaagagtaaccttaaggctcttaagatgaaccatagccatttgtggcactgaacataagctgggaaaaaaaacaaccataagttcacgggcaacctcaagggaataaaaaaagtatctataagaatctctcttctccttttgcttcgttctctccccactcaataaaaggttgatttgaagtcttttttatttgtaaatggatcttacccatacaaaacttaaacactgtagcaattataacaactatgatcaactgacatatggtccaccttaaagctatgttttgcaataaacactgatcttgcctagtatccatcatctctgaacttcttaacacaagaggaacatgcgagtacagaaaccacccgaaaaaaatattatgtgtgaaatcgtacgttaataagcaaatatgaaacccaattactgtgacagaatccatcacgctacacaagtgatggtctgatagaacaaccaaaactaccgcttggtccacaaatcaataaagaatatcgatacgatcatatacgagcaatcattgttctcctcatatggtgaagcattcttgcaacttgcagaggtccgtggtactggtatgggcagcggcgtctgatcccatggcccatggcatatctgatctcaccaaaccaccccactaaactaacctccccagtctaataaaccagaacaaaaccgaagctaaaatttaaatttttaaaattaaattaaaaattgatttaaaaaattcaatgtatttttttacattaaaattttagtcgctgagaacacatatataaaaattttatactataaattaaatattactattgtctgataaactgttttggtttattagtaaatgtgagcaaccaatgagactttaaaatatctcatcgcatacagaaaagtaggaatactactccaaaacatacaacgggggattcgcgagcgtgtcggtgaactctcgtgcctcgtgtacgtgcggccggggcttgagcccttgatgggtttggttgccatgcagcatacaacaaatctgagaatagtgtggtgcgcgcgagacgctgctgctgctgcgggcagatcgctgcacgtgagttggcacagagcggcaggcaggggaggggcagctagcgatcggcgagggcgtatgtgcggtcagatcgcgtgacagatcacccggtcccagtcccacagggggaccagtgcaacggcacaaaggtttagagtacgagaggctcgtccttgcaagccaaaatgatttatttgaaaataagaattgatttattggtaaaatctttatatatttatttgtaacgagttaaaaaccaacgctgaaaaaatatgtattgaaaatatcctaaaatcaacttcaaaattaaattcgaaaaattcaaattttaacttttgttttgctttattacgtcaaccaataggactccgagtctagtggatgtgtttttgtcggtgtgttttacacccacttcgtgggtttttcatgttcagacaattccaaaattattgttagtactatgtttggtggattgaaaaaaatatatatatccgactcaaaatatattaactttttgaatccaaacaaaacttatattttaaagtaaaggaggtagtacacggcaatatcctataaagaatacaaattttgttgagtgctaggtatgtatcatgctcctcgcaaacaatttagaaaaatgttataaataaaaaataaaacctaatagtatacatcaccaagtcatatactatctctatttcaggttataagactttttagcattgtccactttcatatagatgttaatgaatttagacacatacatctatatgaatgtgggcaatgctagaaagtcttatattttaaaacggatgaagtagatatttaacaatatgaaggtgcagtgaaaaaaaaaaagataatttcaaaggttacgttgtgttccttatcatcatcgtccactaaaacttccgtcacaactctagtctagctctccgtgtgtcctccagccagtgtagtgaggttttagaattagtattccataaaaatttttgaaatgattgcacggtaattgatgaagacacataaaggattgcttgttgggctatcgatgatcaaattggcgatacgactttatagtacaggttgtcgacttgttctgtgtgatattggttttgatgttgtgttggaaaaattaagatgatggttgatatccgttcatcttattttgcgcatgctgcagttgatcgacattatggttgcgtggctctactcatctctcgcgacattctataatatggatcctttttttctttgcaaggtaaaaatctctatctagtttcacttcaaagagatatattagtagattttgaagattatgtcgacatataatttgaagtgacatgttttatttatcatagagatgatcaatatgtggtgattcacatagcatgaatcattttctcacaataagttttgacatacattattttgatcatgactgcaaataatttctgccaactccattaataccctctcggttcaacggtacccttgattgctatagagagtgatatattatcaaatttcttttcgagtcctaccaatcgacgtgtatcataaaatatgtatatttttatgtgccacaaaatagtatcacaacccggccaccagatattgtagacgaagatatctgataagtttacagaacaaaccaaccgtatgaaatgaattcatttgttaggcaggacccttgacgcggactatgacgacgtggccacctcttgtaatacaagttgcaacgccagaacaaaacaaaatttgcccatttggacctgtttagttgtaaaaaattttatccctacatgttacatcgaatatacagacacacatttaaaatattaaacgtagtctaataataaaataaattacagattccgccaaaaagttgtgagacgaatttattaagtctaattaattcgttattagcaaatatttaccgtagcatcacattgtcaaatcataacacaattagacttaaaagattcgtctcgcaattttatggcgaactgtgtaattgattttttttctacatttgatacttaatacttaatgcatatgtccaaacattcaatgtaatagcgccaaaaaaaaattgtttgaaactaaacagacaaaaaaaactcaaaaaaagagacgtcaaaatcgtatttttgggagttgggaaaaatccagcgatgcggaggaggagccgagccgagccagctatgaaaaccggagggaggagtcctcctcttcttcctccttcccctccgctcccgataaatcggaacaatctcgaagcatccgcccgtctccgcctgctcctcccaccaccaccaccgctgcttcccttctcccctctcgcccgccgccgcctcgccgcgacgcgcatcggcgccgccccacgaccgcagcagagaagcccaccaccacgcgcggagcggccgaggaggcctcaccactattggtgcgggatggcggaggtcgccgccggcaccgggcagctcattggcgtcgccgtggccacgctcctcgcggcgatcttcctcgccgccgcgcttcttggcagccgccggcgccggcggcgggcgccgttggcagggaagcctgcggccgtgggtggctgcggggtggccgacggcgaagggtgcggcggggatggccggaccgacgtcatcgtcgtcggagccggggtcgccggatctgcgctggcatacacgctcggaaaggtgactccttctcgcctacttagttcgcctacttagatgggttcttcttctttttaaatctgcaaatttgttgcttacgcttcgttgagaacagggtgattcaaaaaaaaaagattgaagaacactgcaagattgaatattttttttccggtaagttaggcgcaaggacgaatttttctatcctgaagcagagtcttaagtacaaattgccaacccctgtttatgcatgcgtcgagctttgatttatttctggaaaggcagctgatgtcttaatccaagaagactagattcgtgtatgaattaattgtgatttcatgcaatttcttgttttgatcaatatttttgcatgttctagcgtgccggtagaaagcgaagtctgttggtctcttccttttttgtggacatgaaatttgtgtggccaataaatgttggtgtgcaaaaaatcgcatgtcttgtaactgtgatgagaaatctctcttttccatctgcagtactccatactggccgtggccggtgaccacaagtcatctggatgcagcagaaaagggacagaaagtgacaaccaagaggagagttaatacatgatttgaataaaaataaaagatgaatctcaggtgttctataaaaccaatacaattttggttatagcaaaacagattttgttgattggtgatgcaaatcttttactgcagtaataacaatataaattaactcaaaccgaaaagtttttctcaaacaagttgtatagagcatgtccaatataattccgactgtatacagtttatcttctagtctggaactactgtaactccattactatatcttttcttatatagaagcaaagagtcacttgtgttcccttctctggttttctattctttatcatgctcctttctatctgcatcaacagagcatttatgtgctctatcttgacacaatggaatgcccaactaaatcaatgacccaatttattttcccaactcccagcaactatgagagtgacaccttcttgatagaaaaactgatactgcttgggcatatcttgagttcttgactttgcgcaaacttaggaggtggtaaaattgagataggtccaggagaaaatgactaactcaccccatgactgcttttgaaatatgagtgagaacactttgtgtgagcgtaaattgtatacacacaaaggatagtgagaacagtggaggcatggttgacaatgtcattagaactaaatgtttgtattaccatcaaccattcaatggaggggatactatacctagcacgtttgttctttgtaaatgatactcccaatgatgattttaacaagggctgttttaattttaaaaaaggtcaaaatatatacatattgaccatagtcaatttacaagtacatttagtgtataaaaattatacaaattggctcgcatttcaacgtgctctcacaaaatgtcggttttatagtttgaagaatatattttatgataaatcaattgctaaagtttaataaacttttcaaaaaaagcatcccctataaaaataatcatcggatgtattatatttttgagtctgcacaaacttccaaaagctgacaatcaatatgcttaaaaacacctaggttgcccattgccatatgaattcactgcatttcaccttaaaattactttcaataatattattttgtattgatatgatcacaatttgcccttgttattcagagacttatcgattaatacatgattttatactgagattctaatgtttgtagttttgtgggttgcgatgttccgttagtcacctagtgcttctgtatttgttaaaagcacctctactgtatcatttttgctctctaataaaaacttattgatattaaggcaattcaatggctcattatgatcaaatgatgaattacagtgaaacaattatccctgagatttctcttatcgctttttttttctttttgtgacttaggatggccgtcgtgtgcatgttatagagagagacctaacagagcctgatagaattgtcggtgaactgttacaacctggtggctacctgaaattgatcgagttgggtctcgagggtaagcttcccccttatctctctatgtatgtgtgtatgtgcacgcgcgcgcgcatatttcttatagtattagtggtacagtggactaaatctttaactatattcagattgtgttcaagaaatagatgctcagcgtgtccttggttacgcgttattcaaagatgggaaagacacaaaactctcctatcccttggagaagttccactcagatgttgctggtaggagctttcacaatggacggtttatacagaggatgcgccagaaagctgcatctttgcctaagtaatagtctttctcgacacaaatttatctttactagaatttttgacatacttatttttatgattttcttgtattgtttgatgtgagcatttcattagtattttagttgcctctagaggattaaaatattagattatgtttaagtgcttattttgctactcgtccagaatgatgtatttcacatgttctttccttctacatgcgccgtatctggatgtatctaattcgtgcacctgcatgtgacatgaggtaaatgtttggcattatgttttatatttcagtgttcaattggagcaaggaactgttacatcattggttgaagaagatggtacagttaagggtgttaaatacaagaccaagtcaggtgaagaattaaaagcatatgcacctctgacaattgtatgcgatggctgtttctcaaaccttcgccgcgccctttgctctccaaaggtacagtttttagattttgcactatccttttttgttcatgcatgtagaagatctaatactgatggaaatatgtggttaggttgatgtaccatcttgttttgttgggctggtcctggagaattgtcaacttcctcatgcaaaccatggccatgttgtcctggccaatccttcacctatcctattttacccaataagcagcactgaagttcgctgtttggttgatgtccctggtcagaaggtgccttccatagcaaacggtgaaatggcaaaatatctcaaaacagtggttgcacctcaggtattattttgctatttcagtcagtcttgtcccgagtttttgcttgcctactcatagcaactaaatgtcaatggaaatgttctgttgacagattcctccagaaatctatgattcattcatagcagccattgataagggaagcataagaacaatgccaaacaggagcatgccggctgctccacatccaacccctggtgcacttttgatgggtgatgcattcaacatgcggcatcctttgactggtggcggaatgactgttgcattatctgacattgttgtgctacgtaatcttctcaagcctctccgcaatctgcatgatgcatctgctctttgcaaataccttgaatcattctatacactgcggaaggttagtcttcactcttcatttcacaatttaccacccacctttcaaaatgtatgctgtctaatgtatggcgctttcatgttcacagccggttgcttctaccataaacacattagctggtgctctatacaaggttttcagtgcctcacctgatcaggctaggaatgagatgcgccaagcctgctttgattacttgagccttggaggtgtcttttcaaatgggcctattgctcttctgtctggtctgaatcctcgaccattgagtttagtggcacatttctttgctgtcgctatctatggtgtcggtcgcctaatgcttcccctcccttcacctaaacgcatgtggatcggcgtaagactgatttccgtgagtatctcaaatcttattcttcaaagttttcaaactttactatttccatcgtggtaccattcatggacagttttctatacaattttttcattccctatcctaaaccctaaacgctaaaccctaaatagacttttttttcccgtttctatactattgctaatccagagttttcactgcagagtgcatgtggtataattttccccatcatcaaagctgaaggtgtgaggcatatgttcttccccgccactgtccctgcctattatcgtgctcctcgtccaatggagtaaggggggaaaatgaaaggagaagcgaagagaaaatccctgccactgtcctgatcggcggatgtttttcgtggatggcaattttcctgtgtaattggtagtagtcgtcaggccgtgaggttgtgtgtgctgttgttctaatggaacgaggggacctgtatacaccgtcacattccctgtacacttgccactttcgttgttccgtcagggatgcatgtcgactgctaatccttaagctgtatatcccccatgaattcatcatgattgcgtctttgctctaactgggtgcgttgctaatccactgaattccattgggtaggactcctgtgtgtgattgattgatacaactgtgtttgctagtaaacaacatcattagggcattagcaatgcgccaccgtctcagcgagaagcccagcctccacataggcaaaaaacagacgaagctcctgtctccccagtgcgtgtagctttgggtggggtccataacagatttttttttctcacgctgggcccaccacgggaatacctttccccacccatctctctccccgagcaaatcgatcaatctcccgtacgtgcgctgctccttctctctcccgtgccgctgctccttctcctccgccgcttcttcagatcgatcccgtgctactgctgcttcctctcctcctcctcctcctcctccaggcggcgcaaatcgaggtgggacagggccgacgagatcccggaggacgtagagatggggatgggtgagatcgaggcggccggcgagctcacagcgacacggatcgagactgccggcgagctcccggcgccacggatcgagacggccggcgaactcccgaagggggcgcagatcgggatgggtgaagtcgtggtcgtcatcgccgtcattcgccggtttacctggtaagactacctccatggctgcgccgccgccgctgggctcctgctcgagctccccgcgaagggggtcgtgggaggaagggcgaggccacgacctccacaacgcggccgcgccgttctcccccacgccgcgcgccctcgagttgtcagatagttgcagaagaacgggtggccaaagtatgctccgcggacttggtttggtcgcgcgtgacgcctagctggctgcgaatctccgacgtgtcgagcgatggccgaatgacacgtcggagcactgtgaatggctatggtccaacatgccaagaggcccacgatctgcgatctgtaccatttaatattttcatcttctgtttggcttccggcgacggcgattgccagtctttgctcctcctgtctgttctgtctgctactgtttcttttatgcaaagttgcttggtccacagcactaaataaagccatggtatctatgatattcatggcattctttcatccgacgaacaattcctgcaagtagtagtcatatggcaagggccaaggggcatgtctgccagactgccacctactaataaccagtaaaaattatcacttcattaagcgccaagatccgtgcctggggatctcggactgtagcggcagaagaagaggtggtaatgcaatggccacagcctgtaaaactgggagccggacatggttttccggcctcgagattcgtgtggcgggggcgagatggacggctaccgtttgctcgctgaatcacgttgactcctgttgcgcaaagcagctccagctctgccaacacgagccacgccagcgaaagctgacgatgccattgccagctgctaatcagcggcggtccggccttttttcagctcacttcttctcccataaaacgtagtctcccgtcacctcgcttgcacttctctaagcttccacccacccacgtacgtacgcacgcagagcagcaagaaatggatgcggtcgccggcgccgggcagctcgttggcctcgccgcggccacgctcctcacggcggccttcctcgtcgcagtgaagatggggtggcggcgccgccgccgccaacgggaggtcgcgccggagggtggctgccgggttgttggcggcgatgggggtgaccggacggacatcgtcattgttggtgccggggtcgccggatctgcgctcgcctacacgctcggaaaggtggctacatttttgtctctcactcgtttgttgacgtactcgcatttggttgaggcgaatcgttcgtatctttttaggctggaattttgctttcgtaactactactagtaccagtctaccaccaacttgtaagtggcgcaccaatgcaccattgatacgaaaatgttttatttgttttttctaaaagtaatacatctgggttttttttctttaaaccgggccaacaatagctggtgttatgtacttatgttcagtacgagatgcagtttatgtacacttttcacttaggagtaaaattaccaaagcgccaggttttttttaacaatactatgttttaggattagtgcaaatttctaatcatcaagagttttaccatcatcttccttaaaaccacctagattgaccatggaactgtactagttccatttcactctatttctcacttaaaatactttcgtactataattttagtaacctgtacggtgaaaataatgtcttgtagaacgtgaagagtcaaaattgctattgatacaaacacattgagataccatagtgtcttttgtatttggtagaatgaatcacttctattgtactagtatcattcatgttatccgacaacagaacactcaatagtaaaaatgcagtcatgtatctcgttaccatcaagcgatgcattgtggtaaaaacagaaatatcctgaaaaagaaaatctaatattcctggtttcgtttgttgaattaggatgggcgacgagtgcatgttatagagcgggacatgacggagcctgatagaattgttggtgaactgctacagcctggtggctatttgaaattgatggagctgggtcttgagggtaagagtggcatttttcgaaaagcatcgtcagtactttgtacttaatgtcctttgattttattcagattgtgttgaagaaatcgatgctcagcgtgtccttggttacgcattgttgaaagatgggagaaacacaaagctttcttatcccttggagaagttccattcagatgttgctggtaggagctttcacaatggacggtttatacagaagatgcgtcaaaaagctgcatctttgcctaagtaataacttttgcgcatgcaagtttattttattgaaaaatcatatatttatatagttcttctgaataatgccatgtgaacattccatttgtttatattactctactggattaatacatttgattgtgtcaatttcttgattatctacacctccagaatgatatactctagacggatctattggatttacatacttgattatgattatgcaaaatttactactttgggcttttgctgtccactcattctctctttttatgtaaaaaaaatacacctgctttcagtgttcatttggagcaaggaaccgttacatcattgctcgaagaaggtggcacggttaagggtgttcaatacaagacaaagtcaggtgaagaattaaaggcctatgcaccattgacaattgtatgcgatggctgtttctcaaacctacggcgtgtcctgtgctctccaaaggtacatttttcaaagtatactgatttgcttcttgctgaattcaccaatactatttttgacttgactgaattcactaatattaatgggaaatacatgcgcttaggttgatgtgccatcctgttttgttgggttggttttggagaattgtcaacttcctcacccaaaccatggccatgttatcctggctaatccttcacctatcctatgttacccgataagcagcactgagattcgttgtttggttgatatccctgggcagaaggtgccttccatggcaaccggtgaaatggcaaaatatctcaagactgtggttgcacctcaggtattaatttttgctctaccaagtgtaattattattgtgtactcttcacaactagatgctaattgaaatgttatgttttcagattcctccagaactccatgattctttcattgcagcaattgataaaggaagcataaggacaatgccaaataggagtatgccagctgctccacttccaacccctggcgcgctgttgatgggtgatgcattcaacatgcgacatcctttaactggtggtggaatgaccgttgcgttttctgacattgttgtcctacgcaatcttctcaagcctctcggcaacctgcacgatgcaccttccctgtgcaagtaccttgaatcgttctatacactgcggaaggtcagacttcactcttcatgtcacagttaaccacctagttttctcagaatgtgtatacggttttagtaaatacaatgctattatcttttcagcctgttgcttctacaatcaacacactggctggtgctctgtacaaggtcttctgtgcctcaactgaccaggctaagaatgagatgcgagaagcttgctttgattacttgagccttggaggagtcttctcaaatgggcctattgctcttctctctggcctcaatcctcggcctctgagtttagtagcccacttctttgctgttgctatctatggcgttggacgcctaatgctccccgtcccttcacctaaacgcatgtggatcggcgcgagactggtttccgtaagttcctcaaatcttcttctttttttaacatcctcaaagttcaaatgcacggtcatttatacacagaaaactttgtggcagcctctctgacattttctcatcaaaatccatacaactgcagacgatttcattttctctacataactgaattttcactgcagggtgcatgtggtatcatcttcccaatcatcaaagctgaaggtgtgaggcaaatgttcttccctgctacagtccctgcatattaccgggcccctcctccaatggagtaagaatctccatgttagcctatggtgtttgctgttctttagttcttttgagctgtcgagtgtgctcattagagtagtctgttcttcctataggaaattgggatgtgtatcgattgtcaatactaagttgtatatccctctgaacttgctaatgcgtcttgctcattatctcttttagaatatttgaggtgctctgcttgtctctactgcaccgttggaatgagctagttccttgtttttatgggcacacttcctaaatgccacgcttttttgaaaaaaataatctttctagaagttttttttaaaaaaataaatgattttttttttcaaaattgtaatagttaatcataaataattatgtgttaatgacttatctcatctcgtgtgccgctgaaaagctcaactcaaccactaattcgaacagtgctttaccctactgaattccatggaccagaatagtgtttgatctgtaaagccctgtaggcttaggctggctgggaaatctaagagcaagttcaatagtatagccaactactagctccaattcatctatagccaatctaatagctcattcatataatagttacatactacactattaatacctagtcccacctgtcatactcacaccgcgtcttgaagttcgtgctacagctggctacaaatctgtagcccgctactcttctctctccttatttatctccttaaaaaaatatttgcagctggcttatagcctgctattgtacctgctttaagggggtgtttgggagtctctccaaaaaaaaattaaatctttaccctagggacttattttttagaagagggactactcccaaacaccccctaaactagtcgctttcgtccttgcaagtaatccacgatcaccgaaatcttcttttaagctgcttgttttgttgaaaaactgaaaatccgttacctttgttatgtcttatttgaagaccttaagattttaagtagctgtttgttagccatcttaagagaatatagagaaacggtaaaacccaacttttgacttctgttttttatttaattgtgtacctatatcgtcttagagaatatgatggactgtttgcgaaaatattttaattctgaaaaaattatagctgttaaaagctctcctaagcggactcttaatcgagactctagttgtacaaagaaacaaaaaatcttgtatgcaactaaagaagcaaaatcattcaaggaaaagatatagtagtaggacaaccacctggacaggttgaccagaaatctagagcacacctccaaacctgacgtatgaactcctactagtaaggacaagactagtgagcctctggaagctctttagagcaggttcaatagtatagcctactactgacttcaattcatctatagctaatttaatagctaatttatacaatagttgcttactatactattaatatatagtttcacctatcatacatgttgcgtcttggagtacgtgctgcaactggctacaaatctgtagcctactgctcttctctctcatcgtttatctcattaaaatatatgtttataactggctaatagcatgctattttacctgctcttagccagatccggataacgcatatcaatgctatcctgcatcgatcatgccgtttgtgtcccctgatctcggagctgctggaagcagaaaaaggaacagaagtaccgtgtttgtttcggcatcgaactcttcccttcaaacgtctaaatgcatgcacaggcgatatgacgtacacatacatgcagtaattaagcgccggtgggtatttggatatttggattagcatacccacgtggaggtcgtccaagaaaacgaccacttaacctcgtgtcaaaatcggcgtgtacttccgtttcgtgtcactgcagctagagtggcaaatttggccacttccctttcgttgccactgtgaactgctagctgcggctgtcctgctgctacttgcttcacgcgtgcgtgaaagtacattaggagaaatcaacatctgatgtttatggattgggaaaggaacaacgacgtcaaggctgtcacaacttaaaattaattgtaaacgttgtacatcaaaacagttgccttcaatcggctttgtgcataattgcattcaccgttcgcgtgcctagatgactgagtgactcggaattatgcatttgttcattagcgtactattcagttatctcaaagatttggcaatgacaagattttattggccacacagagattacgcagtaagatgatctgcatttgcttcctgttcgtccaaattccacttgcgctgtgatcactgtcgctacaggaagatatataaaacgacaataatctacattggatgacatgaggaataatcgggatccctttgcccataatccatccttaatctattgccactgtccatcctttcttgtcctcagccaggcccatctggatggacgtcagagtcgtgtgcagtgtctgcgataacgtgtcatgtccagtcctgaactcgtacctgcacacgcgcccaagaaaccgatacaaaatcgtcagagatttgcgggattcagaattcagatcgatcctgtcgtgaacgatcgactcgcagattttacctttgcccatggtaagtaacactcgatactggggcaacgaccaccgctgttccggtgcagaacacctcgtctgcgccgaccagatcgtcgatggagacgagccgttcttcaacctgcttggccaaagagatcacaacgatttcagaattaatttttttttcgcgaatactcaaaataattacacggaaaattttcagaattaattcagatgtgctgtcgccaaatcactgatggatgcagtgctctgcgtagattgattggtcacctgatagccgcggtccctggcgagctcgatgacgctcttgcgcgtgatccccggcaggatggttcccacggtggccggcgtggcgacgacgccgtccttgacgatgaagaggttgcaggaggaggcctcctccaggtacgtcttgtgcaccgcgtcgaggtacagcacgtcagtgaaccctctgctcttggcgtccatctgcgccttgagcacctgaacacatttagatgtaatagatattaattcctccatccaaaatattgttacttagtatggatcccattccaaaccaaagaatctgaacataacctctagccgtcagatttattgttttagtatggataccattatagatcaacgaatttagacataaccactgtccagatttattattttaatatggatgctattatagaacaacgaatctggacataactactctctatatttattgttttaggttataatattttgggacggaagtagtggatatggtatcttttgtttaccggcgcgtagttggtgatcgtcttgaccccgccggtgccgcccggcatggcccggtgtatcgagtcctctacgacaaggtttatcggcgctagaccctcctgaaaccgatccatccatcgagtccaaaatattcagatttttgctagctgctgcagcgttcagaaagacgaccgagctaatgaccgagttttgtgctcaccttgaagtacgttccaaccggtgcggcgtagatgaggaacgtgtactccggggcgggagccagcccgagaatcggtccgctcccgatgagcagcggcctgatgtacagcgccccctttccttgcggtggcacctgatagaaaaaccacgcaacgcgaccgaattaccacggggaattcatcgagatggcgtgcgagaattaattgacggtcgtgttacgttcgtcgtacgcgcttacgtacccagcggcggttggcgaggacggtctgcttgacggcgtggacgaactgctccaccgacggcgacggcatgcacatgcgctcggcgccgtgctgcatccgccgcgcgttctcctccggccggaacagcatgtacgacccctgttggttcgccgccctgtacgccttcagaccctcgaagagcccctgatcatcgagcacatacgtacgtacgcacgcagccatcaccctcgttcacttgttagtccggtcgcctggatcgacgtttcgttgcatggacatgtgtgtggactggagaacgtgacagacctggccgtagttgatgacgccggaggaggggctgagctcgatgttgccgtagcggctgagctcgccgcgggagaagacgccgtcctccagcgagcaccgcatgacgtacatgtagtcggtcggcgtcagcccgaaccccaggttgtcccagtcgatttcgccgccgctttcctcatcggacctgcacgcacactcgtacacgccccggcggcaatggcataaacaacactaaatccgaagcggacgtgaaaagaacaaaaatctcgttcaacggagaccggaagagtagaatctgcatgcatgagtagggggctcacctgtcggcggagtcgagctgcggcagcgacgacctccaccggcactggagcagagaccacctgcctccggcctgcacatccacaaggcccctaccgtgagccccaaccgatcgcatcaacacagaaaccatctcgatcggacagaacgcgcgcgcaacccaccacgagtcgaagagaaactaagcagagcgagtgggatccgaaccactgaaaaagtgcgggtaatcacacgtaccgtcgggagcgccccgcggagaccgaggccgccgccgccgccgcatccctgcagggccctggccagcgcgtggtgggcgtcgcgtgcccacgggaggagcgcgcgcttcgcggacgacgcagcagcagcagcagcagccatgcaagagacctgtgcggctgtgcgaacgggaagcgcgcgtctcaggctcagctcgtcctcgttcgtaaccaaccgttggcgcgccaaggtgaggagagatatacacgagtcgtttcacggaaacagcttcgcgagtgtgtgtgtgttttaaactactctcggacggggcggcggccgtttgtggtgttccggtctcgcgttgtacgtgtcaggatttgttggtggcgatgcaagattacaacgaacgacgtttgacgtcacggggctatcgatcgatacggagtggagagtaccatagtactatcacgaataccaataacttgtgggcaaaattggttatatagcatcgaaagttcacgtttttagttttatagcatcgaaagttaccggttcattttaatagcacctaaagttcaccatgttcccatttttaatactttcgtcaattctcgatcgttttccgtccgtcttgatccagccacacacacgatatgacgtttctacccctcacaagtacaaatataatgcatatcaatgaggggtagaaatgtcatatcatgtgtgtggctggatcaataacgatcaagacggacggaaaaaatgacggaagtcctaaaaatgggaatagggtgaactttagatgctattaaagtgaaccggtaactttcgatgctataaaataaaaacgtgaactttcaatgctatataaccaattttgcctaaacggtagcaaccttttccgtatatatggacagcacagcgacgggcgaggggtgtggacggccggaccacctctgggcccgcgagtcagtgagagggctgtagctgcggttggtacgactttgcgctgcacgcgtgatgggtaatccgggaggaaggcgtcggctcacggctctgacggtggccgttggtacggctcttaaaaaatattatcttcatcttaaaatataaaataattggttgatagccagtttctaaaaatctaaaaagattaggtttctggcttttagtttgttttctgaattctacaattacaatttctcataatctagactaaaaactgaattgtttagggagctactgattttaaaaaaagttacatcagctaaaagtttccaatatgcatagttaaaactagatatattttgaatggaggtagcaagtaatatacctctctctagagtttttaatgggaattgtggaggaaggagtgccggagtggtgttattgttgttgtttgaaataaaaaaatagatgaaacaaattaaataagaagagatggtcgtgattggtgagataaagaaaaataggtaaaaagttactatattttaagacaaactttaaacattaaaaaatggtatatgttaaaaatggctatatgttaaagacggagggagcgagggagtaactagcataataagagcaagtttaatagtatagtcaactattggctccaaatcatatatagtcaatttaataaccaatttatataatagttatctacaaatatatactacactattaacatattggaacattctgcctctctcatgccgggcccactaacatctgatgtcttttttgcacactttgtcctcactcgtgtgcacccgggaagaatttcctaaattgcttcaggccaagcacgcttaaccctggagttctttggagatcggcttccggaaaagaagttgcaacttgttgatatgagtattctattaatcccattaacctctgagccgggatgtcatatcctcaaccccttacctcttggccacgtccatgtgtccagtaccagcgcatgtgccatgttgtgtgaccactccgggtccacaccagccgtgcgcaccatgcctgcgccactgcgacacacgcgctcgtgaaaccgcgactacttatatctgatagcttttaaaggtcatagactgccctcacagaccaacacatgtcttttctgcacactttgtcctcactcgtgcgcacccggaaagaattttccggtcggtcacccatcccaaattgcttcaggctaagcacgcttagccctggagttctttggagatcggcttccgaaaaagaaattaatatgagtattctattaatcctattaaactctgagccgggatatcacacatatggtcctacctgtaatacacacattgtgtcttggaatctgtgcgacagctggctatagatttgtagcccgctgtttctttctcttctattttattttctcgatatgtgattataactagtttatagcttattattgtatctgctctaaataatctcttcagacttcacctaaaattgcatatcaagtggtgaagcgtgtcagcgtgactgtgtgagccactgagcccaaacgggcgcctgaaacaaattattgattatattagattactgttatgagttctcaacttgattaaataataaattaaatatttaaaaataaatttaacatatactccagcttaattagaactttgtggtctaaataatttcatagaagaaagtttttgagaaatagtagtaacaatatccaatgaataagctaaaaaaggtgggactgctattgaccatttttatacttaacaaataaatttctttacgtaaaaaaataaatttcttttccagaacgtagtaaatatatttattcttcacatttgtattacttctttatagaacatagtaaatataaactcacatcttaaattgtactatttcttttgtgttgcaaagattaaggaatatggatgaaaagatcataatacctttcattcctttagagcaaggttaatagtagcccactactagctccaattcatctatagccaattcatacaatagttacttactatactattaatatatggtctcatctgtcaaacacactgcgtcttggagttcgtactgcagctggctacagatctatagcccgttgtttttctatctcatattttatcttattaaaatatgtttacagctagctaatagtttgctattgtatctgatcttaggtggcttagaaagagtggctttgaaaatggtaggatagccatagtagtactaaataatctaccgtataaaaaagctatactacttttttgggacgggacagagtatatctctttcacggttatactactgccttcgctttcaccagttgaaggtgttctgaactttctgatcgagttgcgtgtaatttgtttcacagggaggatcgacgagttttccagctcccagcctcccaccaaccagctaccgatatgcttttgagctggccgctggcgcatacagtctcgatcctaccttgcttatcctcttcgttttcttcttgatcgttggcaaattgtctcttcagctagtcatccatgttgccatatttgcatgcaacccatgactgtgggttggtgatcagctacgggacagatcacagatcgataggcatgcacgccatgcagtcattattgtggattggatcggctgactctatgtctacgtgtacatgtctgtgcaagtggattatccccccccctcccccccggggcgccccacccacccaaaaaaaaaagccagaactccaatccacggcttccacgctcatgttttctatgatttcatcaagctgagtgcatactgcatacgtatatatagtagttttgtatgtattttatgaaaatttaacaagaaatggaacaattctcatacacaaaaaggaggaaagttcctacgattcaaaaaagaacgtgaaattcaaaaagaccctgccacttgtagcaatggaccagtagtggagctagcttaaacaagaaatgggaagggccaattaaaagtttcatttatagtaggaactattatgctacggagtattttgtgtaacaaatatgtgtctaaatttattaatatctatatgaatataggcaatgctagaaagtcttataatatgaaacggagaaagtattatataatattaacaccttaattaacttctctactgtataattcatattattatatcctcaacgcaacaaacacacgaatcatgataccatcgaaaatcaataaacggttggcaatataaatactaatggatagtatatgttgatttgggcggatctaccataggacataggacatggggtatctacctaaaatttttggcaagtaatctatgtaggtgcaatacatgcatatatattattagttgggttagaacaaccattccctaatgccatgtacaacgcatgaccttagcttgtggtctcacggctctacgtcggagccgagctgagctggcacgcccgctcgtggtctcgcaggcgcgcagcgagcttgtagaaaaaccgaaagaagcaccgcgcctgcgctcgggagccgtgaagccacgagccgaagcctcgcgttggaggagtcggagccccggtcgtcgcctcgtccggacccccgtgcaactgccccaaatccccatctcgtcatggtcgtcgtcgccaccaaatctgctgccaccgccatggtcgtcgtcgctgccagatcaacgcagccgccatggtcgtcgtcgtggtcgtcgtcgtcgccagatccggcgccaccggtgctccctgccaccgagctcgccccggagaggggaggggagcagtcggcgagctccccgccgccagatccggcgccaccgctactccccgccgccgagctcgtgccggagagaggaggggagcagccggcgagctcgcgctcgagaggggaggggagcagccggcgagcccgcgccggaggggaggggagcagccggcgagctcctcgccgccagatccgcctccactgctgctcctcgccgccgccagacccgtcgccaccgctgctccccgccgtcgacctcgcgccggagaggggaggggagaaaccggcgaggggaggggagaggagaagagaaccgagcgacacgatgcggctgtcggtggagaaaaatcgaagagagagagaggggaataaaaaagagagggatgggaagagactgacagtgggtcccaggttgtttaggggtgtacatatacttcttttggttactctagggttcaaaatataaagtttcaataggttttataatacaagggctgacatataaatagataggggctgatatgcaaaatacgttttggagtggtttccactgtaggtagtgtgacctttgtgtgattctatcctacttgacgtcttgagaccataattgcttgtggctaccattgtacgtgacctaataaacctagaatcgtagtacaacccatgaaacagcttcggcagaatccttttccttgaccctgatgctttgctgtggttcaatcgttgagggtaatgccagtgcgccccactgcaacgcgcggccatgcaggcgctgctcgcgtcgagcaccaaccaccaagcagcagaaaagcttggtgcctgcgactgcgatagactgatagggagctagcgcctagcgctactgacaacaaaccaacaggcaacagtgagtcagctgtgctataggctgtgtttagattttaacttttttctttaaatttttgaatttttccgtcacatcaaatatttggacacatgtatagagcatcaaatatgaaaaaaaaaatactaattgcacagttcgactataaatcacgagacgaatcttttgagcctaattacatcatgattagccataagtgctacagcaatctacatttgctaatgacagattaattaagctcaaaagattcgtctagcagtttacagtcggaatcttgttttgttagtagtctacatttaatacttcaaatatattttcgtatacgtaaaaaaaatttagccaaatttttacagtatttaaacacggccatactctcaatatcgagattgttcacattggccatactctcaatatcgagattgttcacattaaatcagtggtgaacccagaaaaaactaccataatcctatacgtaccaaatttttaataaaatctaatatactaattaacatgatatataaattactctttctatttcttattacaagtcgtttgacttttttttgtcaaacttatttttaagtttgaccaaacttataaaaaatataataatattttcaatacatatcaaatatattatcaaaatatattcaattttaaatgtaataaaactaattttgtgtcgtagatgttactattttttctataaatttgattaatcacgaataattttaaaaaagtcaaatgacttataatataaaacggataaagtagttatcattgaataatttacctgggtcatatgaccccgttaagcggttcaacactgcatatattccaaaaaaaaaaaacgttatgcacttttcctagcccatctttcaaatagttaatggttgattcaattgatatttcttgaccacactttgaagagctcgtcaagacacagtagtgatgccgccatcgcccatctgaaaaagatatggtttatatggttttcacccagagaagctcgtcgagaaagggaaagggtaacccttgacaacgccccaaagaggttatgacgtccgaagacgtagcccagtgaaccaccggactaggctttcgcctgggatcctacaaccttgactgcaggtcgctgtccaccaactcagaaccaccacacaggcaaatggcagcatgtagcatccaccacaccgcactgacgcccctccgtcggccgacttcatcgaaccaccacccctgagagctggcccaggacccctctgttccaccacccgccggccgcctcgccagtttttgccaaagaggaacccaggactaggtgtcattgcttcgacagcctgagcttcccccgccgacgagttgccgcctcaatccaacctagaatctccccgcaaagaaggggaggagctccaggaagggcgatggtgccgaccggcaacgaggaagacaacccaccgccgccagctcccttagcactaccatctcgccgccggtggcggtgccgctccagaccggcgccacccactggccccgttatccggccgcgcgcctcacctagccaccgcggtggcatctcggctgcccggccaccacgccgagccgtcacctaggtctggacgctgaggacgacctaccttgcacagggggcggtcgctgcgtcctgggctgctgccgggcggccaggtcgagctggggcgctgctaccgagccgctgctgccgcgtcgggcaggctgcgctgccagccgggcacaccactgccgcctccgtgcgcgggtcggccacgccgagttgcggccgtccgccgccacagcgcccgggctggcctcgccgagccacaaccagccgcctcgcccccggccaaaagccgctgccaccacgcccgcacgccgccgcgctgccgagccgccgctgccaggttgagcgggggcgccgctgccgagctgccgctgccgccttgggcagccggccacgccaccgccgcctctgcgcgcgggtcggccacgccgagccgtcgccgagccgcgaccgtccgccgctttagcgcccgggccggcctcgccgagccaccgcccgccgccgactccgcgcccgagccgggccggccgagccgcagctgcctgccgtctcgccgccggccacatgccgccgccaccatgcccgcacgccgctgcgccaccctaagccctcgcgccgccgccgcgcagatccaggtgggggatggccggatccggccttgggggcgccggatccgccgcctcggaccgtgctggtgggggactttgtcgtcttcgtcccgtccagttcgcgctgaggaaggaaacaccacgaagaaaaaggcctcaccgccgccttccctactcgctgccggcttcaccgccggcgagctccagcggtggcgaggaccagggatggagaagaggcgtgggcagctagggtttttcaccccaccgagccgcccgcgcgagagcgacgcggggagagagacgatgcctaaatatatccatcacaaataatttttatttctctatgacggataagcttttgtttttacggtgaaacaattttctattactctgtacctctatatatctctaaaatcatgcgtttgccactggactgtggacgaacatgccaatcaacaagactgttggtgatgcatagattagcaagtggttgtgtccagcggattcatatcctctgacttttcgtaggattaatatcaccgcgtgagatctccctatctaatccgtccatttgaaaccaatggttgagtattagggaatttaacttcacagaatcacaggtcaaggcgttgtgggtcaattaatcctcagccattgatttcaaatggatggattaattagggtgaatggctaatttagtccctcaagttttaccgaaggctcaatttggtccttcacgtttcattttgtccacatagctcctctaaatatttgttttggcttgaaatcattcttgggcccacttaatatgccatatggctatttctagttaatatttcattggaaaatgtcccttttgctcttaatttgtatagaaaatagaaaaccaagatgaataaacaacagtgcagatgtacttcctattattttaacatgtgcacatgaaacttaagctattgctatcgtatacactttatagtacataatttatttttgttttacataatttactatgcattatctataaaaaaagttaagcatgcaatttttctcttatatatgtgaatgatgggggtataagtatcatttatcaaaaagttgttggttaaaggataagttcgaactaaactgaaaacttaaaggagtaatacggatagattgaaacatcaaggactaaactgagcatcagatgaaatttgtaagacaactttgactattcatccattaagataggaagaatgtcacgcggtgacatgcattaatcctacggaagtcagaggatacgaatccgtgtcgagcttgcgtggagttgacatggattacttgctaattaatctgtctctaccaatatgtagcgaatagcactcttgttaactgtactgtacgcagtataaccgcgcacactttacacgtcaaaccatttggatccgtaacacatacacaagaacaatcttagctagaaagaaggtattcccaacatttgtagatacgtcgatcctcttattattcaataactcaagttgctactaccttctgtccaaattgatcatcatatattaaattcaaaatttctcaaattaattatcatataaccgtataaatacggatttcatcggaacaaaattaatgtagcaaaggagaatatatgcatatcaaggatataattggcatagtgttttattcgatacatgtattgtgggagattgtgtgcattgtgtcttgattgatacgatttaaattatttttaatcttgctgaataaatacatatgatcaatttgagatgaagggagtgtgacggagagtactacttaagagtatttgctgagcagtaagcacttacggagtacccctacacattcggagtaaggggctggaatgtgataaaacagtagcaaaatctgagcagttctgtactcgtgtggttcccaaagacctggggggaatgatacggctggccttaactcgaccgttcatggggttcacggctgcttcccgagctctcacttcttggctgcttcctccactgcagacaaaatagaaagacgaatgggttgaaggcatcaagtcacacttgacatcgatcgatgacaaggttgcggtctagtctccacatcagcaactgaaaagggtacatccccggggcagtgaatggtgcaatggccatgtttagtttatattgcaaaattttttaggccgtcacattaaatatttgaacacatatataaaaaatattaaatgtaaaaaaaaccagttacacagattacgtgtaaattgcgatacaaatcttttaagcttaattacgttataatttaacaatgttgtgttacagtaaattttgctaataacagattaattagatttaataaattcaactcaccgttttttggtggaatctataatttattttattattagattgtatttaataatttaaatatgtgttcgtatatcggtgtgacaacccaaactttcgcccaactaaacaaggccaaagcctcgcacttttacagctacgtgaggtcgagcggcgatgctgtaacgcaggagattcctaggacaaaaatgtgagggcctcgttgccgtgtgaagttttgtgtgtttgacgcagcctgacatggacgtgacatattagcacggctggacgaaaacttgattctcgattttaatagtcgataaaaaaatgtcgctgttaaggtactgtgtagaactttttacaacgacgcggaaaaggactgggttgattgcactctcacattttttctactctccctactttagatgaccgtaaagccgtaaagagaggattaagcttagtgatctagtactactacaagctttctttgatcacctagttcgcttgaaatcttaagctaaacgtgtagccggaatgataaaaaaaaaaaaaaacgtgtagccggtactgtaggcggggacttcccggagtccgtacatgggccggacccacttcctatgtccaggccagtggtgatgatatagcccattaggctgtcgacaaactgggcccgttggacatgtcgactctcctcgaagccccgtcaccccgtgccaccgttgtcctccgtcctccccgcctcgcacggcgcatccgttcctcgcggcgccaccgacacccgctgggcttccaccgtgcagcggcgaaaataatgctgcagccgcggcacctcgaacgcgcggcgcggggcgtctcctgcaccggagccggctaatcacgcagaagacacgggcgcaggcgtccccgcctagtacgcgatcgttgtgctgcggccgagccaaaccacgtacgcgaagacgctgcccggtgtgacggtgccctgcgcccccatcaattctaagcgagtactccaccaacactagcctcccgtgatggccgaccacccaccgatcgagagagcgtctcacgccgaacgtatgagctattcattgcacgaggaggaaacatgctcacgctgaacgaatgggcgggcggaagggaagaagattcacgctcacgcacggctcacgggatcggcagggaaggccctggcctctcggtgaaaatcagcccaggagatggtcacctgagcccagcgcgcagcccatctagtcgagatctaacgtggcctcgtttccagggctccttttggtccgttcgatcgatcgagaagctgcgatgcgatccgcgtacgtatgccgatgccgtgccggtgcagaatctctatggacctcaactcgatctcctgcctgcctctgcctacctcggcttggcttggcttggcttggccccatgattcgaattctctgctgcactagatttgctttcgccgcccacgtgcattgctccggagcatttactactgtacgtgtaatagtatctgtcagtggaaggacggacccacgacgggcttgcgacttctgggccgcggatcacatgatcgacggcttggattaattgtccgccgtgactggggcaccatgcccgctttgcctcggatgatctactcattttcttttaccacgacgcgtgatgtgtgactactataacttactttagttgagataaacaaagaacttactttacttcatctagaaaacttattacttgacccaattaggctatctcgcactttgtcgtatggtcgtggcagattcacgacatgtatctctgcaccacatactaatgccacccaaaaattaccataacgtaagtttctgcgtgctgtgttatggtgtcatgcggtcacattatgcgtagacaggtaccgaaagaaatatattataaaaaattaccgtttgatcggttcattagagattagacgaagactaaaaaacacatgcaattccttttgttttctgaaccttggtgttctctcgtgggaaagcagaggacgttggcaacgagagaacattgtcgtcagccaaggttccaattccctgcggatatattccatatctcatctgattgacctgacgtgcgggcagaaagcaaatctctccacatcgcaaatgaacagtgacgatctaaatataaaatcatcaaaaaaagcctgaggataatgttggcagaagcgagacggaaatctacgggtagatctcctgcattgtattcctctcctgcaaaccgcccgttggtgccctcaaatcaatcctgagatgacagtacagagggcagttttaatccagaaacaatattcctatcgccggccggtaggtacgctccatatcatattcgatctcatccaatttcatgtgcagctcggtacgtagaattaggatcgtttgattgtacaactactaccccgaaacgaataaattgtcacgcacgcacgatgcgagaaagataggtacggaaagtacgtatcccacaaagcctgaggtcccgagggctgagcccaatcctgatggccaatgattgcgtgaggcacgtcatgtgggcatgccgcagcgagcgtatccacaggtaaatccgccgcgaatgatgagaggctgacacagcctagtacagagagagagagaggcacaggagatggtcccgtctcgatgtgccgctccgcccaacgacccgcgcgctagtacagacctcgtcagatcgttgcctcagatctcgggacaggctcgggcgaacgtgccggcctttgttgctgacgctggggcgaaacgcgccgatgcgcgtacgcggcgctggtgtccagaactcacaggagggcgcgcaggtcgccatgatgcgcgccgcgcgggggacaggagcgacgacgcgtcgcggaggcgcgagcgacacatttaactctcggggacgggaggcatgtggacgtgcatgcatgcacgcgcgcggtgtgaccggcgtaaactctcgtttgggctcgctcgcgcgcactccggccgtttcatcgccttcacggggaaccggccggcccccgtcagatgctttggtgcaagtccggtgctgccggtatatgtgatatactactactagtcgtatagtatattgtacggagaatagaaaattatgagatcggggaactatctggagttcgatctagactagagatgccaaagcgacatcaaacgtccagatcagccaataagagctaagctcaatcatatacgtgtacgataacaaagtctcgcttgtttgtagcgccaacgcatgctacatgcatgattgatcctcgatatatactatcgtcatcgatatattgtttcgtgcaacacacaatttataaagggttatagagccaacacaacggccagagtacgtgccagatgccgccgcgcagcgcgcagcgagagagagagagagagagagagagagagagagagagcaagccgtcagaaaaggaattcggctgccaggttaaatttccaggagagagatcgatcgaacgcgcgcatgcgtgcgtgcgtgctcccgcgccggccatgccagccaagccccgcccggctcatatttcttggcatgcctcccatattaactaccacgccgcgacgcgaagctcctttttacgtgtcatgatttggtcgtgccatccctcatcacacacaccatccgcataattttcctgtgtaaattagttagtccaggaaggcaggagctagcaagggcaactagcttcgacgctgactatacctaagtgcagtaattactcaacgaactagctactactatagtatgatcgcacggaaaccgtcagtgtccaacagtacgtgcaaccggccgatcatgtatgtgctacgtacccgcagcaagagtcgatcgcgagtggtggtgtggccgtacgtgttaaaattgccttgggttaattaatatggcgtgcagcagagcagagatccagatggctagctaccgctctcaagtcctaattaagcaaacaaaaagatgagacgagagggcgaagtcccgctctctcttcctgattaaccaataatcagcagagaggcgaaagcgatggcaactcaataaatttttgaagttggggagccccgacacacacaatcattgagacgtatatccatacaaaagtaaacacatgtacacgcacccgacagggccgagcgaacaggagggaggcaggcatgctagctaagctagctcatgtcgtcatccgatccaacactgtgcgtgtgtgacactatctaagaattttaatccatcagtagtgctagtatacaagcttaatctatctagctactgcactgccccatgatgatcccctctgaaaattaactagcctgtgaaacaaaaaagaaaagtaaagctaactagtgatgagaggggggcacacagttacatacttacatgcatgcacaaaaatatacattgatcgggtactagctgtggcccggctataattaatttgactaatcctatcattaagcctatgattgatttgactgagatggactgtctagctaatggaagctggaatcccccagggcaagaaacagtagctcaaggagaggatgatgatgcatgatgatcatgtcgccaatcgccatgtatgtcacgtgtatatgttacctgtgacgtgaggtagtactaagctttagctagcagtcagcagcagtgctatgtctgtttggtgttgcagatcgatcgatcgatcgaactgcagattcatgaggatggatggatcggatcagcaggcggcggagtgggtgaaggggttgaagaagtggtgggtggtggtccggccggggccggccttggtcccgtcggcggcgacgaccttggcggcggacgcgggcccgccgacgcgctcgcaggacgggcagatggtgagcgtggcggccgggagttgcatgtagaacggcgccggtggcgccggcgacggctggtgggccgccgaggacggcggcggcggggcgaacttgagcgcgcggagctcctgcagctcgcgctgcagccgacggtttctcctcggtgagcgtctcgcagcagcgcttcaggaactcgcagtccacctccgtctg

SEQ ID NO: 10210 - DNA, 85160 bp, Oryza sativa
  unsure (1)..(85160): unsure at all n locations
ttttctacacacggagataatcataatccttgtctcatgcatgcatgattgaattacgtaaaggaaaagcgacgctgaaggttcttgctgagataaaagtagtaggatatgtatatatacgtgatgcaaatatgtgcccactggcgcgtgtacatgttgcaaaatactggtctcgaagaggaaagaaaagtcgcgaaaaatgaaaaatactaaccttgctcttctgttttggaaccagacctccacctgccttggcctgaggttcagttgcttcgctaaagcgactttatgcttctgctcgaagaaacaaaacaaaagcggtggttcagtgacccatatatattcgatcaaaaaagatgaacaaaacacaaattaatatgcgccatgtttttatcttaatttgctccttgtgttctactacaagtgcagctttctgcagctaggctaagcggcggcaagtcaatagaacgtaaggagaacgcgcggacgtacgtgacgtaccgggttgagcgtgctgtgctcccggaagcggtcctccaggagcgcggactgctccttggtcagccggagcttcttgcgggtgctcccgtcgtcgtcgtcgtcacgcccggccgccgtcgacgacaccctctcgccgtcggccttctccgcgcgctccctcttcacggccgccgccgccgccgcgccgacggacagcgacgacacgttgtgcgcagggccgcccccgccggacgcggtcgcggttgcggtcgcggccgcgccggccgccgcgtcgtcgggcaagctcagggtcagcgacggctccagcggcgggcactgcgacgacggcgacggccgccggcagccgccacggtgcgccgccgccgcgtcggtcgtccctcctcctcccccgccgagggacaggcccagcgccaggccggcgtcgctcaggtgaccgacgtcctcctgagccatgttgacgacggataatccaccagcagcagctgctcctgtcgccgccacttcgattcgcttctcgtgcgtgccagggctcgccgtctctctctcgtctctcgcgcgcgaggtgcaagcaagcgagcgtgcgtatcggtaggggagaggaggagacgagaggcgaggccggcggaaaggagaaggaaggaatgagagctcagctcagctcgggggaatgaattggttggggagttgagaatatttgaggagggcgccgcggggagacaagcggagacacgaacacccacccgcccacatcacacgggcgcagctcgcacacgcggacgcactccaaaggtttgacgagccaagccaattctgctagcctttttcctttattttcattctttcttctgaaaattactactactgcataaaaaagtttgggttttttatttttcggtttggatgattggattgagcgcgtttggaaggccacgtgggcgcccatgtgtaaaaagggcccggaaatattagaagcgtccatgtcattctcaaacccactgtgtatgcaccagtactagtttgcccatttttcttcttaactcgtgccggcccaattgcaaacatgcatccataatttgcatagtatttcaaaaggcgacgcatgcgaaattaatcaaccgatcgggaaatgaaagagcaatctatatatggcgaaatggatggctacggtggtgttcttttcttctgaagatgaaagattaaatttttttacgtaaaatgagatggtattaacgtatgattgattgagttttaattattacaaacttaaaaaatagattaatattatattttagagcaactttcatatagaaagttttcacagttgaaaagcgcggcacgaaaatcttaatctttatctaactcttatcggagaaaagaaagagacctaggttgcttatactattcgtgtgacttgctaatggcggggcacgtatacctgcgttctagagcagttaggtatgtcgtagctgtgtttgtatgagcgcacgcgttagttaaggttcactataaaaaacggtttttaaacaggcggctaaaatcgattaatcgactgagaggcacggttcggacgacctcttctaataaaaggtccataaaaatcatcatttttacggaggatttttttaagacagcggtatgtgaaaattgatcttcacatatgactaggttaagaccaactagtcaacgatttttggtgtaaaaaaccgaaaacaaatccaatcacagcctacaatcagatttagtacacatcaaattcacattcaacatacacagtcagttttaaaaaaaacattgacaaaattcacacaaactccccaaatccaagaaacaaaaatcattgacacgccatatcggtccctcctgagaccgtggatgtaaccggtatcggatccactgctgaatttgaagcattggacttggggctctccatagcgtctgattgagcaaacaagcatgacggtgcaaggggagtggtcaacgacggtggcgacatgtctatggctatatttgcaagagctggatccaactccctagtctagttttccgcgcgtacgtttcttcaaactgctaaacgatgtgttttttaaaaaagtttctatacaaaatttctaaaaaaaaaatcatattgatccatttttttaaaaaaatagcaaatacttaattaatcatagtactaatggaccgctccgtttttcgtgcatactatttggttggaaaccagctcttgccaacacagctaggagatagcagagaaggagagggcaggcataacggtgagataaggggagagggaggagaggagaggggacttaagtccctcagccggcccgccactattttagggtgtgtttggttcccggtcaaggttggatgggacatggcaatccatattttattggatatggcgatccagttttttgtttggtagagtgaatatgacaatctagttttttgtttggttgtatggatagaggtggatttggtgatctattttttttgtttagttggaggagtaggatggatgagtggtgttgatgtgaaaacacgaggcttgggagatctgcttaactccagtgcaggtccaaaactcgccttcgggtatgctagcgtgccagttgatttgatcctgcaatcaacaagaaacaaagacaaagaaaccgtggttaaatccataaatgatagccgatcggctaggtgccgatgacatatcatttatctttgagctgatgtcatatatgcatcgatcgacagtcacaaatagaaaaaaaagaactaaatctactcgatcggctgtagataccaatgatatataatctttatgttgatatatacttaaatcaagtgattgggataaatcggtcgccatgccgagacagtataaatcacttagatcgaagtatatactaacaatgagactatatacgttcatagcatagccgatcagatagatctaacatgtatcggctaatactccgataccactctatattaagatatcaaagcaagtagaatataccaaacgaagagcccaatatacttaaatgcaacaagatattaacataaaaggcggatttaatatatcaataaagcatataaaacaaatatagttaaatcaggtaagatcggctgaaaccccgatactaccctaatcggcaaccaagaagcaggctagagattgagattctaatcacgactcataagatcaaactcaactgatgcagctataagtataaaaagaaggacaatatctagacaatcaagccatgggaagtttcatagagtggtagatatcatatataatttaagccaacgttgatatttaacttaatcggctgccttctattgatagatgttagcccattgtaggttagatagcaatattgccagagattatataagatatatgataactcgacgaattacataagcaagattagagtatcataaagatggaagaactaatcccgagaacgcaagccgtcataacaagttttacctcttgttgaagatcgaaaccgatgcagctcaacccgaaagtaagaactcgtcgaaataaaacgaaagcaaaaagggtggcgatgcgccgagattatattgaacgtgtgttagtttgattacatagggttcgggtctatttatacccgaaaattacaagatatgtccatatcggacacgactattatctctaacaaactctaagataccataagtctttgcggcagacttttgcccaaacatatctctaaggaaattacatgaaatatcctaattaatagatacaatcgccttctcaggactctatccatgcatggcaatcatcttgaagcacgtcaacctaacccgacaatgtatgtcgtgtcacattgtcggattcggctcaatcggctaaccctgtttgactcgatctctgtcgaccctagtcgcagccgattcggacttcagccgatccttactctgtttccgggacgatttccatctcaaattccatctcggtttcttcttcatctccgattcttgaattaccaaatttggtcgttaataagtggttacaatcaccctttcattagaggtggtgagtatacctcccttaaaattcaccaaaccaaaaaaatatcaatctactacaataaaaaaaatctgaatagaaataaaaagatagaaataaataaaaacggaagaaaaagaaaaaaaaagtcttcttcaccgaccgccgctgcgcctcctctcccacccgccggcccgcctcttctcccgttggtcgccgccttgtctccaaattgtcgtctcagtcgtcgtcccagtcggtcgccgtcgtcatccagatctagtcgccgcctcgagcgctaaggctcaccgccccgccttctctcccgccagtcgtcgtcctggtcggcggcagcggacctcttcccgttgcgccaccgtcccctcttcccgcgccggccgagctcgcatcccactgcctccctcacgtcgtcgtcgtcgttctcccatggtgagaggggtgacgcaacccacatcgtcgctcgccctagtcctcgggcggctccatccggccaaattggccggattccactatccggcatctgaagggaatattcccctccgggccgccctatcccactcccgcccaccaaccaaacacccaaaaaaataggccaccatgttctatccacccaaatccctccatccaaacacatccttaataacatctcaccagtcccatatatagtttttacacgtggcatttagatcacatgaccccaaccattattgcgagcgtgttttcttagagcccattaatagaaatggaacctgtgcaatgagaaaattgttttttaagaagcagtatctattagaaaaaaaaatctatgttatggtttgattagttattgccaaattctactatagaacatataaaatttatatagtttgctagttgatatcgtaaaaatgtgttacagctagaaggcacttaaaaaattggtaattggacgaatgacacttttgacccaattgaaaagagcaattcttcaaacggataagaatatgcacctatggccacatgcttctaacattgtgttgaagtgaaaatttgaaaattatacaactctaaatttatcatcacctcaattacattactggcatgtactccctccatcccaaaatataacaacttatagctatcaggatttgtcccaaaatataacaacttttccaccagcattctcttcccaaccaattataactttccaccattcacttttcccctacctccactactcattcaattataaccttacactgttcatttttacttattttcttaacaactgtatccaactttaaaacttcttatattatagtacggatagagtatcatatttcatctttcactccagcggtaggttagaaactttttggccctaggtgtgttcttgttttttaaaaattttctctctctaattgcgctagcaattattcgctagcaaattattaattttttctttaatcatggtacactcataatgtccataagtaaattacacaatcttaccgtaataaaattacacaatcattagtactacgtgtattgccacaatcgtacaatgatttggatacggcagatccggcagcagaagagaacattactcattacccacccaaccacctgtgcatgtgtgcgtgcacactactcgctccgtttcaaaatatttgacaccgttgattttttaacacatgtttgatcgttcgtcttattaaaaaaatttgttaaatatgtaaaactacatgtgtacataaaagtatatttaataataaatcaaatgatatgaaaagaataaataattacttaaattttttgaataagacgaatgatcaaacacgtacttaaaaagtcaacggtgtcaaatattttgaaacgaagggagtactaatttactaggtgtttgtggttggcctgttgcacggtggattcttccccaatcgatcgatctcaaattaaaggccctttgcttcaaagtaaaatcattggaattttagaaaatttcattcttataggattttttttcctatatagcactttgaatcaaagaaatggatcttatggaatcctatgaaattcctatggattggctaatgccatgcaaattttagaggaattctaacataaggtaaaacctcttggaaactttcctttgagtctttttctctcctctaattcctgcgtttttcctgcggtccaatcaaacgaccattcctctgtttttcctgtgttttgcaatcctatgttttacacttccattcctaccaaaatcctgcgtttttcctatttctatgttttctcattcctacgattcaaaggggccctaactttccttcatttcctctcatcatccagcagtgcagctaccaatatactagctgggtttggctctccttttctccgagattgccattgcctgccgccgcccattgcctccccttcgcccaagttctactaataagcagtaggcactaggtaatttggcctcttgttgccatctttccacaacacctcgcggcttttccacatgggacatgaacacgcccctggaaaggtttgcgtttggtgtggatcaggggctgttagctagcccagtgacaacttttttaatggcgggcttggagttcacatccgtgtctccgtccatctcattcccggtcgccgcgatcgtccttgttaattagctagctgacctagctagcagaattaattatggcgcgacttctgctgcttcaattatatgctggagaggagcaggagaaggagtactatttacggttgctggtttaacattttttttctaattataaaaaagagacacgcgtctatatattaattttcttttaaaatatgtcattattttttaagatacgtttgactattctttttttaaccttttttcatagaaaataggccaacctttagcaataaatcaagtcacaataaaataaatgatacttatatatatcaaaaaatattatatatatcaagaaaataggccaacctttagcaataaaccaagtcataataaatggttaaacggatataaaaaaatcaaagatcataccacattaattctacataattaactagacacttttgttcgataaattatcgttggtcaaaacctgatttattggtaaagtaagaactggtaattatatcataccgtgtttggttggttggctcaatttgtggaagtaagaagaagcatgtttggttgagtaggtgtacgtactggacgagagcctacacccacgggtgaacggactatcaacctaggctaaagaggaccacaaaattcgagctttgcttctcagtccggccgagcttgggtactagctagctagttcatgggcagttgtaggcagggggtgcaagtctactcaccttcctctttcccattcacctcatggaacggtaagggtcttgaccaagctcgagggatgccaccactacttctttcatcggatctctacctcctctcctctcctttcctattctcattgtcgttgagctttttttctcatgttctcagttggaccgggcgggcacaagggtgcaggtgccaaattcgacaataaactcgatgaaggaagcatatttggacactacagatcgaggtgacgagctctaggtgacactagctgcctccaatagccaaacccctcataattaaccacaggaccgccggctccactgtccacgagccatgaagctgttatatctggcaggcttcaactcgtggttgttggatctagtggctttgcccgtcaaggttggttcgagcgacggggacgagaagtgtgagcaacgaacagtagccagagaggtcaaagaagtggcaagcggtggggctaaaggaccagaatgggtgggggagtagccagtgggtgagaaatagcgcaacgatgagcggcggagaggagtgtgagaggaacattattttctttcttttcttctttttttacaacccctaattgccattatataaaacttaattttaccatgtgacagcgtgtgatgaattatttgccaactgtacttttgtatgaattatttaacaattgaatttagtttaaatcaactaatctttgagaaatttagaattgacaaattttgagatgcaagaggtaacaacaaccagttttatacaactaaacaaagaagattcccacatacaacaatcccatgttgcattccagatatcaacctcatatatatccaagctgagtcaacctcttagccagactaacccttgcccctgattacgggagcttaagattctgagaatctactgtttggtagccagcttctgagaatttggagaagttggattttctagtttctgggttctagttcattttctggattctacgactacagattcttagaatctggatgacaatttgaattgtttaggagagatggagattttgtgagaagttgtagctactggaagctccccaaaacaaaccccttatatggatggctcgacatccaagatgttaggcaaccaaataatcccttagggaatgtaaggagttttttttagaaaaaaaaagataaatgaatgaagggaggaattaagcaagagagtatatatatatctagcgtgcataactgcactacgaatggttagatgatcgagcgacgcgtacaccgtatcgatcaatcagattctccgtgcccttcgcccatttttactagtagctgcatgcagtagtggtgtcgtcgttgttggcatgcatgcatgcatgagtgcgtttggaagatctcccaatatttgccgctagcatgcatgcactgagccctgattcgctttaatttgacaccaagagagagatggatggcattatattgcattggcaagagagaaggacgctccaactaagagcagctacaatagcaaggctataagctagctataaatatattttagatataatagaagaaagagaagagcagtgtgctatagatttgtagccagctgcagcacggactccaagacgtaatgtgtgtatgacaggtgggatcagatattaatagtatagcaagcaactattatatgaattggttatagataatttggagctagtagttggctatactattaaacttgctctaatggaggcaaatggggctgtggctaaatgcaccgtggcccccggtgtctcgctcacgagggaaaaacaagatgatgtggggcctaacacatattgcacggatgacattgcaaccagtaggggatttgaggctgctttgggcactagcttagcccttttggccttgctcccctaacttttcgcaatagtgtgtttgtgtgttgatgtggccaatctatctcgagagagccgctgagccatggagatggtgcatgatgagatatgtattgtcacagtactgtgtactttgtaccatgaaatggggggcttctttcaatggccagaatgggcgtaattatatgatcaccatcagatgcctcatggccagcttccaaccaacccggtctaaccaaactatactattagtcccatcatctcacctaaatagctgagtataagtcataacgattattgattaatgataaaagaataatttatatgtatgtgtattctagtgatttataagctaaagctataaaataaattacaatgaacgaaaaacatcaaaatcatctccaaaattaattcttaaaatttaaattttggttgcgtttgataaacagaaaagcaaacaataaagctgatgtgtgaaagcgccaaaatatgatggtagagtcatgggcatgtatgtgacttcatcgctttgtttaaattctgatacacatgatcatgaatataaccagtgggcttttaacacaggatcttaattagtgaggttgagatttatcgttggtcttctcgtaatttgacaaggcgcgcttattcacacgattatgtttaacatgtatatattggtgtgtgcatgtgcttttttccgtaattttttttacacgtataccggtcgtacgtattgtagttatttgtcaaatcccaaactacatgcgagaaaggacgatgagcgtactgacgatcgcagtagaattttcccgcggtagttccttcaccaagcttgaagtttttgttttttcttccttccgggacataagcctgaccgattgtgttgtgtattaaaactcttttcctttcaatatatttatgtatgtgtattttttttcgtgctggtgaaaaaaaaggaaaggacaatgagcgtaccgacgatttaattattggcaacagcgaggcttaatcatgttggaaaattaaaaatatatagaacttcttcgatgaccattacaaagatgtgtacaaactttaagactcatgaaaaggctatgtgcaacttctcttgtaccttctcactaaggaagtcgtacgtttgatcacactaaaaacatgcatatatacttttttttgaacattaacatgcatatatactgcttgcgcttttccatagagatcagttgacacagatattaaactataccaccttgcacctttcaaacgttgtcgtgtctgtacggcagtttagttgggagcaacagtacatattaactcgcatattactatatacttccccagtttcttattataggtccgttttaatttttctttttctatttaattttctaagtctgatcaaatttatagaaaaatatagtaatatatatctctaatataaaataaacatattatcaaaatatattcgccacacattctattaaactaattagtgttgtcaatgttgctaaaacttttttataaacttgattaaacctaaaaatattttactataaaaaaatatcaaaatgacttataatataaaatggagggtgtactcattactacgaagtatatatcttcatcattcttaaattgttattttaattacgaatactgctttacttccaattatatcaattttaattacccctgctttttactattaaggttatacttttgatcaatttttgcactagtccctactccctacttgtactacaaatctacaatcagtccaaacgttatttttttttatcgttttcttctctagtggattatatctatttattatactatcacctcaattatttattggcagtgaaatatccttttctattgctagtggaactcgtaaataaatgatgtacaatactaaccaaaccgaaaaagaactctaaagctttttcctaatcaaacttacttaactaagtatctaacggtaagtatggaccagattagcggtatgaaattgcaggaatttcattttgtaaatctgaatatatagttacaaaaaaaaagcattccactaaaaagttaaaagttaaagttaaccaagttaggtttggtctggatgtgccacatgtgtacgcgcgtcttggtaattttaagaattcgttaccattccatttggtaaaatttcttcttaccttttacctttctatattcttcccacaagtaaagaaaatcttatcaaatcttttggagattcttcagtgtcgttattgaagtaggcgtgcaacaacgacaattacaaccgaagagatgattaattgctctagacaaatgcccattcgtctcgcacctcaccactgaatttctcaatttacaaagcgaggcacatacctgcagtctaattttcaatggaagaaaaagacagaaaattatattttaagtttgaagtgttatgtataattactacaatcgccaaatcattagccctatcaagacacgccgtacatagatgaattattggtcgtcgaattgtataattcgtccttttcgaaaaaagaattgtataattcggctggatatcatcgtcatccgtgcacgtatcctcatctcctggggttaagttgttttgattagttagcaattttgcgcccctgaaaaaaaaactagctgtaatataattaacaaataaaagtgcaggtcagatacacacacatcaaatctttgatgtgtggtgactagtttcaattccattattaaaaaaaatattaaataagaacccgtgcacggaggccatggcaatatgcagaattaacaaagatcatgaacaggtagtttcgctcgtgattatccttaattaatcatcaactctgatcactcgccttgtttttttcgtaatcattatcacggggagatctagctgcccaatccaaaccatagagatatgtattgactttggaagccatcgtgcggacaaaagcagcatatctaatgatatgattagcgaataacaaaccggccctcctgcaaacgaaagcggttaaaaaagcgcgcgagcctaacgtttcacactcacacgtggcagcatctccttggttccacgtcagcatcgcatccagccgttgtggttccctatgtcagcagcattgcccgtggtctgatgtagacaagccctgagcaccacactgtcagcagctgatcctgtaaataatccaacgtgatttaccgtggaaaacccaaaaactacagtagaagtgagactacactcttttatctggatgatgagtgccaaaaacattattatctagaggatgatgccaaaaatattatagttatacaatacagtcatatatgaaacggaaaataatatccagtgaaaaccacccttaaatgttctctgaatttatgaaaaacatatattaaagattggtataggcatggaatgcattcccactaaatctttagtccaaactcaacttcatttagaagaagcataaaagacaaaattttgagggaataaattacattttttaatattagaaaaaatacccatgtgttgcaacgggtgaagtctattttaatcttattattgttatatggtttagttaatatgaaatttacagtgggagttcgtttgaatatatatatttttagaaaatcatgagctgcaattaggagtccgatcgtctcaaattagcatgcaagtttttttaaacggatttcttatatgattccttctgcattatcaaaagtgaacgatattaaaaaccgactcaaatacggatacgtattttcaaaagcaaacaaacttaaaaactgactcatatacggatgacgtaccaaaatactggcaaaaacatgtttaatttttataatagtagagatatagttggcgccaagctagataagtaattaagtattatattctatcttgtgaaaaattaattaaaaaggtttctaaagtatcaacctactttctcttgtcccataatataagagattatgttttttttaacaaacattaagaaagtaacaaaagaaaacaagtcatggtacaaaatgtgatagttgaggaaataaagtacaaaagtaaataaagttctaatatttttggcctctagaaagttgaattccacaaaagatttacaaaaccagattttttttttcttggaaaaatcttactaatttaaatgtccacgattacttgcagaagttgtaattagctaaggcttgagattcacttccattttgtctgttttctcactttcttcagcccaattgaaatgttacattttttttattacacggtaggggctcgggcagtgctggagttgaagcagaggatgagaccggccaaggtagatcgttcctggcagcatggtgctggaggcgctaggatcggtgggttcgacctccaaaatttgcgagattgatggcgcgatggttttgagggctccttcttgagcacgattggcaacgacggagctgtaacgtgtcggtgaggaagtcctatacgtaccggtgttggatcaacgctgaatcctaaggcgatgatgaaagggaacttcttgtgctgcttgatgatgtgaagacgatgacaaagaaattaaacgcccgcgagatcaatctctcatgggtgatgactgacgatgtgaaaacaacaatgaaaacaaaacaaaaataagataagggctgccctgggtgatcactactcctagggcaacaacggcggaaccgtaggagagatgctagatcgtccactctaataacatgaaaacttatggatcacttgtattgcgtttagggggactagcgtaaaaaaagattatatggcctgattttaagcactcccaaatagatagaaacagaaattaatcctattctataataacaaccggatcacatacaaccgtatccatatgctctaaaaagatcttgtgaatttttcaaaacaaatatgtaaaatccctgtacattatcttctgttataattaattattagagcaaaacaagttccttactaattaaatatacaacagtcaacctgctaatcattggcacggctagccaaatacatcacatttctagcccatgggacaactgcaggaaattacaaatacgtacaccaagtacctgcagcaagccagcaactgtagtagtatattttccttgagcacatcatagttagatgttgctatcagcaaacagtgacaccagatccatctattcattcatgtatggaaaagagagaaaacaaataaaaaaaaaggaagggcacacaagaaaaaggaggaaaattataagaagataacagaaactgccggatggagcaagagatggtgccgaccgctgacttgtcgggttagtgtggtgacacgttggatggacaccagatagggtggcgcccacaaatgatttgcaatcctggaggtgggggcgcatttgatccgctttgggaaccgatggtgacgatgataatcgccgtgcgattgtcgagtgcgcacatcggattgtctgtgcattggctcacagggtctgaattaatggatccccccctttttttgttctctttttccttcaagtcaattgccatgagatgactcatgggacctaatgagaaagtttagtttagtgcatacataattagtgcaactatactaaggttctgaaccgtgataccagacaaaaattaaaccatgattctcacctttcatctacaaaattagacatgtattggttgtggtttgtcatttgtaatatatccttgtaactatatattcaaattaagggacaaatgaaaacatcttttttaaagaatgagtgcggtaaaacctcggaattttaatccactaacatgtgggtgcgaagaataaggggatatataaaattaaaataatattaacagatttatcattaaaggtattataatatggttgtaattttaattattcgcacagatatatgattaaagaaataatgatagaatatcttcatttaatattgtgtcgatgttctaaacaagtaaaaaaagaacatagagagtaagtcagacctgtcataagtggaagaggtcttgtagaatttgcctttgtgctcatcctcatcacttacctcacaatagttgacattcgttggtgcgggagagaacatggaattgcttctgactcacttcatgaatttttccattgatttatgaaaaaaaagttctacttttgctctccttttatccttcactcatcaaaaaggaagcaataaagatacactcagttactttggtgagtttcatccttgcaatatcattaggtgacccatgatagtgatcattaacatttttttttaacttttctagagcatgcccatccaactactaataaccagctgtgcaagttcaagatgcaaaggtcgatgataacaagggaaaacaatagcaatcaacctgttctttccgatggattatattgaaaatcaatatgaggaagagaaagtgagaagtcatcagctaattaaggtactacaagcaacagtttagggggcagttcgtagtgctacttagggtgtgttcgaggagaaggagattgaggagattggaaagatacgtaaaacgagatgagtcattagcacatgattaattgagtattaaatattttaaattttaaaaatgaattaatatgactttttaaagcaactttactataagaaatttttgcaaaaaacacaccgtttagtagtttgggaagcgtgcgcacagaaaacgatgtgctttctcaccctatatcacacaaacgaacgcagccttagtgagggaaaacaaggagagtttgcgtcatgaacacatcttcatgtttgtgcaattccttctgggtcaacatccaatcatcgccaccttgtaatagttatcaccaatgtttgcaaatgctggggcacaagtttttgtttgggccaaaattgctgttcctacaagtggcagaccccagtctcaccatcctctctctgtgcctgctactactaggaagctataggggacaagggttccaatcttcacgtgccctttgaatcacaaccttatcaccacaccaattcaccatgccagaacaatctgtcatggccatgctttttccaccttgtactctcttcaggaatcacgactgcgacccaaaccaccgtatcactttttttttctccaatagttctcatctcttagatcgtgctgtagagaaatgaaaaccgtcacggaaatttccaacctactgagaatcatttctacaatagtggtatcttttttttattctagccatataaaattgatatttttttttctaatatctgtagtatcatagtactgatgtcgctaataaatagttaaattatgaatatgaaaaattcctaactgactagatatgatattgctttatatcgtttttatccctctctgtagcgtcagcatgcatgcaaatccatccaaaaccacatggatggaacaaatatatgacaccaaggtgtaaaattttggaatgaaatttcagttcttttagtcgcgctaatagaaacattaaggcctcttttggaatagagcagtttcagagttttttttcttagaaactaaacaaaatcctgcaatttttaaataaataatttcttcattttagagaagccctaaagctggtgaaacatacacagttaaagcttgttctttttttttctccttgaatttccttttttttcctgatatgttttacaaatagaactgttaaactctgcaatccataagaccgacattatggtttacataagtgtgctggagcctggagtgcaactgctagggctatcttgtggggatcttggactagtagctcaaattattgccggtgccggcatgaaccatgacctcaccaatatattctcttctagatcaagtagaaaaggaatactttataagtgtgttcaccagaattcttcaagcaattgcataccaatcatattcataagttctttctttgtcaagagagatttatgtgcaatgcacaagatccaactgtaatagtagttgccaacttgtaggatgccacataactaggttcgagtaatttttgctcaaatttcgatgtatattcctctgtattatcctaaaactgacttctcaattttaaattaattttaagatatataatgagtgattttacagtccttgagcaaatactgggatctatattttctagcgtaaaatttagtagtacttggaggtacggaaaatttccattaaaaattttagtatctattaagaactgtaaaatttctctaaaaaaaatagataagccgggtgctgcgtcaaagatgcctaaggcttattcttttcatattatttaccgggttgttaaaatggattatttgctcaatgctttgaaaaatatattttctcaagaaactttcttttactataaggccacttgattttttaagtttatttatcaaaatattctatttattcctatgattcaagtagataaccgcagcaacaatccggtcaaatatataatctatttcaaactgagcctgaaacgattcttgattataattgcacataggcggactcatgagtcatgacaaatatttctaacacttccacgtattgttgcgtttcctttgtctgttctcatgattgggtcagctgatcgagctgctcaactaatctgcctttgttaaccaagttcattatatatctgaatatctctatgcttggtaatgttgctcaacttgtcctttttcatgatatagcaggccgatctaccatcctttatcatcatttgtttaactaatccttttgttcttaaattaccatctaaaacgtatagatcactacttttgcactcattcgtatttttctacgtactttcgatcatgatctaaccaagtttctgtgtgcggttcttatctagctctatacaagatgcaacttgcaagtttgtttgccgactacttgatttctcaagcaaatagaaatctggcctatggtaatttccagcaagagaaatgtgttgttaacacaaaggtgaatcatctatctcttgagacctttggaaatctactcttgtgcgggaactaattcgccaaattcttcccagctcaagaggggattctatgtgataaggcaaggggatagattttccatgtgccaaaagtggcttagattacttgcaatgctgccgaaaatgcagccaagggccatgtggaatcctatgctgatgaataacttcagacatcatgatgagcagaaagaaattctgatttctgacgtatcatgagaaaggtactgaaatatcctccgagaaaaatcctgaaaatacgtttgtggactctgtagaaagcaatatattcagttcattttgcagcagttcatacttcgtttctgaatttatctttttcagcagaacaggtcctaagtacgattaacctgcacattatttttcttcctcagagattcttggtgtcttgtaggaagtaaacaagcaaatgattgataataacaacctgagatcacgtccatatctttttgtttgctttctgtctggttgaattggcctgtttgaggctaagacaaaccactcttccattagagcattaacaaaagaataggctaatcatttggtcatgcaaagtgctgataatatataaatgcaccatatggccttcagaaaggcattacggataacgctcttctgtttgtttggacttaatagttaggtcagaagcgattggccaataaacaatagacgcaaagcaacagagcataagccaagcacaagatctcataatatattttaggtatggagccatgtttctacaagtcaaaatgtgatgtgcatatcgccattagcaagcctccagtgcctctttagaaagggctattcgtttgactcgttattatgaggtggacatcattaggtgaagtagcaaaggttattgttcagtgattagcataagccccgggttgattgcgtaatgtgtgaacaaagaaaaacaaagtggggggttgcaagatagaataagtgatctagaccggagataattttgtcaaagcatatctttttgagtttttcctgaaaacaagtgttcgatcacagtgtgatcacaagaacagaatggactaggtaataagtcactacacatcgaattgacatatgtgcttatgcaagaacaaactgattggagaacagaagagacatggcagcaaaagagcttgaggtcagatcatgattttacctgcttccatatccagccaaggtgcaactgggagttctcaatgtttaacccatttgaaaaaatcgaagtccaccgaacaatatctgcctattgaaattgcaagttgggatgttgcctgtgtacgtgtcagcacaacagaagctacagaatttcccagtgtgctcctgtcagcctgaaaatcgtgtacttttacaaggacagatcaaaatatccagggacgataatgattagtcggcaatactaatcaaaaaccaccaatcatcggtattaatcatttgcttcttgtttaatatgtagtccatttccgactgatcaaaaaacaaaaccagctctgaatgtcctgattcctgaataatttatactacttggtcgtacacgaattctctcacactaccagctagtagtagtcagaacctatcatttgcagttgcagatttggtcctgcagattagtccaaatagaccaacacaatacaccttacttaaccttcaagcacgagtcggaaaaaccacacaccggcaaattaagcgcgtgcgtgtgtgcgtcacgcacaaacgccatcgccgagcggcgccatgatctagcagacaaaaggaaaggcaaaaaggaggagatgaggagaaggtcagaggatgaatcgcggcctatccatggtgatagcagaaagactccggcgctatcatgatgcactgtaaggcgtaggtagagataacgatgtccctttttttttataaaaagtgaatttgaggttttacgacatgtttttataaaccccagatttttcctttttattacggcgtagaggtttcatgaaataccatatttgtgtctatatcatatatttggctatagtatttacttatagagacaaacatacttgtacaaaatagcagatcgttttcttttaagtacaaatataaactgaccactttctccataaacatggttgctagctagcaacatgtaaccgattaatgtgtcattgcaactgcagtttatattgttgtctttgccttcttgtatgggagagtgagaaggaaagatactagacggtgaaaatgtttatttcaagccacaggtatttcttaaaaagagtacattttagtaaataccatgttttatggctaaagttgcataaaacacctgatattattactaatggcacataatctcggtttttatggttctaaagttccacaaaccctaccctttacatgtttgagcacacatttacttcgatttttaaaatagtctatattaaatttgtagttattgattccttgactaatgactaaggttattgatttaactcttcactactttaaaaaaatatttgataaaactagttacgatttgaataagtgtggggttttagaagcacttagatcataaaatctatggttggtgccacaagtcataatgcatgcatgtggtttctttaactttgaccatagaaaatgtgattttttaaaatttactctattaaaaaaaatactccgtgtaatacaatggggtataaaatactttgtataaatttggggtcttatatatgaagcatttttgtctcaacacccgggtttcttgaaacaaattataaactatatgaaactccatgcattgttgtgggagttttgtataatattagtagaaataacatgtaaaactaacatataaaatagctacactttatataattttcatctatgatcaactatgcaaaaaaaaaggagctatatataaaccatttgatgatgtggtttacaacaacttaaatcaaatatggttgatagtttaaaaaaaactaagatgatgtgatttaatgaggggaggaaaagaaaaaataatataatttgatcattcaaatacaaaattaaggtgatatgactttataattaagagaagaaaaggagtaagataatttgaaccatatatacaacatccaaggttagaagcaattgagatgatgtggcttatgaaagaaaagagaagtggtattaactacactttgtagggatgaactttcataggtttataggatgtggattttactatactaatgccatcaaaaagtatggttttgtaagaaagaaaaaaattgcttactttttcttatcttaactttagcagcgagctaaatgacaataaccggaaaagatcagatcgttaaactaaggtggccgtggatacgtcgaatatatgccggcgggtgatccacgcgtcgccggccggcgacttgagcggcggcacgattgaaaattccggccttttggagggagacggggataaggcacaatggcgcaagttcgtagctagcggcaggcagagagctctctgttaagttggggtttatgtaaattaatcttgccgtgccgggtgacgcacgcatgcacggcacggcaggacgatgcgttagcttttttgcacaggtagtgaccggctttgtgttgggggttcctggataatgttggcatgtcaggtcagggtaggtcatgcgtttttgtttaagccgtgtcggccgagctgggtgaacaggattaggagacagggacatgggggcaaagaaaaaaaaagatgaaaacaatcgatcgatggaggatgtgagatgcgtgagcaggcaccaactaatgatagatagatagatagatcagacgtaaggaggagaggaagagaagggttaagttgcatgcatcatgcatatgtgcttgtctactgggctatgcgtacctaaacactggtcgctaatgggctgtgacggcgatcgaccgaacatgtcctcccctccccggttgtttcactgctcggttggggagtcaaatcgcgcgtggttggatgcatcagcagcggcaggcagcagcagcagccttgatgtgtgtggtgggtggagacggagcctgtcgctgatgaaggggattagttagacagaagtaggagtagaacctatgaaccaacacggcaacacggcctgggccagaagtgagaagccgatggagaaacgcttccgggcccgcgtgctaccgtatcgggcgtgccggcccaggcgggagagaaggcggcacgcggtcacaaactcacggcgcggggacgcgttcaacaccgcgacgagcccgtgtttcggtgtttggggctttgggccatggggcgcgggtgcgtgagagcaagtctaatagtacagtctccaattcatctatagttaatctaatagccaatttatataatagctgcttactatattattcatatatggtcccacctattatacacatagtgtgttttggagtctgtactgcagctggctacagatttgtagcccgctgctcttctctattatcatttatcccattaaaatatgtttatagctggctaatagcctgctattgtacctgctctgagcggcaccgggtgattggtacgtaaacagcggcgcggcgtcggcgattccaccgcgcgatccttggcggattagcgggacgaatggcaccggttttccgcaaaagaagtctactctgactccctcaattttaggtctaatatgattcgtatctctcaaccgtaataccatacattttcaccctctagcttattaaaaccgtacaatttaactctcttgatggtttttagaccagtttttgctgacgtggctcgttactagtccaactgactgagacagacctacatgtcagagtccctcttcctctcctttcttctcctctttcctcttcacgcctccatgtccacccagccgcgccaccacgggcacaacgctaccacatcctccgtgcaagctgccctccctctgctctacatcctcgggcccggcctctgctgcggccacctcatcggcggcgaggacgcccttgttcatccattcctcctccgccatcgccgctatcgcgtggtcctccacgacgtgcctccgattggcatccccggccaccgtcacccattgccgtttcgcctgctccagcagtgccatcagcgacaccctcccaccccgtgctccccccgccgctggcccgctgctgccacgcgcggagcagtggccgtccttgtccacgttgtggattggtgtccttcaacgatgttagaagacgggtggtcatggttgtcgtcctcgattcaactcatcatgtcgctgtcgcggagcttgaggagtttgtggagtcagcatgcgccacttcttcgtctcctcgctgccaccgccacttctcttcacctgccatctctagccccctattgtaaacccccacccccttaactagtgcaacggtgccaggcctctccaacaccccatcaccgccatcgtccctcccttctcagcgtcgggccaacgggaccgagctccatcgctacggcggagcgactccaccatccaagccgccgaggtggcaggggtcttgtcctgatgagcacctggaggattgccatccgtctcccctccctcctatacaccgagccaacgaggccaaactttcttgttgctctgccatccatgccgaggctcaccgtggccgagcgcttgaaggaccgcccgccatcaccccttcctcctctgcactggaccaagctctatagctacggtggcatggctccgctgtccaagctgccgaggtggtggggggctcgtcacaggctcacagccgagcgcctgaaggattgcccgccattgtctcgctgctaccctactgccgagagaaaatactacatttgagaggagaggtaaggaaaggaagagaaagagaagaatcactgataggtgggtctcacatgctaacttaatctattgaactatgccaatgtgacatgttagcgaaaaccgtcgacaaagttaaatttcacagttttaatagttattaaggggttaagatatctggtagggatacatatcagattttaccttaaattaagagagtcaaagtggatttattcctccgcagaatcctcgccgttttacgctagttgaggcttcacgctctcttgggctcctattgtctctagtcttctgggctaacatcagatacaagaagaaagtttccgatgggctccggaaacagggttgcaggaagaggaataagtattgtcactgcctgcgtttattagcaaacatgccaaacaaaatacagcgttagcgaaaataaatatataaataactagaaacggctaaacaaataaacgacggtatgaatgctagtgtctacttcgttccatcatctcaatatcttcacaagaacagtttgataatgacatcctccatacatcgcagactatttaatgatcaggcaatcagcactcagcggagaatcagcactacattgcagtttccagggagaaacaagcactgtaattatggagacagaagccacagttgacagcaccacattgcagtttccagagagaaccaagcattctaaaaggattgctcatgaaaaagataatgaaattattgagacagaagccttgacgaaggcacgctgggaacattcagtgttagtgatttatacaagcactcggcattagaaaatcgatccattttttcatctcttctctaatccggtaagtgccaccattttctgggaagacaccctaaatctctcttcctcaaagccttgggattaaacttatttctccgagatatgtacactgactgctagaccgttacattccattttgttaatgttcagcaggactctttgcacttcagccgccgcttaagcacttcttgtacttgctttgcgcaagattcagcaagaaatcggtgaatatgtgctcataacctggcattttcccgaaccctgcgcaagcaagagggagtgagcgtacactcaagaaaatgctgctgcagaacaatgatcatgctgtgttaaataacaagaacacagaaattcgagacgacaaagtactactggataaactggatcagtattaatttggcctagaagtccaggtatgtgtagcgatgtatcctcctttccccttaggctggaataaaatcaggcctaacaaattctgcacgaacatatgaagagaagaaaagaaacgcaaatgatagtatgccatttatgaaggcagtgggaaaataactgcacacctgggaagtagttgatgtcaattatatagtaccgatctttggttccaagttctctgatcatatctatgttgaacaatcttaaaccctgaaatttttaagcctgtcagatgacgaccatatgaaacagagcttggttaatataaatacatggccataccagtcttccacgaagctcttttcccagtttctctaggagtggtcttggaggaagttctatcatgtaacagaaagttctgatcaatatatagcaaaagtttatctggtgccgtcgactactcatcaaaagcaaaataaatcaagaagtatcgatgtcatagaacaaacgctgtcctcgacttgatatatggtaaggaaacataaaaactctttaccatgtacactgcgttaaggttctaaagaaagtttgtgtttgaatttagtgccccctcttacattaatgaagcatggatcaataataaccaaaatgaagattaactacaatactgcagatgtctcacctgagatatgaggatcgaggtctgcatggtctgcactagctgcagcacatgaaactcttggaaatcgatagacgccaacattgtttaataagtcataagtgttaacatcaggaagagaaaacctccgtacaacttgtatagtttcaccaatgatgtacaccttaaagaggatcccacctgtagagggaatagtttaggtccgaacttctaccgttggaggaaaaagtctcaggatatgcaaaagtactacagttacagggggggaacagaacttaccatggttcacaaattcctggaggaccagaggaggatcaagcattgataaggatgcctcatcatatgcaagagatagttcgtgggatttagatgttccatcaacaaccaatggcttcgcaactgtatagacagaagcacttcgcatcaaacaatttctaagctcaatagttccaagaatgaaaagagaacatctcccaaaattaactatcaacgaaccatgcttaaatattatctgaaaaacagaccgcatgttcaaaaacgaactgagaatggccaggtgaaaaaatattgccggaataaaaatgttgaatatttttccgctgtatttaaacattcgcatgatttggcaatgttttcttatctagaggaaatggatagttttaagatgtagattatgaccaattacccaagggcaaggttagtccagccatggcaactgcggttggtatagaggatggatctctcataatgaccagttggcgtggagtgcaaacttctcctgcaatggttcaatgcataaacaatcatatattggtatgaatagatatgccctcaatagatttagttgatgatacacttttggaattctgccttttactatctcggtacattgtattcacaaccagctgcaaagaaataatgtttcccaatcaagcaacatttgtccttgaaatctctgcaaagcaaaaaaatctatgggtttctattgggaatttcagcatttctaagagttaacacaaatttcttttgtttgaagaaagaattacatagcagcattaattggaaattcctgaatcctgaggttcacaaggaatagaaaatatatattgtttatcttagaaggataaatattctgcacatcgcttttgaaagcaaaagtttcttccattctaggacagaagtttaaatgtgaatatatttttcttttttgcgactacacggcagacgcacacgcgcgcgcaccacactaactcaactgatgcgcccctaacacacactctaagagacagaaaccaacgacaatcgctgatctcactaagtttctagtgaaagcccacttgggtgtgcataatattcgtgagcatcaggatttgaaccctggcaggtggagtacctacgactacaccacatgaccagtgcttccctgacatgtgaatatattcgataattaaacagacactaactaacattataaacattagaaatggaaagtaaaataacgaatccattttatagcatataaatatacatgttaagcttcatgattaccatagaaactggataagttcaaatcagatacttctgcaagcatagattgccgattattcagatgattgatggcatttggtgggtcaaggacagtaacctctggatgttcctcatgataatccttcaggaaagtgaaaggagttaggttaacagagagtttcaataaatgggcaacacagattagaagccaacagcaaattccaagaattatggatttatgttgagctttacaatagggcactgcaatcaaatagtttggatatataatcattacatacagtgacaaacatctactgctcatttcctcagttgataacatatttccccatgatgaggcagtgaacaagtagaaaaaaggcaacgatggtatggtcatttactgtgcatcatcagatttctgcatacgtactcagatcttacctccagaacctgttgccattccttgctagtaatctgcacaaagaaatttcttcaataaaatatgcatatactttaccaaattacaatgacataattatcagaaaacattaattataactaaagctcataaatagatgatgttattctttaacaaaatgcatcatacagggccaatgggcagcactattttagtccagctttaaaaaggtcacgactaaccttgtgcaagataacatcaaatgggccttgttctgcaagcgggcgagtgtcatcaattgctacaagattaattcccttcttcctgacacagtacataatgaaacatcatgaaatagtgttatacaagaagaatggcaagaaacagaaatggatcctaacatccatatggaagtacaatagccatcttgaccaagtccaagccctcacagaatcaagaatttttttagtacatcatcatctctccatgtataacatgtcgtttgggctacatttatactctatcgatagtataaataagaatgataaaaaaaagttaaactgccttgcaacagagtatttctcaattatactttgaaaataagactactacagggatataaaaaagcgtttagagaatatgcaggttgtttgaatgaatatagttggattttgcataaatatatattgtttcctttattttcttggaataactaaacaataaatctatcgaaacaaaagcacaaactaggcatgcaatacacaaatagttttaagcaaaaacattttgattttgcataagtatttcatatattaatttcatttcccttctatatttcagcttgtgttgcttatgtctgcagcctaccgagcaactagcaaatgattgactcagctagtcagcttggatcttgattcagggagctaacaagacaatcacaaagatcgtttgtcagcggtccatgttgccatcaaacctagcaagtcagtcactaaattgtaaacgatcccagaaaaggcattgccatcactaaagctgtcgtaatccatgtgatgtgcttatccatgggattatgggaatattccaaactagaatcccagacaccaagtagcaaagatttgcatgctaagacccatttttgacaagttggcatgataatatacaattatagactatagagacccccgcatgcagtggaactgtcaacatgagacgcacgtaagggggcatctacaaatgctaccagaattcctaataaacactagccatattcttcagtttacaatatatcgcaaatgcagcaagcttcgcccagaatccactatcactagccgcccctgctaactttatactccagtagaggttcgattcgatcactacttgattagtgctacaaggaatagaattgcattccattcccaccccccattttgttatggaactaccaagttttttacctgttctcgcaaaaatcctctgggcttcagaaatagaaccaattacagcatttaatcaaagactcaaaatgcaaaactgtatctcataaaccatgcattcccccctcaaatcatttaccatttccctccaacagcaaaaaattctggttttagtgaaaaaaatttcgttgccactcgatcaacaagaaatccaacaaaaatactctattgtctcccaaaatcctccaccacggccacgaatcagcaggttcatctctttgagcgttgatccaggtttttacctcgccagcaacagcagattgggctgaaggaagctcttcaccttcttcttggtgagggcgtaccccaccacgagcctcgtcaccggaacggccccgccgttgagcggcgacgacgacagcgccgccgccggaaccatcaccacttcctcctcgtcctcatcgaaggaaacctccccgtgcagccgcataccccgcccgcaaggccgcaacaactcccccccaaaaaaactctcctcccctcgtctcgaatttgccccaagaaactaaacaaacaaacggcgaaaatcagggtgggaatccgcaggcaaaggcgggatcgagcagaggtagccggcttcttacgaagcgaaccactcccccctagctgttgctcgagaaggatttgggggaaggaaaaaaagaattcttgttaatggcgagacgagtggaaggaaggggaggaggaagagagcgagcgggtatttgtaggcgacgaggtcgactgccattttcctccgtgcctacccgcctcacatccgctgctgtccacagccgtgctgctactcaaattgcaatcttttttcgcattggcgagcgtcgatggagtagtacgtagtagtacaagatttgggaaacgtgttctgcggacgccaaccgatggaacgacaaaaaaaaaaaaaaaaaaactatgcgcgcacacgcacggccgtctcgattcagtgcgtcgccgttgaagccatcgttgtcggtagctgcttgcaggaagagacgggtttgggttaggccacacatgaccatagattcaggtgagtggtggtggggcggcgacaacgggggaggattgctagtatcgagcaaacgcgacagtgaccctgttggtggtcaggtgaagtagtaggagtaattttttgtgttgatgctggtggtgagatgagacggcaacgtgacaagtagcatgggtttttttgcttttgtgtggatcggttttgggtggtggttagataaattaactgagctgcagaggatttgatctcgctcagattagtcgtccgtggacagacggggtgagggtgcagagcgctgcagtaaatcccgtacgtcctggcgaattgtggaccatgtaaaagcccacacttgttatccagtgtcagtgcagtatgcggcccatctaaataggatcatatttgcactatggtccctactacagtattaccagtacttcgcaccgatttagaatgtgtttggttgcttatatccttctagtctagcccatttctctcatctaggttgggtttagaccggacaaaagatacacgcagtgacggagccaacaccgccgtaaagcctaggcgattagtaacgtttgttagtgaccgactgctacggcaattgaaacggcagcggtggagcccaggagaccgcccgacctgcccgggagctatctccgccgctggatacacgtgcatgcatttggttgttcgtattggtttagcctagctactataagattttgtttgattaatttcacaaaagatactatatgaagattttgtttggttggatgcacaaagactgtttagtctagacaagaggatacatgtgtaggtgtttagttgttcgcattggtttagcataagggtactgcggcggcgaaagatttactctaatgcaacgtaaaaacttaaatatgtgcaacaaattcaattaccaattgaaacatttactctaatgcaccaaacatcaaattaagagtttatcagaatataatcatgtgcgatgttattataaagaacacaaaaatataatcaaatcatagatcagataaatagttttatgaaaaaaataattttaaagctcgcgttatacttactcctacgtgcatgcacaaagagggaaagaagcatatattgtgtaccgagtatgtgaccgttcgatatttttgaaagcaaccggcgcctgacgtgtagcattgttgccattagatccccatatattacactacatccgtctcaaaataaatgaacttgtgggtttccgggttcaacgtttaaccgtccgtcttatttaaaaaatttatgaaaaattaaaataaaatagtcacacataaagtattattcatgttttatcatataacactaataaaagtactaatcatattttttttcaaataagatggatgtgtcaaatgttggacatgaaacccacaactgtatttattttgggacggagggagtatagctttgcacttagatccccagtgtttcggatcaagccctgaaaaatgcacttagatccccagtgtttcggatcaagccctgaaaaatgttttctcaaaattagaatggtagatgtagatggccggctgttgagctgtcctctcgctgacaggtttccgcttctccggccggcctcgcggatggattcgttggacgatggatccccttgccccctcgagcgaagaagatttaggcggcggtgggcagagaaggtaaaactaacggggcgcggcggtggttacctctcctacgctatggtgactggtgagcgggtgctgatggccggaggccgactgccgccgctggaggagacgctgcgatcgccgttgtacacagtacatctgctccaagagttcacggatgccgccggcgttgcatcgttctctcttttgttctgtgggctgtggcaccgtcagatcgacgaaattaatccttccttgcttggttgccatggacagcgggacaggtagatggactcaaagtagacaaccacgcgaacgaagcatgcacacgacgtttgtcattgtcatcggtttgctgcaggcagagttcattgtgcctgttattttcttcaacgaaaagtggataaagttttacttcctccgtttcaggttataaaactttctagcattacccacgtttatatagatttaatgaatctaacatgggcaatgctagaaaatcttataaactaaaatagaggtattagttgaaagtggcacgcttttcaaactgctaaacgatacgtttcgtgcgaaaactttctatatgaaagttattataaagggcctatttggttctctaccctaccaattaattggtagtgccaaaatctaggcaaattttggcactatcaattttttggtaggacaaagttagctagtttatgtttggtttaataccaatataaagtcaaaatttagtatgagagtaaaaaagattctagaatgtagctaaattgagcgtgggcactacgaattgtttgtcttcaatccaaattgagcgtggataaagggtcatgttttgtcttcaatccaaaacggcccaaaatactccctccgtcccgaaatattgacgccgttgactttttaaaacatgtttaatcgttcgtcttatttaaattttttttatgaaatatgtaaaactatatatatatatacaaatatatttaacaataaaccaaatgatatgaaaataattaataattattaaattttttgaataagacgaatggtcaaacatgtttaaaaaagttaacgtcgttaaatatttagagacggagggaatataagattaatctattttttaaatttctaataattaaaacttaattaattacagttataaccatctcgttttatataaaatatttagtaatctttatttcattttcatttttagaagattccaacgcttaaaaacatatcattgattcacgcggccgccgaggatgccgcttaccgaccaaacacgatccgtatgccgcgtggcaggacacgtgtgagataacagtgtacgctcaatctgcagaccatttgtttgaggagaaggaaataaagaagattggaaagatacgtaaaatgaggtgaatcattagcgcatgattaattgagtattaactattttaaactttaaaaaatggattaatatggttttttaaagtaatttttctatagaaaatttttacgaaagacgcaccgtttagtagtttgaaaaatgtgcgtacgaaaaacaagagacaatctcccatatctcccctgaaagaacgcagccattatggctaatctgtgcggggatcacggaggcgtttcacactatgaccgcgatctacgagactaccaaggagagcacgtacgcagatcgtgcgctaaactaaccacatgatcccgattcccgagtcgaaaaaacggggaaaagacaacaatacaattttacatcaaagctccgtaaactcccgaaactgaattgattgtttcctgaatcaaaagctcaacagaatcgagtctgtacaaattacaagttgctgaaaataagtaaaactatgaccgaactcaagaattgcataatttgcatcatatcacatatacccttttgtgttggttaattggaagatcacagtaaaccccctctatgttcatgacaataaacatttgagcaccggaaaaactaaagcagcatcagaagagaataaaccctgtcaggattggtacacgacacgcactgttcgattctacggagttagtcgaattcagccacggagtggagacaaatttgcaccttgcactagtaccctcggagtttcttggccacggtggtcaacacattgtcgccgatgtgggagcgcaagaaccggatgaactggtccttcttcatctgtcctctctgaaacaaaaagaaaatttatgtcattggattttcaggacttcagcttcgcttaaagttataacgccgttatgctgagctgaattcgctttgcacagaatattgacaggtagatgattctgttctactacagaataaagtcggcagcatattactacagaataaagtcggcatgatcatattaaaaccatagcagtgcggtacaaatcaacatttttacgtgctaattattgcgtatagtgaagagttagacctgaatacaacacaaaccaggcagagcaaaattgttcaactatatgtaagactaaggccccgtttgtttcagcttaagattattgtaatctaaattattaaatcagattactctaagctgaattataataagctaacataaaataagctacgagttgtttgtttctctggattattagaggcatctaagggtagtgggtctttagctactcaataatctagaaaaagcttctctagaggagattattagattatagtaatctaagctcctctagaggagattattatattatagtaatctggcttataaattataataatctaacataataatctacttatttgtttcagcttaatcctaataatccagattataataatcctaagctgaattaaacagggcctaaattcacctagcagatcagcagttgtgtttcagcccattgtttcgcttttacttatccaaacaatttattaaccaaaaaaaggtatagtaaaaccttttttatacgtgttcatgcggtaaaataaacaactaaaaaaaccacaaaatcaactcttatattaaattttgacttacaggcatgatcataagcgcgaaggggttgttttgtgtaagctagcgcaagattctaatcaatcatctatctagaaatgaaatgctcagcaagaagtaccagtttaccttgaagcagttgtacgtcctctgcaaagtctgcagcttcggggatggaacgaaccgctggatctccgtcagaagcatagggaacatgtcgcgagtagctgctggtgatggcttcttcagcttcgatcccaaccccgatgatcctgaaaaccacagtttcactgttatggcagtgccaaatgggaacagttccatccagcaaatttcagacacgagagaccaaccttccatctgcggcaggttgggccacctgaagctgaccacgtactctgggaggatcctggtgttcatgtctgtgctccatacaacgtaccaccgcggattctcaaggttgtcgacggcgctgtcgtattcgtcgctgctggggtggaattggggtgagctggcagggacggcctctggacggcccatcaggacgcggcacagcacgatgtgtgcctcgccattctcgtctggcttggtcagcatcgcactgctcgaagacaagttaattaactcgttaacttagttgaacattgactcacaaatttcatcccaatttataacaatttaggtagctactgtaccatactgtctaatttgctctaaattcaaacttagatgcaaaacaacgattggtagtttcattgtttagcaccaagatggcaggcagaaaataattttactcaagattcgtatggtaatatcgaaagatgaaatatatgaggcacttggtgaattttcagaaattactaaaaatgttctccccaatagttcaaagcatttgcagatggaaagagttgaaagcatttgggaaactcacctagcgtgagggtactgcggcggcgaaaggtgaacgccgtcgccgtgtgcgcgcccgccgagaaactgcccgttcgtcctcccgaagccgtgctccaccgccgcggccacatccgccgccggcgcgccgtaccacgcgaacttggcgttgctgccatcgccgacgccgcgagcagcggcaaggagctgtccctgcagatggaaggctcttgcccggggcccctgcgcgaccttgtgcaccgccgtgatcgccacgccgcgggccgccgccacgggagccatccggctgacgaagagcttctccaccaccttgtagaacttgtccgcctcgtccagcctcaccgccttcccccacaacgtcccgcgcgccttcttcctgtcgggctcatccgcctcggggcggctctccccggaccgctcctccacgccggacgacgcctcgtccccgtcctcctcctccgccgccggctgccgccgccgccgatcctcccccttcacctccgaccccgcctcgtccctctccctcttcctcttcctcccgccctcgggagccgggaagaagcacgcgccgcggtcgtcgatccaccccagcgcggcctcctcggcggtggcctcatcgatccgaaccatccgcatgaagtcgaacaggaacaccctcccaccgcaggcggcctcgcaaacggccttcccctccatgaacgcccgccgcagcagccccaccacctcgcccgcgacgtccgcccacgcgccgccctcgaagcagaggagcctcgccggcgcgccgctcctccggaacgcctgccacccacgcaggagcgggatcgccccaccgttccctcccccgcgtgccgccgcgacagagggccggtggatcgccggcttgacgtcgccggagaagtccatcacccctcccgacccggatctctctcgccgcctctgctctcccgcgcgcgcgcgcagatgtgcaggtggagaaatggcgatcgggatcaagtgggagcggaagacggaggaggtggggatgaatatataggttgaggccgcggcggggggtcggtctcttgaagagcacgtcggcgaggaggtcggttttttttttttctcacttgtgttctggggcggcgcccgcccgagtcttctttgcgtttgttggtaatggtaatggcggttttgcccctgatgaaggacagaaggagatgccttggtagagaagtctagaaatgtctagtttgcccccgaacctgttttacttgcgccagttgtttttttatttcttttttggtctggactactacttacttgaacggaaagaatagtgctccttcccttaaaaaaagaaaaaaatatttctcctctataataaattaattaatataagaaaattggtctaaaaaacggttacatttcaatttcatgcatacacatttgattgtatgagtttggttaattatataaaccaaaaaattgtttcctaacaatagcaaaattcagcatagcacttctactagtactagtccttgctcgtactgtcgtacataaagacttggctctttacttcaccttgggtcagagttgtcgcatgtgaagcacgctgactataccgattagtaccgactttgccctttacttcacctggacaggcccaggcgcccagccggtctccttgttgtataccagcttagtacgaaacgtccgttaatgcgaaaaaaagaaagggagaaaaaaagaaaacgaaaatgatactccggcacgaaaccggcgcgtggctttctctccggccacaaaaccgcgcctactcttctctcttgtgcgtatttttcttggcgcttaagattgctttcgctcgttcccacccacgatgttcttgtgaagcaagttgtttatttctcggtctagtaataattagacttccaggtgggccccaccggcccaccgccggacgaaggcgtggtaaaccaaacgctgacctttgccatcgccgttgaccatctgatcatcctacggttacgggagtttttgagttttcgtctggatagtataatggcgagttaaacgttttcaattttaactattaataaaaaattaattatataaaattgatgttattagatttattattaaacaatctatcataatgtgtaactctttttttatttaaaacatcttacttttatatatattattaattaaattagtatctctgagatcatgttaaagtataaaaatatttatattttagtacggacggaagttcgtgtgtttgtgtgcgccgtgctcgacctgtgttcgacttggcattcggcaacttttgtttgtactcctccacggattgatgtgcttcgtgacggtcaagtcagttccggaaatacagagaccacccacttgtaacacctcacgtgatcggctttgctggagtagcagttcgctttctctttttctgctctgctcgcctcctcgtgacaggttgtacgtggatcgcttgcacgcatcatcatttcgctagtgaaaaaaggcatcgcaaattttgggggaaaccgtttgaaattagcgtcgtgtggtcttcatcaagaagaaaccgcagaaacatatgaagacttgggggtgaagtacgtacgtacccgtttgggcagttcggctgaattagtcgtaagaactacacattagaaaatggtggctctaatccaaacattgtggggatcggatcggatgtcgtcagatttgtgtagaactaatccaaaccaaaagaagtcccgggatcggaaaccgactctcgaaatgcctacaaaatcagtcggtcgacgtgtgtgtactgtgtagtgtccgatcaacgtacgttttgttactggagatcagattatcagtgtcacgtctaattcgcgagaataccaatggatggctttggcgtgagacacgcacatgtgtgccgcgtgagtatgttgatattcctgtgtgcaggtatagagagatatgcacgccagccacgcatgcgtgaagcacctgacttgccagaaaatgcactgaacccaataatacgagcagagatgttttcaacatgtgcggaagatattttgatcttgaattggcaatgccccgagaaaagaagtggtcggacactctaaacataataaaaacagcaaaacaagaaaaaaaacagtttaaaaaaattatgaaaaaaatgaacataaacatatcgacgtcgattgcagactgataaaaaatattctctacattactatatgcactcaagttaaagaatttggttgaagagttaatgtgcctctaaactatggatcaaatagaatctaagtcattttaacatttttcacattatataaatgatgaaacggagagagtatatattatgtagataaagggggtttaataatattgtacttaccatattataaaaataaggtggaatacgaaataaatggacgatacaacaccaaaacaatttccgttttcatttatataagttttattgctctcccgtttcacaatataagtctttttagcatttctcacattcgtattgatgttaataaatctagatataaatatgagaaatattagaatggcttacattgtggaacggatgaagcagttcgttcacgatgactataaatttcatattgatcagtcgatcgatagaaatcagaaacgagcatcggttgatcgggatttttcgtgaacttgttcatcccttcatgcaattcatcagccgttttgggattgagctccccgtgacgcaacgcatgacaattgttttgccactggctaaattaacgaggctggttgaccagctgctgctagccaagcatcgctacgttgacctagtttggcacgacgtacacattggtccgaaccaagagaacacgtgtaagatggaaaaaaaaatcaagcagtggaattttgcgtgcattatattaggcgtataacgatcgtcaggaggcgaccttcaatggctgaaatccttgaattgaagtcagcaactggttgagaagacattaaggccccgtttggcacagctccagctcccaactccaacttacctagagctggagctgtgccaaacggtacagattctctattttctggagcggagttagcagagctgctctacaaatttgtactatgggggtggagctgggttttgctgctccacagctccactccaccctaaaagacccactaccctttaattttttaaggatatttacaccaaaataccattgaactaccctatctaccccatctcccgttctctctcctcccaatctttctcccttcacaccggcgttcggcattggcgtcggcgtcggtagcggcgggcagcgggcgtcggtggcagcgggtggcggcgacgacagcaggtgcgcgggcggcggcgggtcggcgacgcgtgggcaggacagcgcacgggcgcacaggtggcgagagacaggacgacgagcggatggcgactggcggggacggcgcgcaggcggcgaaagggcagagctcgctcgtccgccaccgcggcgacacaagggcggcgactggcgaggatggcgcacgggcggggacagggcggcagcgcgtgggagacgcaagggcggggatagggccgccgacggcgggtggcggagcgtggccggcaaagggcggcgcatggcaggggaagggcggcgcgcgcggggagggattggggatttttattttttttaaggcaatttcagatctggagctaaaaagtcagccaaacactttttcaatgggtatctactcccacaggagctagctctcactggagtgggagtttagagttaggagttggagtttggagccctaccaaacggggcctaaaggtgggatgatttaacccggtgtcctcaaatattattcatgagtcgttattagtacttgatttttttaagttaaactttttaggtttaatcaagtttataaaaaaaattaataacatctacaccaccaaaataatttcattacatgtagcattacatgaattttgataatacgtttgatttatgtttgaaatgttgttatattttttcgcgaacttaaacatgtttaacttaaaaaattaaaagatctgtaatgtaaaatggagggagtaggaatttagtgtaaatgagagatttaccgtagttgtgatgtactcgtactatataaaatgacacgcatatgtatacatattgtaggctagcttatagataggtatttttatgtatatataattcagtgaccgaataactgaatgattttaatatattcacggatacaaacaaactattataaaatcaaataatatttaaacaaataaattttatgaaaattatattaatcatttagcagctgtagaagcgtgttgaagaaaatgacaagggagagacgtccttcaattttttgaagaagaaattatgagcatgttacaatttaaataatgtaccttaaaattaaaatcacacaccccttaccaatacactgtcaaagtactaagtacatctcaaaacaaataacatgccccacaaaaccaaccgaccaactacttaatccattcacacgtaggatattaacggattaactaaactaatcttgaactcgggtctactgcttccgtggctttcgatgctgccaattagctaggctgcagatacttagcgcctaagctaacaaaccaactcgcagtagtccagcagccggccgcgctggtcgatattttgcgtcggatcatacaaaaaagtagaaccaaaaaaaaaaaaagataacgcgatccaagcgaactttttgatggcgacgttgcgagctcgctagcgatcatcgagctaaatatatagcacgggggcagcggctttacgattcattgcgaaccgctacctttttttcgccagaatcatatgcaaatgtaccttaattatctatattatattacatatcatacaaatatgacatattatttacaattttattatatttttaagaacttaacattcaaataatgtaagtcattatctccatatcattttcatattaattaaacatatacatctatcatttatataatatatagcatgcgttcattgatccatatatttcacagcaaagcgcgggatattaactacgactttctccgtcttataatataaaagatttagattgaatatatgtgacatattataatgctatgaatttagataatttttttatctagctttataatattaggatgtatcgcatatatatacgatctgcgagctcgatcgaaaggttgcgatttaattagattaattagtctcgtttaattaattgttcctacgtgagtacgtgcgccgccacaggggagcatatgcatgcactggttcggtttgggttcgtgagatcacttgcttaaaatttagtttcgcctttgctttggggcaaaggaacgaacagatgcgaaagagacgagccttgcggccactttgcatagaggaccctcacgttcaggcaaatccttgtggggcccttatactgccatatctcaaaacgtttttattttggtcttttttatatcatccgactgccatgtcgaccttgatatggcgtgtgttgtcatggtattcgctttagggaaccttcatggcatgcatagtctttcagtatcaggcctgctatttttcagtgtagtggtgtttctctttttattaaaatacatagtttatctcgacttttattagcatatttttcaagctgcttatgaaaactttctatatatacattactttaaaatattaaaacttaatttgttgtacgttaattactttttttatgtatcctagctaggggaaaaaacaccaccgtagagtcactcttggaaatggagtatggctgtgtttgcaaccccttgttcctagcccctatctctcgttttctgtgtacacgtttttcaaactgttaaacggtatattttttttgtaaaaagtttctatacgaaagttgcttaaaaaatcaaattaatctatttttgaaaaaagaatagctaatacttaattaattatacgctaatggaccgttccgttttccgtgcggagagaatgagttctcatcaagctcaagcgaacacagcctatattgtgtttctggctacgaaacttccgattatgcgtgcaaaagcaagaaaacagcaacttggtagcatatgattttctgtggtttatatttgcccgtaataggatttcatatgtaaaatacatgtggattaatctatcccagaactagaagagcctttggacaaaaaaagaaaacactcctttcgatttttttttccacatctctatgtgcaaagaaaatcaaaccctcacatcacgagacaattttagtcatgaaagtaaaaaagaaaacaatgattctcattaaacaggaaagtcgtagtattgaccattagcaggtggtaagtaagggacattaaagaataaaacttcttatttcatggatcgagagtagataagaaggtaggatttgatatactttttaagacagagtttaaactttattactttgggacgaagaccgcactctctcggtttcatatcataagttgtttaacatttttattagtcaaaattttttagttttgatcaaatttattaaaaatgtcagcaatttctacaacaccaaattagtttcattaaatttaatattaaatatatattttgataatatgtttttaattaaaaatattagtatatttttctacaagcttgatcaaatttaaagaagtttgagtaagaaaaaaaatcaaatgacttataatactaaacggagggaatatatgatttggggtcttttttttttcttcttacaagtggcagagtgctgtccataaaccataatattggcaagcagccgggtttgtcctgtaaagtgcatggaaaaggcagattcaaaggagcaagattaaagacgggagaaaaatagcttctttcttcttttggttttctgttatggaagggcagttcgcaaggtcagaattccacctagttgacccttttgacgcatcccctttccggttctttacgatattactcctacgtgccttactcctgattgtctattatatgcactaagcaaattaaagcacttaaccaaacggccggcatacgtagttaaggttttcagtagcatgcatgcatacacttgcatgggcgtcaaagcatagtttagtattgcactcactcactgatcccttctgctgagagggtgagggtgagggagagaggtcactatatataattatatatatatcaacatttttttatggaaagagagctttattgattgggagtaagtaacaggattaatattacattgatgcattatgtgcttaacacatgatggagcatgaccatgcgcgctaaactgcgcaatgaatcatccgcttattagcaaactgaggattgaacattgatatatgtagtttctctgtttatagatccgttatctaaaattttcttactctggtcattaattagcgtagaaaagttatgtatttagactagaaagagtagtacacatctaaacttgtccagaggacattctaaatttgcataaaattaaatatgtgttggtttacttaatttgtttaatacatctctcggcttatacctatactgtgtttttaagattgtctatatcgatgggatacccgtagtccggataaatagggtattatggtacgttggtacgaggatctacacgatacgacatcaagcaaacaaggagacaaagattatactggttcagacccctcgtaagataatagatctaatccagtttatatgagattgatatggaaaaccacataatacaatgagaacagatgaatccggcgttaccggctagatccttgtcgagatgattcgatgagatccctgggcgagtaggtttcgcgtcctccggctcgtagactttggcgggtgtgttggcgctatgattcgatgatctgaacccctcagagggtgttgccttttacaccataagtcaccttagtctccaagtagaacccggagacaatgaaccttgcacgatatagaataaacccaatcctctctgagtaggactctgataaccacttgcccgtgaggatattttccataatgtcttgtagatttccttacgcatatggaaacacatcgtatatatgaaggtatatcgtatccgtatattccgtaagtcataggttatgaggtatgccttactcgtaaccatgatactctataatatgcattttattttcacattggcactttgtttttataaaaggcattataatactcggcttttaacaaagccaaaaggacaaaataatatacattgttctttttttaagttacagcaagttgatagataagaaatacctatacattgttctttttttaagaagtatcaatcatttgatgaacttatgatacctatattagagcaataggctctgattggttgagttacgtacggccgataaccatcgaaatattaattaacgaagcaataaaaataaattgcatgtaaactttcatatctatatattgttaatttgtttctaaaagcccatgctagaatatatagagagactacaacgaaaaaataaagccttaagcaaactttagtttaagtcaaattttgtacagggctaataagccaacaagcgggtgatgagaggctaaaatgcctctttgtttgagtttaggtttattggtttggtttttaagctaatgtttccgttgatatgttttataagccgatgacactatggcagcttttttttcttatatattttataagctggtggatttaaagttatggtttaatggtggagtcaaagtctccatcccacataagaaaaaaaaacgaagaatgtttattttggcttagacttttcggctcgtaaattggtttataaatttaaaaaagggcctaaagcattaagtttaatggtgaagttataccctcagttgaaataagctaaaaagctagtttctccaacctaacttttggcttaacatgtgatagtggcttttggttttagaaaagctagccaaacaaaaaggctactcgtttgtttaggtttaaactttttagcttataaactggctaataagcctgaacagttacagctttattgatcaacttatttagtttaatgattcatttgcatgaaagttcctaaccacgggcctatatagcagaaggatctaattctctaactttccacttggggctataattcttcgaccagcatgcatgaattggcactagaccggaatttttctttgaacaagaatttgacacttggctagtgcatcttcatcaccttacttctttttttttctcttgtcttttacatttctttaggttctaaaatgctagagagagaagaaaaaaagaaacggaatctatatcttcatggagcattagccccaaagaaaggaatcaaggaaccatttctgaggggcccacagagtataaagagaagaataaaaactgtgaattataagtataacccaaatactacttctgaactgcacggttgcccatgtatatgctaattcctgagtatatcctttcctttgcttggttcatgaatcatgatgcaaaaaacaatattgaggacaaaggatttacttaacgaagaagcacctacaatttcaaatttacaataatgggatttcgaattttgaaattaaaggtgcttcttcattaattaaattttgatatcacctagggagatttttttgagaggcactgttttggctctggttaaatagaattacctacttcaaaaaaaaggttactgaaaaaaataggaccaacagctttcgtnnnnnnnnnnnnnnnnnnnnncgtttagtaagcgggaggtcttgagttcgactctcaacgaaagcaattcatttcaaatcatatttttatttgctggagaataaaatcattcgtaactttttttttgttgttgtcgaataaaatcattcatgatttttttcccatgactatcaagatgaaatcattcatatttttttttcttgaagatgaatcttctttgctggaagaaaacaataatttttaaatttttgctgaagatggactcattcataattcttaaaatcattttttcatttttgctgaaaaatttccatttcatgaatatgaatattctttgatggaagcaaacatattattgttgttgttgttgttgttgtttaagattaaatcgttcatattttttctgaagatgaaatcattcattttttttttcatgaagagggatcttctttcctgggaacaaacatttctttttatttccgaggatgaaatcgttcatacttttttctttcaggacaaatcttcttagcacatgtttatcgaaagcatgaacgaaaatatttcatcgtcttatgatatactctatctcagtttgtaattataagcatttctaaattgcttagcaaatattacagataaagagaaatatttgttaaagaaataaggattacaggaaatatttccttttactaagttatcacattggttaatttttaaattggttgtattctcttctcagcacctaattgtctggttgaatcccattcattggaataagtgttccccaaaaatatatattgtatacaaaatttgaatattataaatgtttgtatttggtagcaggattatccaactaaaagatactcctaacaccttttctattaaaggctacgttcatttcagccatttggcttattaagccttgtcttttcggaaaatatatcagtgtatgattaattaggtgctaactattataaacttaaaaatatatttatttaaatttcagtaaagtcttttttaaaaatataccttttagtggtttggaataaacatacattatataataattcgctactacatccgtcctaaaatatactaaatttctaaaatttctaggtggataagggtatatttacatacgtagggcctgtttggtttggttccaatttattaccctaccaaaattttggtaacttcaacagtagcaagtgtatgtttggtttgctatcaaattctacccacaattgttcaaattgaatactaatcaatttggtattgccaaaatttaccaatgttttggcactaccaagatttttgtaggataaaaattagctccaaaccaaacaagcccgtagacaaaagttactagtatattttgtgacggaagtagcaggctagcagctagtataactgtttaaaactgtgtctgaatgtcttgtaactacagagtgagtggcaataacaagaagttagcaacagtactagaacgacaaaaacagggtccaggtgatcgatacaccagcaaaatctcaaccagctgccgtggaacttttgcattatgcaatgatggaatgccggaaagtcggggggaatacccgggcgctcatcggagccagatctgcaggcaccaatgcgcgcaataccatcattcatcgacagacgcacaaatgagccgatctcgatttctcgggaacaatttgcaggagatattggatcctgcactggcagaatgtaaggacctgaaatgctggtaagtgtgtgattccctgaaaatgctgaaagtgtgcgactccgagcacagtgatgattgcgagcgcgacacaagtatgtgcacccacaatcactgaaaattcgatggtgtgacagcctcgtgtctcgttgagctgaaaatgtactggtagaattgagcagactactagtaccacttgcccaagcacattcttgattatctgtgtcaaaaattgttggcaacatcttgatgaatgatgagagtctcaagaaacaaaagatcatgcagggctgagaatcaatcattacaagtttgcaaccaactcggtactactacttctagaagcattatgaatctcctctgcggctctgcatatttcggggctgtctggttctctcccttatcaagtcattggtagtaccaaattcttgacatgtttggtattatcaattttttagtagggtagagatttattatacatgtttggataactaccaatatgatgtcaaatattgatcatatagagaagaatgttatagattagtaacaaattgatcattggcattaccaacaatttggcttcaatccaaacccacactattagggcttgtttggtttagtaccctaccaatatgttggtagtgccaaactctaggcaagttttggcactaccaatattttggtagggtagaattgtaaatgagtgtatttagatttatgccaattgaaagccaaattttaaattgtggtgaagaatattctagaattatgccaaattgagtattggcattaccaaagatttggcttcaaaccaaatcatcacatttactatttaaaccaccaaaaatttggtatggcaatattttggtatcaaaccaaaacaccccttactattcaaggtatcaataaattggtagggcacattttggcatcaatccaaaatggcccttcttgccccagaagtttgctgatgggaacaggcgatcatgttctcagcttcgtcagaactacaaggtgcagaatgcgtggacaaacactaggaactaccctatatgaattcataccaaatcatatactccagaagtatcatagtagtagctatgggtgtgtttagttcacgctaaaattgaaagtttggttgaaattggaacgatgtgacggaaaaattggaattttgtgtgtagaaaagttttgatgtgatggaaaaattggaagttttgtgtgagtgcatatactcatggacctagggaaaacagaacagtatggacactaaaatacaactctgcaatagctctgaagctaccatcctactaagtgtgtttagttcacgttaaaattgaaagtttgattaaaattggaacgatgtgacggaaaagttagaagtttgtatgtgtaggaaagttttaatgtaatagaaaagtttgaagtttgaagaaaaattttggaactaaaatcggcccaagccaatttgagtatgcactgatacaaacatgcaatgatccaataaaacttggctttctgaatgtaggagttgatgaaaatgaatataggcggtgtttagatatagggtgtaaagttttggcgtgtcacatcgaatatatggatacacatttgaagaattgaacgtagtctaataacaagacaaattatataatccgcctataaaccacgagacgaatttattaagcttaattaatccgtcattagcaaatatttactgtagcaccacattgtcaaatcatggtgcaattaggcttaaaagattcgtctcgttatttacacgtaatctgtataattagttattttttttatatttaatactccatacatgtgtccaaacatttgatgtgatagagtgtaaaattttgccgggatctaaagagacccatagagtagaaaatttgggactcaaaaaaatgtctcattaataagggtgtgtttagttcacgttaaaattagaaatttggttgaaattggaataatgtgatagaaaaattgaaagtttatgtgtaggaaaattttgatgtgatgaaaaagttgaaagtttgaaaaaaaaagtttggaactaaacccggcataaacccaactgaccaactgtgctgaactgacagccatttaaagttcaaatgtcaactgactactaatcatcgccaactaataaatttgacattttgattctttttttcaaacttatataactttaaccaaattagtttgattaaatctaacatattgaatatacctgtataatatgtttatttgtgttataaatgttgctatgtttttacaaacttaatcaaactaaatgtttttcgtgaacgtgcaaaaactttgcacatcactaaaacttaaagaattttaagttagaaaaaaaaacaacgtcatatagagtaatatgtaacggaaggagtactaaacaagtgctcagccctgaacttacatcttccatagtgatcaagaaagggatgcatagcatcaacttcaggcattcaatgcaccaatggataatgttttttcttactacacaaacatcgagtgatgagcaatgaatgattagagaaatgagcaaaagatctcatatgcatgatgcatcacaaactgacatttagcaggatacgcagaggaacagcgctagaacataaccacatcaacttattccatccacaatatcacacaaaaatggaaagaattaattagcatatgctagaagtttagcataattgcataaaccttttgatgcagttcaagcttagcatggagaacccaatatatagacttaaaactactcgagccacaacagcagtcaagcgctgctcgcaaacttacacgagaagagtcaggggcataaaaatctctccgtaaaaccaaaactcgaagaaggaacaaaaataatactagcaaaatggttcaaaattcagaggactttgctcaaagatatcctccacccaacaatatataaactactgaaaaggaaaattaactgaaaacatcaccaatgacccggagagcggtggcaagcaaagaaccttttagatccgtacaatactccgccgcctccggccgtacctatacgccttgtatatacggtacgaacgcacacacgcacgtagccttcttctcgatctcccttcgcatcctctcatcgttggtagtagacagtagtacaactacaagtaacgcctggctccatcctgtctgcctttggtggcggcggcggcggcggccgcaccctcttacacctacattggccgagactaggcaatgacagggctagtcattcgtgggtgcggccgccgggttcgccattggagaggccggaggcaatggaaggaggagcagggagggagacgactagaagaagaggcctttccggaggcaatgctgatcagtgtggaacactgtacatgggtacgttgtttgtagacttagtgtatagacccatatgccatttatatgcaagaaggggagaagcaaatccatggaccaggtctagagagaggatgggcctagtgggcatggttccgccagtgatgggcccacacggagatagagcgtgtgggtccttggtaggttgaatggggagatgggctatgggcctatggaggcctctttcagttttctgttggtggggcccaacacaggacattcctccctgtctttcgttttcatcgctttaaccccaaacctcccaaatgtaaagcccacaacgctcctcacctcttaccgtccctttccttccacctctactgtatgtggcgtcgaggaggaaacaacagtgctagtatgctactactgttttatatggctaattcacctgtcctaaaatataagagattttagattaatgtaacacaacgtccaaattcgtagtacaacctggttgtgttaaattcatttaaaatcctctatattttgagacagaggaaaaacttttctttagtaacatgcatgtttgttaggtaggaaggatatcaaatgtggtgtttttttaatgaagatgaatataaaattaggacatataaaaacaagaaagtcattattgtaaaattaggttagttttagttattacaaacttaaaaataattgatttaatatttttaaagcaacttttatatagaaagtttatgtacgaaatacggataaaatctgtatgttaatcagagaagaaaattgtgtttatcatatcacgagatgtcggcaagtttacgattgccatgcttaggtctgaagaagctacccaaaaattgtcctaccatttttagcgtgtagaaatgatcctttttctattactatgaaattcttatgtaatggatcggtccatttggaaccctatgcatttggaattgaaatttgtactggttggcatttgtggacggagggagtacgagtaactcgtaccgtcggccctatgcccggagcaatatgaatgccgctcagtggtgacgcgacgagcgccgtgcagccggtgcaggcagcaggctatcatctggtcccagccgcgtcaccgattcaatccacctgaagaattcctccagctagcggagcggtccagcccaatctcacgcgaagccatgcacacgcaagcagctctcgggcagagcgcgcggcgccctcgtccgtcctagagctgcccgacgaggccgatggcttcaggctcgccaaagccgcgctcgctatcgctgcctttgcacggagtagtgtctaatctgaccccgcgcccgccaattgcagtacacgacgtagggactgacggactgtggcctgtactactccagagtgtagtagagtctgtagagcatgtaatacctggactggagtagtggagtcgtgtctcgatcggcgcatggagggacggtccgtcgacgtacgtgtggaccatggaggaggagacgccgcctgcgacgctgagctgagccgtgtcgtgtgggcgtgtggcaatgtgccacgcccacgcgcaggagcgtggacctcgcgaattaacggcgctcgtggcctcgtgctttgctcgccccgcgctgcgcgcacccatggctcggctggctcctggcgacatcgtgggatgctggaaacgtgcccagaggcctcgtcgtttgcacctgcctacacacgcgtttgctagtacaatgcaaggatccaagagtatacggcggcaatgtaacgtaaattcctccaaggatttctactgtaccaaccacgttttgtgggcttaaacatgtactgtacatgcaacagagagatgcacgctgtcacacttcctcaactggctcgatgtcacacccttcaattctccttttttttttttcagaggtactcctgacattagtgaagcatcatctagtctagcagtaacaaggttaacgaaaggaaaaggtcaactttaaccgactcccttaatagtacgctgaatttaattcgtacctctcaacaaaaaaaccggatagaactactcctcaaactattaaaatcagtgcaatttgactctctcagtggttttaagtggcggttttactggcatgacactgttgacctgatattcatcccaggtggtgtttatgtggcattagagcatctccataagtgactctccaagttaaattttagcctacacatgaaaaaaactccctccatcagcctagctacttggattgccaagccatatggctggccaaacgagcttctcaactggccaaatttggccagcctcctcccagttgccaaacggtgggccccactgtgggtcccacctaactctttctttgcttccctcttctcttagccgacggccagctctcatgccctctaccgacggcgccgatggctagctcccacggaggtcgagatggccggcaagtggcgcaaggtggtcggcggcggcaccaacggtggaggaaggcatgcaatggggcggcggagggggacgtggcgaccgtgagtgagagagggcgcagagacgacggacttggagggacgtggcatcgagggagggggatggggcgcgatgcacggccgtcgaagaggacgaggccgacaacgccgttcgtcgtcggggacgcctcacgcatgcacggatccaccattgtcgactgccgccgaggagggcctcccgcgccatgcactcgccgctgcctcaaatgcgcgagggcacgccatcgccgtcgccgctcgggtgctgccgccgccgccaccgtcatcactcggcttcttccccgccgccgatttccgccgctacctccacctccgtcagatccgctcgcccgcccgctgacggcacgagggaatcgacgaggaacggtggcgtcgtcgaggtcggcgtcgcaagctgccgccgtcgtcgtcgtcgaggtcgtcgtggcaagccgccgccgtcgccatccccgccccgagctccgccgccgccgtcgccatcccggcgagcgcctcccgcctcccgcgccgccgcgccgccttccgcctccccgcgtccaccgcgcgccatgcgtcggccaccgttgtcatcagcgtggttgacgggaaggaaggaaatgggaaaagaaggaaaggaaaggaagaaggtggggaggagagagagaaagaagaggggcagaggcttacatgtgggtctgtttttattttggagaggattaacagggagtctgttggagtgagtatctagtttgactagctaaatcagatggagagttggccatatagatgtttggagagtccgatttagagaagctgctagagatgctcttagaattacaaaaatataagtgggacctatttgtcatcacacgcaaaaatatattgtaggacccactgacatgtggggcccacatgtcatctcctctctatgacccttcttcccatctccccttatcctcatccggcagtgccctccccattttctctcctggcggcagtgtggaggttgggcacggagatccggaggtagtgcggaggctaggcaagcagacctggcgaggtggcgatggtggcaacagtggtggtgtggaggaagctcatcgcccccctctctctcctggcggccatggacggcgaggaggagcacggcgcagcatggcgctgccatctccctcgctcgtcggcctcctctttctcccagcagccatggacgatgaggaggagaacggtgcgtgcgcggcactaccgtctccctcgatgtcatctcccttgctcgccgatcccctctccctcccggtggccatgaacagcaaggaggagcacaacgcggcgtggcgctaccgtctccctcaatgctatcccccttgctcgcaggcgtgggacatcgtcaacgctaccagggatagagacggagccagaggtggggaagggcaacagaaagggcacgaaggagaggtgagggaatgacttcgtcgggaggaccacaaccaccggtgaggaggcggtggcggagagtgagaggaattgcgctgcttgtttcgcgagctccttccccacacgtggtttcccgcgcgagatcctcccccacgcgctgggataagggagagacagggaggaggaagggctggagagagagaggatgacaagtgggccccacaatatatttttgtgtgaatgacagatggttccagatatattttttaaattctattgctacataagccatgtgggacgaagaccaggtcaacaccgctacgtcaacgtcatgtcagtaaaacctttgagggagttaaatgttctggtttcaatagttcggggagtcatcctatccggatttatggttgaggggtacaatacttaggctgtgttcggcacacccttttcccaacccctctccctcgttttttacgtgcacgcttttcaaactgctaaacggtatgtttttttaaaaagtttctatatgaaagttgctttaaaaaatcaaataaatctatttttgaaaaaaaaagctaatatttaattaatcacgcgctaatgatctgctccgttttctgtgtggagggaatgagttcccatccgtttgatgcgaacacagccttaagggagtccaaatagacttttttcttaacgaaaaatggcttagctcctcgtcgtcgtctctctctcctgcctagctctggcccaataacgatactgggcttcctttttctaatcaacgatatcaccgcaaaaaaaggaaaatctaatcagtgataaacacacactttaagccacgtatctttgattcttttccccttcttttcctgctatcttgggctcttgcctccttggtggactcgccgccgactactctcggagaaggaaagagcgaagaatggccgcctcatcgtctctcagagtaatcacggcgcccccaaaatccctccttttttcctttgttacatctcgttctctaattcgtgttggtggttggttgacgatgcagctaatcctcggctcctcgtcggcgtcgcgccgccagattctcgccgagatgggatacagcttcacgcttcttgttggtgatttgcccccatgttttctggagcttttttactctattattagtctgttttccttgtggtttatttagttcgtacttttactgtttcccttctaccctcccgtggggtttttagagtgcggatattgacgaaaaggagatcagaaaggagaagccggaggagcttgtggtcgcgctggctcatgcaaaagtaactcctttcctcctcctgttattcaagaacttggattctagttccttcgctaggaaggagaagtactgaagtactttcttaggaaggatagagaagagggggaggggagttggacctagcctgacaatttttggtttggttgtagactacttgtctattacaactattaaagagatagaaagagaatgtaacatgttacatgttcactctacagggctagaaattctgctttagttagaggaaaaaatgattttggtgggtttggattatgatagtgtagattggttgcatatacactagaattgttacatttggactattagtgtaattatacttttatcaataggtataaaaattgtatagcagatatattttcagagggatagtctattagtttcacttgtgtgggtcagcaggacgttcggctaggttttactatttactgcgagagaaacattttagggggacattttggaggtttgggcatgaaaaggtctgtccttttatcaacttccattaatttattgtatctgcttcaaaagttttatgttttcctggttctagatacaattttctttcagtgctgtagtgcagaactgcagactacagttcaactgtgcagcacattctgaattaggcattgactatgtactatgttactatggtttattaattttgcaggcagatgctataatggagaagctgagggataatgggatgatgaaggaaattcttgattctcaagagactacactgttgataactgcagaccaggtgtgtggcttacatctacttatgagataactgcttaatagtcagtaatgtgttgtggtgagatgattttaactagtttgtgtagatattgcagccaatttaaacaaacactagtctaggctgaattgttgttaaaagcgttcttgtggctgcatatttcaaaattgggttcagctgcttgtgttttttttctctgtttgattttaaacttatatgccgctcaaaagataatagtattgaccatcaaacatgcctattgattataagggcagtctcatagttattagggtatactaggatgggttctgaaggagtatgtgtaatattactgattgatccatctccagaggcataacctgtttgtttgcctgactcatattcatatgcttggcatcttgccattgttattttgatctgtagtctactcatgtttgatcagttatgcactgacttatagataatcataagcattcctatgtttgtgatttccctatgacttgtaacggaaaattggaaactgaaccttccatagccattgctaactaccttcatctgtttgtcatgactcatgaggcaaactagtttttgtagggcacattattatgacattagtgatttatggcttcatgggtaatcatgtttagcatatgcttggtctaaccgaaatacttagggatggttctgtagtaaaatgcatcattaatggcactcaactcacatgtatttagatgaacattttggttcttatttgttttttatccttctcatttttactttctgatggaggttgtggttcatgatggagtgattagagaaaaacctagcaccccagaagaggcacgaaagttcatcaaaggtttgtgctattgtgtataagctcaagttttgttcagatagtcctttccctgtattgcttgctggctgctgctcaactatattccgtttacaggatactccgaaagccatgcagcgacaattggatctgttcttgttactaatgtgaaaagtggagccagaaaggaaggatgggacaaagctgaagtaatacctaaatttcttgatgttttatttcggaacaggacatcaaagtcgtgcataaaacctcagagactagatttcatttttaactccaactctatttcaaggagagacctgaaacttgaactactgtgaatagttcaaatttgttattcttctaatatgattgggtgcgtgtgtaattatagcttccacttcaaacttggccgagcttttaatctgatttaagtgaactatgcaaattgcctcaagctctaaattctaatgttgtttagtgcttatcacttctgaaatctggtgggctaacttgtatcaaacattcagattctgagtcacttgtgatctttgtaaagtgatgggccagattgagactgatgtgaatgtttaaactaattgtagaacgctaattttttgcatcctgatttggctcagaagtattagctttctaggtcttcatgtagaattaggtgcacaatcagatcacactatcattgtttgtagacaaaaaaaattcaaactaatcctaatgattaaacataatcagttaggaccctatattgccattgatatgagttctggaggtggtttttggcctgataataactttccactataattgtctatgaacaggtttatttccataagatacccgatgaagttgttgagagtttggtaagtttgtagccattggtcgcaaaagttatttcttgctattttggcactatatttttgattccggagtttgattactttgatactttgactcagttgaacaatgtttttcacctgtttatatttcagattgaggagggcgatgtcttctatgttgccggtggcctgctggtagagcacccgctgacttcacctcttgtggaagctattgtgagtgtagttcttgcatatcctgcttcttggttcagcactgaaaatagaaacctttttacacatggtactcgcctgacatttgataaactcttatgaaggttggcaccatcgacagtgtaatgggactcccgaaatccctcacggagaagctgatcaaggagtcccttgaggagccatagctattttttttaccgggacaactgactgcccatgctgaagttcatatgctagaatttttcactcatctgctgcacaaccaactcgtcatccactctgcttggattggaggatggagatgcatcttaccgatgttgtcagcttgactatgctaagctacttgccgtgattggcattattgtagtaaaacctgagactttactatgtggattaatctgtttggattaaattttctctcttggtgcgtgatcatctctctcatgatggatgcaaacccggttcatctattcgaatctctgcggttttaggatgtgtttggcacttgaggttgagaactactccctccgtcctataagggatcttgagtttttacttgcactgtttaaccacttgtcttttcaaaaaattttggaattattatttatttatttttgacttactttattatctaaagtactttaagcacaactttcgctttttatatttatacatttttaataagacgagtggtcaaataatgcaaacgaaaacttaaaaccttatggggtggagggattaatcctctaggcacttaaaacataacggctcattagcatttaaagtaattttttatagaaaatcttagaaaaaatatactgtttatcagtttggaaaggaaaatgccgagtgaaaaacgatgtagaagctgggagagaagggaatatagagccttcaatgtgcgttgggacttgggaagttctgagcgagcgatgggggctttgttccggtttgaacggtcgatgacaggtggggtccaccgtaagagggatggccatgggcccacaaagcagagactgaacgctaccatccatccctggacgaaacactcgaaaatctcgaatctttctcccgttctcctccccacatcgccggcaccgcgaaccaccgcggccaccggatcgcggcgcggcgcggccgccgacgagcgagggctctcgaccgaccagaacaggtgcgctaatattttctccgcgtggtttccgtgcctcgtatgccctaacggaaggaggaggttgccgcggttaataatgttgggttatttttttcccccgcgatttagcactcgtgaatcacgcgctactctgttttggagtgaattgtgaatagtatgcacaatcattttgcttagctgttgacgcgctcagcttgctgtgtgagaaaacactgatgcctcatttatctgcaccttatttttttatggccggtgtgtttgctgtttagattcataggatagccagccactggctcctttgaacttctgggaaaatgttttactcatacgcttttctattggcatacctatgtgatattattcagattgagctgtttagttttgaatttaatcacatacctagagttgtcctctcggcaggttagtacaacagcaatagttgggcacttgagatatatttgtgggtgggatatagaacttatgataatggaaagtaatatcatagcttcatgcgctgcagtttaattttagatatttgtaagcaacacaaaaatggtagacatctttaactcaaaggatgctagcttttaataactattctccttttactactatcggaggccgctaagtattaatgttagtgaatttaggcacgcatgtatgtgcgcacactgatatttttgtgtgtcattaatgactggtggatggggttacttgtgtattggcctttgacttgatggcgccaaatgctttagtagttaatatacatggtaatatatcatgcttgtatgttctataattgcagtttgtgtcctgaacccacatagtatcttctgtaatcctattgtttgactactgcaattgtatttctatgaaggatgcagttatatttttagagaaagggggtcaattcttttttttttagtgaaaacatataacagagtttatacagcaagggaaatagctgctcacaacgcaataaaaactttgtaaccatataagcactaagcacaacaggctatccagatttaaccatggttacatcaaaagacactgctctcagcaacaacgataaccccagcttgaattttcaattcacaattattctatgccacatcgacacaagagtctagcctacagtacttcagacagccatcaccggggtcttttccttcttgctcaacatagactttcttttgctgcgtttaactcaaatttttacataaccaaatctatcttcaactaccatcttattttgacaggcaacaaagcccaaaggacggatcctagaccaacaagcacctactgattttgcatgtcctactacaaaacatttttgtgtgaagtctttgatatttggagcatataccaagtaaagtttcaacaatccaaccagtcatatatctttgagatcctcaatgtgctcaaacagaacactggaacatattatttctgcaaatcacaaaaataaagcatgttttttatagcttaacctgttcgaaactgggtattctttgaaaatagggaaaacaccacatgggaaaatgaccataacaagataattctttttccttgctatgcccatgaaagaaatgtaaatgatcattgatttggtctaccatgcctcacaaggcctttttcattggaaaaagtaatatgaattattgatttggatccacatccttagtaattagtttaaatctgaactaaatcccaaaatgtcccaaagaaatagccctcagaaatttcaaatgcaccttaaaagagataatttatgtttgtcctttatctacataatttccagttaaaagcttgaattattttgatctttgttgttggtgtgttgtgaggtcatggatgtataatggcgagtacacaagacaaaggtaaaactaatggaggtacttgggagttgggaccatataaatttgtataagttacatatcgttgacaaatgtgctgcatgtaggctgttgctgtggaccacttttctgtagcaccagctttgtttcttgactttgtacttatctaattttctctattgagctaatgttacatacacctgttgaaacccacattgaaattccaattggttccacttaatcccagtcaactttgtatatagctggttgtttggttctttcttatattaccatgcttaagagttatacatgaacaaattatctgtgatcaattttccttaggtcagagttttcactaagaacaagtttgcattactaaaaatatccttttcacccatgaaatctctttttgataacgtgcctttcgttgattttgggatttaagaattttattgcagggattatactttatgcaatccttctggcgagcaatctgctcaacccagacttgacaatttagtgaactttgggcggttatgtttcccttcctgttcaggctaaaatttccaaccagtagtggtactttcttgtctgtaaatttgtatcaaactgttactgattttatttgccccacctcagagcatactggatggttccccagtcatacttaataatgtatctgtgacatcttctgcttcttttagatgtccattgtctaacattgatgtaaggacaccgacatccttggcaagagaaaaggaagtggcctatgagttctagccttgttatagtacctcgtttgactccatgggtgctgttcctatatctaaaaattgagatgcacgtggatataatctgtaagttagctgcataagctacgaatttgtatgtttaacaagttaaacattagtgctattgtttgttcactctccttgcatttggtgcctcatagctcatacatggctagaggactagaagtatgtggttgaacttgaaatggtcaagggatgactagttgagtgctatgaatctgataccgtgtcaaccagttgaattctctttgagatagaaggctctagaaagaaagtgaaactctgttaaatgtgcatgaactttgcattttatgcagtgaaggatctttccccttgttttagtgttatactagtgatatgcaacattctcttacgttgaagcacttcaagacaagagtctgttgcatataggctttttagactattattttaccacacttcaaggaaataaggcgtttgcatataatttaggctattataccacagaacacatcagcacatgcactagaaaccaacacactacattagattcattttttcatgaaaaatactaatgtcagacgttgcaatcactgtttttgcatgatcaaattttggaatctgctagggctcagcctataagcttgagctttgccctcaataagcttaagttatggtcaaatgtaatatctgttaggacttaggggttttactagcttataaagataagctagagctagagagtatgctatcaataatgctgtcgagttcttttatcttacaaattttttatttatacaacattatttatgtcttaattttcagagtctgtttattacctattggtcatttaggccagaccgtcagaatctatacaaagtggattataaaagaatcttaagcttggcaaaagttccaacaagccttcaatatactcgcttcgtatagtttgcaggctcttgtaccaagggcggcaaggaaaccttttttttttctttttactaaattacccataattatcatagtactattctagatattaagggtgaagtgctttgatatatgtgtgctccctacattcttttacaaaagcttttacaattttatatggaggagggagtagttgatgtagtgttcttactttgagctattggactccagtatctatcatgggctgtgtggttatggctgaaccaaccaccacgattattgctggaatttttagctgggctaggctgtaagcactccagtggggcatcaatcactgcaccagacttgataaaaattaatatgaaacttgagctgtaccagtttctgctagttggaaatactgcagagctagtctaggagtttctatttgttctttgtgcttgcctgttacctattcattttgaactaccttttttatcttttgcttggtactacccagcagaatgctgtgagttattcaaatttcatcaccctgttttccagggcaccaatgatgtgtactttgttgcaactttctagctcacagtagaatcaatcattttgcaaactgatcataatgatcattaacatgctttgtcctcctcagggaaacaatggtggcaccaaatctactgatgtattatcttgatggtttctcttagtagctagtatcctgttactggctgggccatcttactgcattcttatctaactctgagagtttgctattgttgtgctgcgttgttttgcattgtggaaatctagttctttacaggcatccttggtaatgctaataagattttcaattactagctaaattccattgctttgctacggataaaaggaaaaaatcataatattgcgttaaataaataaaagcatgtttgtgatgattatgttacccacctttttgctacaacgaatactcacctcaatttaattttatatgtggctaaatatatctagttgtgtataatattaagaagtttaagggataatgtgtaaaaactacagtaggagtaggtggggtggcagattcactgccaccaccactgtaatctttttaaaggagtatagatgacaccaaaatagatggtttcatactaactgaaatatacacaagctgaacaaacttttttcatcagctactaagatgacaaattgagacttacaaagggttatcttgaactctttcatattcatattcaaagtacctattccttgtcaagttgggtacaacttagttgaagcataatttgcctatagtgtgattcatgtgtgccatgagtgcagttttttttttcccatttaccatatgtaaatatgagaatatatccaagtcatatcatcaattaagtgtttgtcatgtttttactgtggccaatgtataagccgtactagaccaggtgttctatctctctgggagatttactgtgatcaattatatgaatgtggcaatttgccagccttttctgcagtagcagatgtgcagctttttcagtgtgcctggtagcaataatcagagtcactaactcctatggtgctagtagggggtcaaaagtactgaaagattgtattaatattgctgctagtgcttctgtgcttgccatttgcatgctgccgagtgacgacggctgttgaaagctgatattcggtgaaattttaaatgctttgccaattagtgtaaaactgttgttctctgtggtccatgtcttctacatgtccttagctgtttgcctaggtagctacagttatctgccgagtgactgagtccttgtagcacatcacaaaagagttccctgttgttgccttttatgcttgccatcacatttgaaactagttttggacacacagtttcgttgggcatacagttctgctgaggtgtttgtggggtcttctatgtaaatgtttgctgaaaccttgtaattgatcctttctttccaacttcttagggtttcaatctttggatgcatgcgtgctttagtccatcattgatgtccccaaggtgcaagggatgatatctgaagaaaatatgaggggatgtttctagaaggtactgttgctttacttacgctccaacctaaacttgtgaataacagggcttgaactgagttattttatactccctccgtttcataatgtaagactttctagcattgcttatattcatctagatgttaatgaatctagacatatgtgtgtctagattcattaacatctatatgaatgtgggcaatgctagaaagacttgtattatgaaacggaggaagtactgtatatgtacataaactgcaaaaatgagctatagcacaatgaaaccacatcttggatgtgtttccaggatgtggtttggtgtgatgtgctaattcttaaggattgttcctagtggtggtgtctggatttcctacccaagttgctgacaaccaagatgaggatatggtgatatgctgattgtcatcaccgatagagacaggttgtgcttctgtttctgcggactttaaattttggcattttccttttaaatgcccgtccatcattatcccgaataaattcctgcatttggcgccagcataaggttctgaagacacctgattgctttcaatgcaatgccacagtgacttaaatgttctgaaaatgttagaaagccaagatctgtacggcggtggtatttactattgtcatcttgagcatgtgtcacattggatatgcaataacttctgtaatggcaccaatacaatcaaaagaatatgaccaacatgctacctgtaaagaaaaatgtagtttttgcacaggcctttggtggtacaaaagtgtagtttttgcacaggcctttggtggtacaaacattttgagaaattccagagaaagggaagagtggtactgtaacttgggttgatggtttgttacttcagttattcagcggtcactgtataatttcttcacatatcattgttcaaaattatgtagccttgactgatatcgaagggataggatgtgagaccccttgtgcccattggcacaaaatgccagctatatgatcaaatgataggggcaatggtggtcacacttaaccagattttaggagcaccaagcccagctggtagtgggggcaatggtgagaggagcattacacacatatactctcaccaggcagaattgccatataagtcccagcagatgcattcaccattggaacatattctgttcatgccttgtccttttttaaagagttattgattctgcaagatatttgcaaattgaactgattctggtgtacccacaacaacctgtttctgatgttagtatcttgtagaggttgtcaatgtatttttcaagccatgaagtagtatttattcatgtattgaactgttggcgattgcatgtgatctaattggccattactgtatcatgaacacagatgcaaaaaatgataaggtcatcccttggaggtctacggaagataaacctcatctggaagtagggttaaagtgtgtttgtcataacgtgcatctgatcctctctcatactgcagcgacgagatttaaaggattatgctccctccaaaatgttcgcaatttgtcactttatccgttcaaaagcaatgctttctatatgctcaagaaccaagcttcacaaaagacatttccaatccggaggggctcctgtggggcgtggtaagttgctgtagttctgtttgaggctagacgtgcccatgtcataatcgatatgtcacatgaagactgcagctgtttgatctgaatcaggtcccaagttcagtttgtggccccaaagcagttcttatttttcacctttagctgactttacacattggtaaaaaaaattcttgtcgttacttgtgaaaaaaaataatgattgaacatctgatgctggacctaagattaattgaacatttagaatggaaaaccatgttttcgtctgcagaaatggaccaatgtaggctttgagggtgggccatggtggtctggtctgcggagatggtcctcagatttggttttggttttaggctgctgcgtaattgtgatggcccaattgctcaccagatatgaattgcaacctaacaaacatgtagaattgtgcacaggaagtgactgaaatgtgcttctttttttgtaacagttgcacagggcgtcgacagtaaaagccggccaggaggataatcagggtgcccacaacagcagcagtagtactccgtacgtctctttacctcctctaatattatctgcgcggcttctttctctgtttgcttcgctaggtgacaaactagtaggagtagatgctattgcatttctccaatcttttcttctttttttcccctctcgcttgttaatcttcttgtctgacattgctagtcgttatgcgtgcaaagctatggcctacgggctatgttggccttcaccagagtaacgcccatgtccaactccctttgctgctttacaaattaccacaaatactgcacatcacatgcttcttattggtggaagtacacgcccgcgagtcattttcccgtcagatcatcgtgctgcgtcctgtctcgcgtcccagccaggggctattctagctagccagccagcgtgtcgcctattgaacgacgataaggaatgcccccgtgtcggcatggaaccaacaagctaccccggtcacatctttccctttactcaccgtgccggaagcaaaagctggagatgataacagcagcagcagtattattagcagctactcttatctatcctactaaaatatagcaacatctccatctacttcattattttaactaattataactatttctcattcaaagcaaaattgattttatatcttaaccaatcacatctcttatttaattcacacctattcttttgttttttgaaaaaatgtagaagtacttgtattttgggatggaattttttaagtacttatattttaggacgggaagggaagagaagaataggtggctaatttgtttagaggaatggcacagaaggcttagtaggtggctaatttgtagcaacacgcacgctgtgccctgcagctgctgccgctgcttcctcctcgtctctctccgtcacatctcctagctggtggatggcaacaggcatgtgatgtgtcatgtgtgccatgcccaacttggcactctctgtcagcgttatcactattactcttcgcccaaatgcttaagcccaagctgacacgctgtaagctttagctgcatagtatagtagatgggccaaacgtctcaacctcccaaacggctatgatcaccattcaccaggcgcgtcgacgcgagaacaagcgcgcccgtgtaaatgtaggtggcacgcacggtggcgtgaacacgagggcagggcatggcagagctccatgcctgcagccgcgcgcgagagacatggcgatggtgttacgtacggggtaacaagcgacatgatccctggccggacgccctgcctgactataattggcaccaccagccacctcacgtagtatacacaaataatccgatcgatgatcatatcgctcgccagccagcagcagcagcagcattgcgcgtacgtcgaccaggttgaattgcaccgtctctccgtcgcgtccgtccaccatatacatatacacttgactccgactcgatcgatcaacaaacagtcaatcaacatggtgggcacacatatccgtagatcatgtcacatggggcgcgcgtacgtacgcgcgcgcgcgcatgcacaggcaccacagtttgggttgggtgagcctgcagcagctagcgaacccctgttggacaacgcgtacgtacgggggagcttctagtggttgccagctagtatttccgtgacgaatcctagcagtagtgtgtaccaccatagcgatatgccgcgtcccgcccgggcgcgctccgccgctgcacgcactgtccgcgcgcgcgtaccggtcagcaaagggggggaagtgtgcgtacgtacgcccgccacgcgcgcacggcttttccatcgcgcgcggccgggcgccgtgcatgcgagttccagaggctatcaatggacgcgagatggcggtggtttgcgcgcgcgcgcgcggtgtgtaattagccgcggcatgcagctgcagggtggggtgggcgcatatgcatgtgcgtagctagcggtgctcccctacagccaactgctccctgcctgctaaccatttaccatccccacacacacacaccgcatgcaaacaaccacttgcattgcatcgcattcatccatccatctctctctctttatcaccagtattcatctcctcttatctctctggggctggcagtagttgtaggagtagtggtataggagggagaggaggccatggtcgatcgatgatgatcatgacgtggtacagggggggaagagggcaggcagttaaatggggaaagtactcaggtcccccgggcgagtcattgcacatgcactttgtgtccacttgattgaattcttcttgtctcttccccaccctctcccccctcgtgtccttgagatgcgtgcatgccatcgacatatgcgtacttgcacagtgccttgtagactactctgattcgcctacattttatatatgcatgatcccggccagtacgtacacgtacatgtaggccaccttgtctagctaccattattgtttacctcaggtaaactaagctttatccatgtgcaagcattgctatatgtacccaatgcttgtacatgtatgtcgagaagcttaattataccgggaggagtagcacgcctagtctttgtattgacctcaagagtcaagattctcgcactttcatctcttccaaatctcccacatgacgaggttgattgcggaacgtacgttcttttgttaagatgcctctactgtggttgctacagtattctttgatagatatatatatttttttagaaaatgaaataaaacctagcatccgcatccaaacaggatgtacacggccaattctttgatagatgtgatgtccatttcgtgagagtgtgtcgtgattcctccaaccgcgttccacaccctgctgtgagtatttgaagtaggggaagaagcaattgcttgctcctagagtgaatcggaggagcaggaaattgtccctacaattcacgacctatattgtggatcgcaaggcgaagaattgcacttgagtggtgggacacatttgggcctgattggcttattcaaattggtagttttcaatataaagaattgtgcattggtaccaaaggtggagatgtattcaccatttcgccttgaggcatcagcttccacacaatcttgaccaaatgtatatgtagttgtgacttgtgagccacacaatttgtacatactctctctcaaaggctgtagaagtacattcaccttgaggcatcagctcacacaatcttgttcaaatgctatgtagctgtgagctacacaatttgtactctctcacaggctgtagtacatctttagtgttgagtagacactgcctcatcagtcatctagatgtgaaggatccaattccatgatctataggacattttggattatcactttctttcgagctaagatggcacaaaggcttggaaggtgtctcatcgtgggcattgtcaatccaaccatgcgagttgtcagaatttgcataattttattaggtctagcaacgcatctatcaagttataagagaagggtaaatggagccactttgtccacgttgaaggcctagaaatcatcgcggtatcggagaaagagaaataagatctatgatgttgatcgtagtgggtctagattataaccatgcagatggataagtatgatgtatatgaaattattgcatttatatatagagatcacaaaactacatatattctggtcaaaatattgcaaaaatacatatttaaggtggtgtattacaatactacagatttaacatcaaatttatcaaaaaaatagatttaagggtaagaatcgcaaaactaagtattttaggatttaaatccctacaaataatgttatgtttgaattatagcatccaagttttatgattaaattgacactagacctatattttcatgatattttttagtactaatgctttgtttggcaatgctccatattccagatccatgctaaatttgaagtttctatgttaaattacattaatttaaaatttaaaatttcttctcaaatgtgaacaaaacaattcatcagaacactattaacgtaatcgcagatccaggtcgatccatgggtttgtggagctagaaatatccagctctacaaatatcttggattcggagttgtatcaaacaagtcttaaatttgtagttgtgcgatatcctagcttaaatatgtagttccgggataaatttggtgtttaagctgtagtgttgtaatacatcatcttaaatatgtaattttgtattagtttgatcaaaatatctgttgttttgtgaaatttactcttatatatataatgtgtacaaaatcattgtatttatataaacaggagctataattgtatatcaaatacaaagatacttttagataaactttaatttatctcagtacaagattgtgctggaattttggctagttaaaaataaaatttaatgaccaaagttgtacctggagatcatgttggtatccaaaacttactgtgactagagagggaacaatttgatagaatctcaactctggtttaaagaaaaaaaaaagggtaattggtactccagctagcattccaattcatccctgagattgtattacttgagacaggtgaaacatttttgttgtgcataatttgactactgtataatttaatattaattatattggttttctttgacatggagattttgtcttagttatgagaaaatttaattaattgcgcagatatttttggaacgacagctagctatttcagcacagagagatactagctagcattacacaataagctgctgcagcttaagtgggaggcactgaaatgctacacgttagacctgatactctttagctggaggattcctcctgaacgccgcaaagaaggccacctggataaaaaagggcaatggaggtgactcagtcaagttgagcaaggaacaaattcagtatgcagctgcatatatcgggcaatcttacggccagggaagcaaatgcaaagtccaccccaaaactgttgaggatgctttgggcgtttgcagcagaactgtagaaggaacagatactactactacaactactgaaaagctttgctccagaatgcaagagaatgaaaaaggtacaacgaagttagatggggagcaacaaggtgaaaggttggtggattgtacttgtaaggacgggaaaatcaatcagctacctcaactgtaccattgccatcttcagattaaaatggcagagaatttcttcttaagaaaaatagtactagtaaccaaattcctgcaggcttgcaggtaaggacgacagggcaaagagtaaataagagtacatgcatgcatttttctgcacagatcaggggcacagggtcgcaggatgcgcatggtgtttaattagaacaaataaatcagctctagctagatcgcaaaatcctgtactggccatcagaattcagaactaaggatcaatgctagctgccactctgaaaagagggggaggaaaagttattctcctcatttctttcacagggaccaccatcagctgctgtgctcgagtagcagtgaacaatggagcgagagacaaagctataggcagcagcgaggagtgagctagcactgatactactgggcgtatatgatcagctcgccattgtcatcgagcatttgagctgagctgaagctgaagctgaacttaattctctcctctctcagtgctgttttggtattgaatgtaggatcaaccgatcgatgcatcaattaagctcgcacaggcgcagggccctgacgaacggacgaactaacgagtaacgatgcttatcctagcctcgctcctgtcattctgtgcgtgaactcaatgcagtacacttcaccagtacagccatcatttctgggtgcccctggctgctgtgcatatcatgtaaatgcttgcctagattagcccccctcactgacgtccatccaacgtcgacagcttagcccatgcacgtatgtagtagcccgtcctacacctagcagtagtcacccccacaagcaatcaaaagtaaaagtgaaaacaacagttcacacaaattatactcgatcgtaatagtagcactactcgccatgtcccgacctcagattgatctttccgtccgtccattcgtccatccattctaatccggcaatcgcatcaagttcgccggatggtggtggtgcagttaaatcaggcgtactagtggtggtgaatgttggcgatagaggtaaggtttaactccactggagcgggatagtagctagccgctggacccgttggttccgacagtggcgaaaaatatgccattccgcggggggcgaagagataggggaattttcagacagccgcatatatcccccgcttgggctggcgagaggcgatcgatcgatcgatcgggcgagatatattccgttccaccccccggcagacacgctctcgtctccctcccccacgcacccactcgtgcgcgcgcgcgcgtgtatatatatatataggcagaggaggccacaccctccagggcaacccaaatcaccaacaccactacactacacacaccactgcgacctgacctgaacctgatcacacacacacactctctctctttctctgtgctcagtgctcacctctctggaaggagaccaaaaggccaaagagaaacacgagcaccaaccaacacagctgagccagagcccagagcgctagagccagcgggagatagccagtcaaatgtacttgtagcgctctctcgcacagcccggcgaccaatctccagaggacagcgagcgagctgcttccttcaagctttgtttcttctcctccaaacagcgcgcgctttttgtgtactccccgagagttgacagccgtcgtcgtcgtcaccatgtgcaactccggcaccagctcctcgccgtcggcgcctgcgccgccgccgccgccgctcacctcgttcaagcactcctcccacctcctccgcctcgtggacgatgacgccgacgacggccatgcgctgctgctctccaaggtaaaacacgcggtacatatgctgtagtaatacttacccgcggcttggtaattttgatggcgtgaacagaacatgtaggccattatatcaaagagctaatgcaagaagcacgcatagcgacatagctggctggctggctggttgtttaatgcttatttactagtagctaggcatcactggcagtaacagtaacgagaaagaaaaggaaagctccagctgttgggaaatggcagagctgatcaatacgtccatgcacacgaacagctgatcgagacgacgacgacgttgctttgcttgttggtttctaacatgcgtgagtgcgtgtctcccaggtggccggcgaggcgcaggcgatcgggcgggtgtcggtgccgatggcggtgacggggctcgtcatgtactcgcgggcgctcatctcgatgctgttccttggccggctcggcgagctggccctcgccggagggtcgctggcgctcggcttcgccaacatcaccggctactcggtgctctccgggctggcgctcgggatggagcccatctgcggccaggcgttcggcgcgcgccgcgggaagctgctggcgctggcgctccaccgcaccgtgctgctgctgctcgccgtcgcgctgcccatctccctcctgtgggtgacgtccacggggtacatactgaagcagctcggccaggacgagggcgtggcggacgcggcgcagacgttcgcggcgtacgcgtcggccgacctggcggtgctcgccgtgctgcacccgctccgcgtctacctccggtcgcagaacctgacgctgcccatcaccgcctgctcgctcttctccgtgctgctgcacgggcccatcaactacctcctcgtcgtgcgcctccgcatgggcgtcgccggcgtcgcgctcgccgtcgcgctcaccgaccttaacctgctcctcgcgctcctctgcttcctcgccatctccggggcccacagggactcgtgggtggggcccacctccgactgcctccgcgggtggccggcgctgctccgcctcgccgtgccgaccgccaccgcggtgtgcctcgagtggtggtggtacgagctcatgatcgtgctgtcgggcctcctggccaacccgcgcgccaccgtggcgtccatgggcatcctcatccaggccacgtcgctcgtctacgtgttcccgtcctccctcggccagggcgcgtccacgcgcgtcagccaccagctcggcgcgggcaggcccgcgggggcgcgccgcgcggccggcgccgccctctccatcggcctcgtcgtcggcgcggcggccgccaccttcatggtgtcggtccgcagccactggggccgcatgttcacgtcggacggcgagatcctccgcctcacggccgtggcgctccccatcgcggggctctgcgagctcggcaactgcccgcagacggccgggtgcggcgtcctccgcggcagcgcccgcccggccagcggcgcgcgcatcaacctcgcctccttctacctggtcggcatgccggtcggcgtggcgctggcattcggcgcccgcctaggcttcgccgggctgtggctgggcctccttgccgcgcaggctgcctgcgcggtgtggatggcgcgcgccgtggccgccaccgactgggacgtcgaggtggcgcgtgccaaggagctgaccaaggcgtccactacaggcagcggcaccaaccaccagcacgagtgcaacaacagcaacaccaacaccgccaacgcaaaggctaacaccaaaacgacaacgtctcccgccgccaataacatcaatgccggtggcggcggcagcagcgacaaccgcggttacgtgcccatcagcgagagcggccacaacgacggcagcgacgacctggagaagctggaggaagggctcatggtggccacgagtggcggctgctgcggctgcggcgacgcgttaggcgtcgacacgaaggctggggacaagcagcagtgcagcaacggtggtgccggtacggcggagggaaatgcggggcagaggaggggctcggcgtcgtcggagagggccccgctgatcagtgtgggggacgacgaggaggccggggaggagaacgacggcgacggcggtggaggtggccacgtctagctagctgctaatcaaccagcgtggtcgatccatccatcgattaattctggagaggttttgatcgtacgtacgtaggctatgtttgacactgatcggccggtctccatttcatctttctctccatcttgatttgggggtgaggtttagttttgtctgtataaccaagctgagcagctaattaatgagagtattcaggaaaaaaaaagagggagaaaaaaacatatatattcttcccttatttttcttaattaattatacttctatgtacaaatactaattagtttgggtgtaaattataattaaatcaattgatggtgattaattaagaattgacaagtgcatgcatgttgctgtttggcatgatgtggcagtactgtttgttgtgttgagagtgggggtgtgtgtggctttgggacctgtatatatcgctgttcccctagtggttacatacgtgacaaccaatggtggtgccccatttcggccatttcccaactgttccaacatcgctaagagaaaaaactcgcattggccctcctttaagttttctccgagatggctagcacagctacctagctagctacctttcttccttttgataaagtcgcaaccatttgatatctacaagcacttgggcgaaaaaaaggcacccttggtgttttgcgatttttaaatattactactgcatatgcacctttttatttatttctggctcctcgtgcaaaggaaagatggtgcgtgtgactcagtttctcatgtcttctatattgagataaaccttttgatcaaaaggctcttgccacaaatattaatttgccattgctcaccacacaagaagtgctctctcgagggtaaaaggatcacactagctagcatgaatttatactttctgtgcagatgtagaaatgtggaatataacccttatgtgggaagaaaggatctatatcataaccaaaatttgatgatgcttgccttagtgtccgtagcttataagatgagagagagagagagagagagagagagagagagagagagagagagagagagagagagagagagagagagagaaacctagagtgctagaaattcttgaacttaaacaaatcgtatggcaagctcttaatttggtgagccccggattgcgactagcatgcaactgttggggacatctaaatgtgttccagccctgctctatcataaaacaattattgttaaggtgtttattcctcggcccgctctttctatgagtggttcaaaaacatacttttgttcacaaatagatgtcatttgaggaatatttttccctagatatataggccctcttataagttgtcgagactcgagacttgtaatagaactagtgggcgtgtggggctattaattgcagttaacaatattagtttgaaagtggtaaatttgtcaaaataatatgatttgattgacgaccgcttcatatgcccgaaactaatatgacgttcaagaagaacggtgcgaatattagatcgcatttttcttaagactataagcgtacgtggtccaacatatcttttatcctttagtgttttcttatctatatttaactagttgatacccacactttgctatgagatatgtggataaatgcatgttatacattatagaaataatagatatatatatttaaagaatgtaaaaaataatgtgaagataatgatttgacattatttgcatattgagttataaaaatatagcaaaatcgtgaatgatatgtcatgtttgcatcatatttaaaactctagataataattgctagtggtgataatgtgatacacttgcatgttgagttttagaagttagtggacatatatatgtctaggttcgtatataaaagttgatttttttttcaataacaaagggaatggccacataggagcgttaaggaaactattcactaattttgtactcatatactagtataagacccttgctggactaaaaatcacacatagcagtaaagtttgccgtccaaggatacctgcaaaagcaccatttgcacattcatctccctcatttgcacctgctgaccagaattccctttttcaaaaaaagaaaagaaaacaaaagtcccctgatgagactcctgcctacagtttttatccgagaagacttggggtgtttagatacaggggtggtttagcgtgtcacgtcggatattatatatgtgtcgcatggggtgttcgggtaataaaaaaactaattatataatccattaataaattgcgagatgaatttattaagcctaattaatctatcattagtaaatatttaatgtagcaccacattgcgaaatcatggagcaattagatttaaaagatttgtctcgtaaattagttgtaatatgtgtaattagttatctttttagcttatatttaatactttatacaggtgttcagacgttcgatgtgacatggtgtaaactttttaggagggatctaaataggccttaaaacaaaaaaaaaaacaattggaatactaccgtgtttgagagtaccatggatttcagtagcagcagcagtcaatccacggacaggccaggaggcaggcaggagtgcagggcagagaagcagagtctgcagagagaaaatagattactcctacttgacaaggcgttgccaaaagacgaatcagaggctgcccaatcgccacgccgatcagatcagttgcgacgagacgcttcgggcacggcatggagagacagccgatcacaagcgcgaccaccatgcatgtcaattttgtcatgcatatgcttgcgccgatccattagaccatttacagtccgttctcctcattcgaggtgcatcagagtatcacgtagactaaggttatgggtctaaaatcttaattcttcacagtgcaaatggctttagttctaatatttttgtttcagttctaatatttttcataatttgtgtggatgtccaaaatttacactgaacaccctagaatctagaaaaaaaaataaacccctcctcacccctctctctcctcctctctccctactatggcagtttggcatcctccttcggctaccccgccgccggtgcccctctccccctcccctcctctctccaccgacgtcgacgccggtccgagcgtggttggcaaggggcaagcagccggcgagctccaagctacgtggtcggcgagctccgaccgacagagcgggctccgggtggcgtgctcggcgaggggcaagcggccggtgaccctgtctcctcccatagccggcgcccctctccccctcccctcctctctccgctgacgtcgacgccggtccgggcatggtcggcgagggacaggtggctggcgagctccaactgacacgacaagctttgggtggtgtggtcggcgaggggcaggcggccggcgaccctgtctcttcccacggccggcgctcatcatcttctcccctggtcggcaccctctgagctcggcggcgcggatcgaacgcctcgtcaatggctaagaaatcggcaccggatctagcggctcaccaacggtgtggttgagtggcctcagcggcgagcgggcggcggtaggcaggccctggtagcctcctcttctcccccggtgcttgttctcgcttccgacgccatcttgtgttgctgctctcgttctcctttccgctgctcttgcacgagagaaaggagagcgcgggaggggaaaaggagcgcggccgcttgtcgaagccacgagcggcgaggccctgacctccacaacacggagctgcgcccctctcccgcgccgcgcgcccttggtcaggccgaagaacgggtgaccagttttggctccgcgttcttcacgggacaacgctggtagatgatgtggcggcaaatattctgttcctcacgctcgggccgaacgacacgtccgcgcattgtgaatggccttatgtcacagagttgcaccagctgattgtgaaaattcggttatttttacaattaaatttagcttgtgtcaccattgaaaaacattttcgattatatgtacaaacaatcgataagaaatcatgctcataaaaaatcatgggtaaatatttaggaccatctgtgaaaattgttttaaaaggatcatctattaaaatagagttattttatagggatctctttagaaatcgtctatagaagtcactattctcacacaaacccctaagggaacatatattttcacaaatggttccttataatggatggctatgaaaattgtttgactacattaaaatatgatgggccgaataagcgggtaagtcctccctcccttcccgcaattccctcctagccttcatgcttatcgtcctcctttctaccatccgggagtggcggatcgacgataactgtggggctcgggagcgcatatcgatggtggcagggccaagaagagtggattcgacatcgatagatctaagtagcagtggatcgatggcagcgagtcttggggctgccaaatttagcggcgtcggcctcgggaccactagatatagcggtggtgatcctcaatatggcttcatttcagttacagcaatgatgaccgcaacagggtctaagactcgacaataacatcatgatgatgaccgtagtaaggacgtcgtctcggctgttgctaccacttttgcaaagggattatgaagagggacttgggaaatttgatcatgacctatgtagaactgcgattcgatgtagttttcatatttttttttacaaatatatttgcaagtaaagactactgtctatgaggcaggtaatttatcagaggcgagcgagtcacccaaccgcccacctgtacaaaccaaaattagtcacctgtatacaatggtagactggtagtgctttcgtaatagtgtgctaatcaaacaggaatacgatgaaacttgtgtactagaattgtcagataaagcaccctgatcttcttagatttctttggttatctttcgctttgcatggtagtattatcaaacccaacccactagataggtggcgaactggccaagtttatttatgtcaccactcaccgagcatggcccaaaggcaatatgggtccacaagacaagtcctaacacatatattcatctgcatattgtagagaaaaaaaataaatgtgcactttgcacatcactatatatcttttccttcttttattttttcgtaagtagatagcctaagttgactaaagtgttatttaatagtatcttgccgataggacatatgacttggtgtcttgcagattggactagtgtctaatgcatttataggatcatgtcatggtgtcaacgctttagtgatactatgttcattatttatgttttccgaccatagtgaaaaattaaaggtccacattattctaaaaaaattgctggggaatacgagtcatcaaattaactgtttgctttatatatcatacaggaaggaggaagacaaatgggtgtttgtaacaatatactcactcgggtcacagtctcacagataagtgaatactacgtaattaatttgacgctttcacacaaacacgacattgacacgaccgatctaggcctcctttgaaacacatgaagtaatgtcaatgtcctgtcattaacgcatcaataggtcagatattatggcttattaaaccctacaggaagtgaatcctcatgaatttgtaaaaaaaagtgttattcagtagcactacagaaaaaacatatgaattttgagatacaataagagaaaacatgaaatcttgtctctggctaactttcctctaaaatttatatgaaatgagctattctataggaattccaaaggatttttttgaaggtcatttatttcaatccttcatgattcctccatttttttcctttgttccaaagaagcctttatttcttatattctccttcttacataacctagcaaaattttagtatcataaaaaatatttctgagactaatttacttaaaccattttaacattttctttacaatgaaaatgttacacatagctagacgttggcaacaaggatacgaccacaaagttctgttttaaagaaatagagaaaatacgcaaaatgaggtgagctattagtatatgattaattaagtattaattattttaaacttcagaaatagattaatatgattttctaaaacaaatttcatattttttttaaaaaaaacacatcgtttagtagttcgggaagcgtgcgtgcggaaaacgaaagaaacaaactcactttcatctccaaacgaccaccggtgaagaagtgatttttactcccggttcgtaatcccccagtagtcctggtttgaggaaggggagaggaggtggaggagaggggaggggatgaggaaggggaggaggtagaggggatggttcggggatgaggaag

SEQ ID NO: 10211 - DNA, 97370 bp, Oryza sativa
ccgcagcatcccctggcgcccacgcatggccggtcgttccccgccgccccgagggcggtggtggcaggtgtgtcgtcgcgccccgagcagcctccccgaggagtccctatagctcagcaagcacagcccaaggttagtgactaattttagtctgcgagctttgcaaggaaggggaactagacgagaacttgaagtcttgaacgttctactctctagagctttttaattaaacgctacttgtagatttcggtggcgatttatggtagattttggaacttattacctgttgggcatgctacgtttcatgtgcatgttgaattgcttagtgaacttatatttggtaatagcacaatgctacttctgaggtaaattaggcccatgtgaatggttccgtactggatttagatcttgtaaaagcgaagacacgaattcatgggtttttttattgttattttgattataaatggtgctggtctattttgggtgctgtgttaattaggctattccttattgataaattctggacttaaatattgtgaattttgaagttccttaaattatgcttttctggcatctttcttaggtcattccactaccagctgtaactccatctcctcaagagatcaacaactcaaaagataggtaagaaaactacaaactgtagtgtgttatctttttcttttgaggggatatagttacaaactatagtgttttatcttttggacttagacttcccaactgtcaattttgattgtttatttgtagtgaaaggagcaaggaggactctacaacagtggttattaatgaccgtaaagtaagtttatgtttcttaaacttttttctagaacatttgcgctgtgttaatgcaaatacattggctagatgaggagaatacctgtacctttggatagttggaacatgcccaatcacttttgcccattatcatgaatctttgggataccagttatggctcaccttagacgttttatatgatacaaattctttttctttgctctgattagtgacactatttcagctcctatgataaacatgattttgtttggtttaacatttaccaaagaaatttaaaacgtacggctcttcacaccttattttttctgttcatgcaaatgcaaattgcttctatttcacaattcattttcttaattatccaaatggttttgtagatacttgggctacgaggctgaaattctaatttctaaatataattggcccacatatgaggaacctcacaatataatctataccttgttttatcccgacagatcaagtggacagcacaaactgacatttctttttattgttccaaaggttaacttgatggatagtgagtcaggatccttgtatgcactttgtcgatcatgggtgcgtaatggagttccacatgaaagtcaggttagcatgctcactcgttacaaatgaatgatttgggcacttgccatgtgaaaatttctctatagttatgttaaactagatcctaacaggttcttacacgcctcaattgtcattctggtggtcttataatttctagagttactctaaagtgtatttcttctcagttataatttataaatgcaattctaggactacaacttgattgattatgttgtatgcctgaattttcctcttactactttgaacggacacacatttgctctctgttatttaaagtttggtttaacatcaacaagcttcaaacttgtgagaattttgccaggtgcactttgtatggattgaattgtcctataaaatgtaattgcctagtggagcgatgtctcctgtagagacaatgtgagttgttttgcactgcatgctttcttctttcctttgtactaatagacaggcaaggctcctgtcactttactcccctccaccaccaccacaaggaattccccttttggctcttaatatgtgaatatctgcagttcatagtccatattttgtatgtgcatcatgctatccatgcacttgtcttactagttcttgcagccaagctttggaactggtgcaccaattcttccaagaccactgcctgcttcagtcgtggactctaggatatcagaaaaggacaatgatgctgagaaagagaactcagaggaagagaaggtatcttgtaaaaaactaactttgaagttttgatctttgattcaatgaatctagcattttagttatgctaattcatcgtacagcataacacttagttatattctttccaggcaattctggatcatactggcattttctgatttttggcatgtaagcgtgtatgccttttataactaatattatgactaatacatgcaaaaattgctgtatttcttaggagttgcacataccaactctgaattttacgctttaccctgttatttaaaatgaagtatattgtctatcttatgtcctgcatatcccactcttgcttatttgcagttgtcttggtccattatttgcccatgtgttccatttgctcccaaaatagttagatttgcttcccagttacaaccttcaataatattaggtattaggtgacggtttcatccaacatgtttgagaaatccgggttcatttcaaccttgccatagaaatgtagtatcccaaaaagttcttgagactgaagggataaaggagtccctttttcgtctgtaaattgatattcttggggagagctacttgcttgtgacttctgttactgaccactttgtagctattgttactatttccttctattatcttttctatcaccacaagcatagttttttacatctataatcgcagtgttactatattagctcaaaaaccattggctttgatcttctgtgcagaatgaaaccggtgaatatactgcaagtgacttgctgaagcagcatgtgaagcgtgcaaaaaagatccgtgctgggtatgtatttgttttcatcttccagcccttttacgtatgatttgtgaagtgagcaagtaagttcaaaatatggtgatgcaatagtgatgattggcttttgcttccaatatgtaagtccagcttgattcttcaggtatccaacgaaacaataatgatgcactagcaaaaatggtaagaagatatattatgaaagtgtttcacaagacaaatgaaaatatgtagtgtgatgttgtcatgttgattgttttggtgtagtcagtttatataacatatattaacaccttaatcgcaagctcaatcaaacttatattgctgggtggagatattaagttagctaacttaacgcccttttatgtggtgtagtggagaggttttaggttgtcattttgatagacggcagattgaaaacattagttgaggaatggctgtttgagaatgttatcttcattagacagagttactgagtgttgtgttccactttgacataaatttctttggcagtttgcaaaaggagcggctccgacggattgaaagatacaagcagcgccttgcacttctcttacccccgcctagcgagcttgggaagcatgatggtcattcgtagaagtgtaaaaccgacccaatttgtattcaagtgttgtagtagctcttatgtagccttggtgttgccgttttagttaagaaaagaaaaatctgaagaagctgaaacagcatttcatctgctggcctgtaacttcgttagcatagtcgttcgagcgacatatacttacccaacaacaaactttgacctccatgtaaacgtcttctccggctgtgttcagcgtttgagtttaacatagttttatgcaatgacttgtgctatttatgctgctggatgtttgtactagacaagaaatttgatggctgtatgcacgagtgtttttgcatgttgtgccattgcgccttgaatgcatgattaattatccttttgtgcttaattccgtcgttacttcgtcttagaaagtatctgtcaaaccatttctcttttgatagaagctattcatttttacctttttgcgtagctaattattaattcacgtgtacatttcaatcttcatagaaaagaaataactaaacgaaattaaaacataaaacacatgtgcaatctattatattactaaacaaattgaaaggaggcaccatgttcgctgtgggggctagaaatttccacattaatcggagaaaaagaaaaggagagtccaactagaaattcgaaataactgaaattcggaattaaaaataagtacggttgaaaagagagttcgtataagaacccaatacaagattaattaatattcagaataaaaaataaaataaatccgaaatttgaaaaaacgaaagaagagttcgagtagaaatacaatttaaaaataactatattattaaaaacagctttaaaaggaggtatcgcgtttgctatggaggctagaaattctaacattaatcgaaaaaaaagaaaaggagagtccaactagaaatacaatttaaaaataactgaaattcggaattaaaaataagtactattgaaaaaaagagtccatataataatccaatacgagattaattaatattcataataaaaaaatgaaatccaaaattagaaaaaaaaagaaagaagagtttgagtagaaatataatttaaaaataactaaaatttagaattaaaattaagcaatattggaagaagagtccatataaaaacccaatacgagattaattaaaattcagaaaaaaaataaaaaaatcaaaactagaaaaaaaaagaagagttcaactaggaatacaatttaaaattaactaaaatttagaattagatatatgaaatattgaaataagagtacatataagaacccaatacgagattaattaaaattcggaatgaaaaataaaataaaatctgaaactagacaaattaaaaatataattcaagtatgaatacaattttaaaagtaaattggaatcatgccattataattttgcaaagtttgagatatgtcatcggtatctcaatgacatataggacccatatgagtcaatgacatgtgggtcatgatggcatatctcaaattttacaaaattataatggcatggttccaattttccattttaagaagactgaaataaatattaaaagaacacaatacaatattagttaaaattcgaaataaaaaataaaaataaattatgaaattagaaaaagaaaaataagatttaactaggaatacaatttataaataactaaaattggtgataaaaaataaagactattgaaagacaaagatcatctaaaacatatgacgagattatttaagtaataggcctataaaggagtagagtgatggtggttgatgggacatctaaaaactattaacaaaaggaaggatgacgggcaggccgtgaagcaaccggttaaggtggttggcgggacttctataaagtaaaaaaaaaaccaatgataatcatatttgattttttaaatctcaatgataataaaatgaagaggcagtggacgggttgtacaggagtacaatggcaaagccgcggatggttggtgtgacttctagaaattaaaaaatgaattccaatgatagttatgtccggtttttagaatcccaatgaatataaagagtaagcggcggacgggtcgtacaggaatatagtggcatcgtttgacgtgatttcaaaaaattataaaaaatgaattctaacgagacaataaattataaaaactataaggtccaactttaaaagttcggtcttctaaaaagtaaaaaaaaacttcaatgatattcatgtttgattttaaaatctcaatgacaataaagaaggaaggcaacgggcgagccatagaggagcacattgacaaagctgctgacgttttggcggaacttcttagaaagtaaaaaatgaacccaagcgataattatgttctattttgaaaataacaacgacaataaaaaagaagaggtagtggatgagccgtataggagtataatggtagcgtttgacgggacttctaaaaattataaaatcgaaacccaacgggacaataaactctaaaaaccataagatctaattttgaaaggctccaaatagaatgaatagaaacagtgccagatcggacaagcaaataaagaaggatataacagaagtaacagatagcaactggtgtgacttttaataaaaaatataaaattagaaacatggaaatgataagatttgaaatttcaaagtcttaacaacaatataactatttaataaattttaaataaaatcatattaaagatatataattttgtataggtgctaaccgcgcaattgcgcgggccacccaactggtttcctttcaacaaacaatttcacggagacgctgatcaacctgatgatcagccgcggttgaccaccctgcagttcctcctgatctcccccatgctcccggtgagcgggctgatgttgcccatcttgaccatcgccgtcgcgaagctcctgaagaagtcgtcctggctaccggcgaaccacacgacgatgggcgcggtggtcgaggcggcgccgcccggcgcggagagcatcccctggtcggactggagcaggccgcggttgcgcaggaggttgccgtagtagctattgtcgaacgcgtccggcgtgggcgggtcgaggttgcgcagcgccgcgctttcggggtcgctcgccgggcagctctgccggagctcgttgaggtaggccatgtccagcgtctggtccggctgctccgtgccgctgatgttgtagagccggtcgtggaagaacctgcactgcgccctcccgatggtgtgcgcgccctggagagcgacgaagtcggtgtcgtcgaggttgaattcggagaatttccgtctcaggaggtccagatcgtccgtcggtccggggaggtctctggcgccctcgaagttcgccgccgtgccgtccctcctccccagcatcacgttccagctcggccctcctgactgctcgacaagaaagcgtacgtgtcagcgatccacagatactatatggttcggcgtgattgaatgtttgatggcatgggtgcgtgcatggactgaccagctcgacggagatctcggcggcgagggcgaggatgtcggcgcaggagacgacgccggggcaggcgttctccagggcagccttgatgccgtccaccacgtcgaacccacgcgccgaccctttgttcgggggcgcgttcttctcgctctgcatcgcgccgaagtcgtcgagcagcagcgacccgtcacacccctgcacacacaaacacgttaatcccagctcaaatatgtcacgcaaacgccatgcatggcacgcaacctaggacacactgtacgcacattgacgaagcagtcgtggaagtggaggcggaggaggctggcgggggcgcgcgggtcggtgcagcgcgcctcctggacgacgcgccgcacgatgtcgtacacgcttgggcacgacgcctcgtagtacgacgggctcatcaccggccaagcgctcgcgccccccgccgccgcgaggacgaccagcgcgcacaacaccaccaccgaagccgccgccgccatgcacgccggcgaattaaagtgatctcgctaggaaatttttgctctctgtgctagctatatctatctcgccagctacctcagctcggtgactgtgagattagctaagcttggtgttgcgttgttcgtggagcggacatggcgtcgccgggtgtatttatataccagggctcgaacgaggtttgacatgttccggctacggtagttgcagacgccgctttttcgtgcaatgatgtgtggactccctccaacgccaacgcgtactacttgcctacttgatcgtgtacttgtgtagtggttgagcacttgagctgatctgctgatgtgacagaaggggtctaatttcttgatcgtgaccagatagaggtgattactcgagagagcaactcgtcggccagaaatcgctgaattgttagtttattgtattattattagtacaaacagtaaaccttttagtattatactctgcacacacgcattagataatttcaaaagcgtgcaacatttggcttgtcaggtgttttgccttgcaccttcttcaggcctccaactgctccagtatttaccagttgatgaactggtcttggattcttactgctataagtaattttcgtgacatagaattagtctgatgattagaagggatcttcacgtactttcttatgagtctgtataactgaaaaaatcaactcaaactaagcatctaactagtacaagaacgtttacttcttgaagaaaaaaaaaaggcatttcctaattttttttagtgaccaatcatctacggaactaggtgaaacccggcgcgttgctgcgggatttcagtatgataacaataagtaaaaataatatgtaagatggctaacaacatatacttacataagttgatatggtttatgataatttaaatttaaatagtatatagacgattcaaatgtaaaagtaagatattgaagtattataagagaataaagggagtgagatagtttggaccatagattaatcatttaaggctaaaaataattgatgtgatatgatttaatgggagaagagagaaataacactaactaagtgaggatgtaccatataggtatatatgatattatcataaatgatgaagatatatattgaaatattatgtgaattatttggagtgatgatttaacatgtttacatttttaaactctaaaatttaataaattataaaattatagataagataacatgcttgtatgatgtttaaatgtaataattgttaatggatgatgatgtgatatattgttaatgtattatgatgtgacatctttgcatgttgagctttagaattagtgggttataactttatagtaagataggataagttcattattgtccctcaacttcacgttgagtcagtccgaggtccctaatctcaaataccagaaatcttcacctctcaaatgttcaaagccgtacaaaataggtcccatagcataggtcccatagcattatatatgggtggttttgctgacatggcatccgcctagtcagcaaagaaggaataaaaaaattacagagcccatatgccatttacagagcggtgccgcgccgtggagttgaggaagatcccgaccttggagaggtcggcgccatcccccacaacggagaggtgggaggagatgacggaagcggccaccagatcggaggcggtgagataggtatcttccccggagaagtacgagaaggggtctcggagaccgtgctaggtttgacggcgagggcgtaggtgccgccacgaccgccgccgctgccggcaatggaactaatcgatgggcgctggctgtggcgatgggaaccggcttgcgagaagaggacgcagagctagaggccatagcaacgtaggagaatggcatggccggcggtgaggtagttgcgaggatgaagcaggcgaagccagctggcggagcggtgagcggagcaagccgctcgccgccgcccgctgccgcgctcgcccgcagtcgctctcttctctgccgctggcgcccctgctccgctccacgcgggcgcgttgctctgcctactcgctctagactcttgtggtcttgccgccacccgcttccacatccttctctacggcgaagagaaagaaaagagaagagaaaagagaaaagagaagaaagaagggatgcataccccacatttttattcgtctcccttacatgtgggtctagattgctaactgggatgccatgtcagtgaaaacacccatatatactgatatgagacctattttacacggttttgaacatttaaggggtgaagatttctgatattggagattagggacaccacagactcgacgtaaagttgagggatggtaggggaacttattccatcatcatctacctcggcaagaacttgcccggcccactaactagaggcgcagctgggccaactattccctcggattgtgcggaccatttcggctgcccgtcttacactccacgctcccctcctcttcagaccaaaccctagctcgcaccgtataaatcggcgaacatccagcctcctctccccccgccgccgcagcagcaaggagctagagagacaaaggggagagagccccggggaagaagaagaagcagcagctagggcgccaagatgcaaatcttcgtgaagaccctgactgggaagaccatcaccctcgaggtggagagcagcgacaccatcgacaatgtcaaggctaagatccaggacaaggagggtacgcacccactacaccctcttcttcttgttgttcctcctccttcatctgtggctttgcggcggtagctcatgggggtttgtgtcggcaggaatcccgccggaccagcagcggctgatcttcgccgggaagcagctggaggacggacgcaccctggctgactacaacatccagaaggagtccaccctccacctcgtcctcaggctccgtggcggtatcatcgagccgtcgcttcaggcgcttgcccgcaagtacaaccaggacaagatgatctgccgcaagtaagctacaaacttctcaccaaatcatcttactttacttttatccagccatacaacatattcgttcctttcttgatgctatggatagtggtagcatgtttataagcaggctagctagccagcgcgtttctcctgtacttgtgccgtttatcttttgagtatatggaattgcgttcgtcaggaatggagccaaaacctagagacacatttttattcagccttggaataaaaaagataatatttttattgtttcgttacttatttgtggtgcactcttctagctttaaagataagtcacttcggtcaccattaagtggacctgaagctttcttttctgaagagatgcaagataaattatggggacctctggacatgcggcttcttccagtagattctcgcattttctcgtaggtccaacacttatataacattttatcccctactttcagctattttgtgagcatcagagtagcaaaaaacagttatttggctcgatgatgactactcttgctttaaccacaccgaatttgaagaccggaggaagtgtaaaatctcatttctttcattactctttgctcttccttctcggtgattccttatgaaatctcttccttttggtgaagaactactacggaatttattttcgtagtttttgtcctttatcaaaagattgcgattgaaggatgcagcgagatagtggagcatagtgtaaaaggaagtgggaagctatcttctgatggatcttcatgtgtggaaaactttggcctagactgagagccatcaatgtaaatgcccttagatttttgctgtggccatcagttctgggcacattgtcttcatagatactccggaagagtgtaagactctggaagatgcaccatgcacggccaaagaatttccatgttggcatgttctagacagctattatttggtttagtcttttgtgttattttttctgtgttttatgtgtcgagtgtgctacttttctacctggcagtagtgatgaatcaattagatgtgtgaagtgaccttatgaacttaacttttgaggcatacattctgtctgaactgccatatgtacttctcttcatagttgcaaattgcagtgcctatttgctttgttcattcttgttatttttggttattgattatcggtgtgtgaatttggttttctttatttgtttgtatggacagttggtccttttttaattggcaggaatgatgaatcaattagatgtacgaggttaccttatgagctaaaattttgaggcatacaattgtctgacttgccaatctactgttgtatttcagtgtttcgttacatgtctgtggtccatgttctcttattttcaattgcctatgtatgtgcatgcttttatttgacatgctatttgcaacttttcatgctgtacataactcccaaggggtcatgttttatatttctgtatgtatcttggactgtaaaaaaacaaattttaactttgaccgaccttgttatttatctacagatgctatgcgcgcctgcaccctagggctgtcaactgccgcaagaagaagtgtggtcacagcaaccaggtgagcttgatgattgatagtggggcttactattattttacagtagtcatgcaattcagtccatcttctggttaccctttaggaattgttatgatgattggatggaagtagggttttcatatgttctagatttgttatttgtgcctttaagcttgtaaataatggccatggcatttgctagcatgatttcaataacatataccataacatatcaacataccctttttattttggctgtttgatctaacgaaaatttctggtccttccactttcagctgaggcccaagaagaagatcaagaactagagcgtcactcgccgggttcatggactggttaaatcaatcgtcatattagacttttatgcttccgttgttatctccctggatgttgttgaaccgtgttttactgtgctggatgcttcagcttcttgttttgacggtcgtggtatatggtaattggcagcaaactatattggtcatgtcgaaattgtcgtgcgtttcaatattttctagtgttgttttcgatggcaagcggctctgctcccaggctcccaggtcccagctctctgctcgaccttatgtaaggtgtgcaactgtggcaagtcacacctcgtttgcaatgttaagagcatcaccaagatccatccacaaaatttagtttccgtgaatcccaaataaaatttaaggtgcaaaaaataactctcaataataaaatgtgggctactcttaagtcttaactaccacggaaacagaaattgctatgcacatctcttgctataaattgctatgcacatatctttcttcttgccgtaggaagaaaattgagaatgagagcgctttccgactttgtgaagagaatgcattctggtttagagttttttttaaaaaactttgtgaagagagtgctttctgatttatggagaacgagaaaggaggacaaaatgtaaatttttaagacatatttgaagggaatcgttagagcacgtttttcacataagaaatccaaattttaggattaggcttcacaaaggaatacgataggccatgctctaagcatcatccaaacaactcctacatatcgaagcttaaacacagaagaaaaccatctttatttatgttgaatcacaagaacaaaacatcaggccgtgcttacaacaattgtaacgtacacaccgacacactcagaaaaattaaacgagcaaattaaatggcacaaagtgaatgggcgatcaagcaacgaaatcaacatgggctttcaactatttgtcactcttacgaatggtgcttaacgatttaccactagacccatacgtcatagacacatgaggacccacatgttatagacagtgaggggtaaatcgttaattgtcatatcataagagtgacaaatagttaaattgatttacacgggacgtcgatggagaatcatgcatgaagctgaggcagtacgcttataacagagcgaccggcttcatcccctccttgatggccgcaaccaggtgctcgtaggcttcgccccacgcgtttttcatctcggggctccacatgctcgccggaatcccatctttgatcgtctcaagcagcgcgaacctcgccacctgcagtttaatttcgatgcaacaacaccatcagaacacggtcgagttttcacgtcgatcaaacgatccaagcaactcctactacatccgtcttatactcttatttcaagtacaactatcggtttctatatccaacgtttaaccgtccattttatttatttttttattagtttgtttgttattagatgataaattataaataatattttttacgtgatttattttttaaattttttaataaaatttttaaataagacgaacggtaaaatattggatataaaaacatttggctgtaattaaatgggacggagcactacgtatacatacctcgaagtgggtgtcggagacgccgttcttgaagtgcgtggagcccagcctcttgatggtggtgtccctcacggtgaccctcccggttttccgcagctgcgcagccgcctcacacgtctgcatgcgagatccatcgatcggttgatcgcggcaaatgcgcgcacaaaatctgtcagtgtcagctgcaaactctagtacaaaggtcggcgaaactgttttttgtttaccatgacgaagacggccatggcgtgtttcttgagattggggttcttctcgagcggcacatcggagtttcgcaggaacgagaacagatggcgagccgacggcgcgacctcgaagatcctggagtacagatagagtagcagcagcaatcgatcaacaaatgcacttgaaagttgcagaaaacggcagtgaaatgtactcatactacgtacttcaagaagaagcggtggccgatgttggcggaatcgtccttcatgatagcccacgacttgagcaccagcgcctcctgctcctcggtgaacctgaccgccccgttgcttgcgctcgcgaaagccatggccttcctgaatgaatcctgatctaccaagttcctgctttgatttcacaggtgatcgattcgatcgcagctagatcaacccgatcgagctcagtgcaactcaactgctggatcgatgctatgctatctgaatacaaactgcagcagtgcgaggccgatttatactggtcgatcggtccgggaatgggggcggccattggctgtcgatcgtgtcgacgagcgagacgcatggtggtggcactccacgtccactccagctgcacggaaggaagcagaaaaacgacctgaatatggcgaatatccgtccatgcaagccgtgaaaactgtgtgcccgagtgcagctgcgagagcgggaagctgcacgaaggcagcatgcctgcaactctgcattgtctcgcggttgcatgatggattgatgggggcggttttgggcgcgccgcgcgcggaaaccagcggcaggtttgagttaagaatccagtttatccaagtcaaaccatccatggtcccggcccttaatttctttcttgcctgaagactcgaactagaggcgagatggtttgttcgtgctgcccaaaagggcagtggtggatggaacgttccacaaaaatgggagaaggtgacgaccattttttggcctaacttaatacatattgttacaagaaaaaggtccactttatatccctcaattataggttgagttttattcatgtcgcttaaccgcaaaaccagatacggagcatttctcaagtatatgagatataccttatccataacattgataaattttgcgttaaaaaatctacttgttatttactatatatatacactaactgtacaatttaactttaacaaagatctcgtaggcagatgcggggtgctcgaccgcacaagggctcccaaaactaaaggctcttataggttttaattcaatcaaatattgtgttttaataggtttcaggacatccccattccatctttgtaagtttcacatcccctcctccagtgatctcgctggaacgagtatgtttttttttcttttgctttgataagtctttgagggtaattatagtcccctgaaatacacatagctcatgacaactatgtgatcacaccgttctagatattgaagattatttttttttatatttcgtaaataaaacataatcatttcataagggtgcaatgattttcctaagcttaaaaaaaccatcaccggtgaggttagtaagcttcctagcttggctgtccatgtgtttatactgtgttctcctatataaatccagccgttgttagtcgtgcgttgctcttttattgtttagagggagcacattagatgggagtgcattttcatccttgaggagatatccccttgttatctacatgtcacttaaatagttatgaaaaaaattgagaagatgtattaacatgtgatatatcactctacaaacatgcaagtttaaatgcaagttgtacatctcgcaacgaaaaaaacaaattaaactacaactagttaacatatattcacaatcaaatttgtttttttcgttatgaaatgtagaagttgaatttgaacttgcatgtttgtagagcgatatatcacatgttaatacatcttcttaaattttttcaatttttttcataatcatttgagtgacatgcatacaacgaggggatatcccctcgagggatgaaaatagtttttccacattggatttagggacaatacttctgatgtggatagaagatcaccagccacatcgtggctgtggtctgtggctgagcaaagcatagagataatgaatattacaatgaattgtaaattatgtggcattaagtgaaatagtctataacattagtttatttgtaacttcaatttacatgcacagtcaaaagtaaactctactattttacttgctgatatttttaaaatagagggtcttatcgtaggtttagcgccagggcctccaatttataggatgaccgggggaaagtgattttatccctcgagagaatatccccttgttttatacatatgccacctaaatagtcataaaaaatatgaaaaaaaatggcaacgtagattaatatgaaatatatcacttcacaaacatacatgtttaaactcaactactacaagttgtaacaaaagtaacaaatatagttacaaatgtgcaataactattttcagtttaatttgttattttttttgaaacttgtagaagttgaaatttggtcctgcatgtttatagagtgatatatttcatattaatctatatgtttttataattatttagatgatatttaaataacgagggaatgtctcttcgaaggatgaaaatccacatcctaatgatcgaaatgatataagtcggctgagatgtacttgccccaattgtcttctcttttctaaatgttacatatccaagcgcatgcatgacatgtggaacaaaaaaatgtctctttattaatattttgtcacgagtagaaaaacaacagtgcttgcatccaacgtacacacacggacactccattctcggcgaagaatatatatcagacgagcatatatataatggaaaaaaaaacataacaccaatcggcgagcaacgaacgatgtcgagatatatatggaggatcttgattcttgaaggcttgaaggtgcacacgtattacgcagcagccggcttcatcccctgcttgatggctgcaaccaggtggtcgtaagcttcgccccacgcgcccttcatcgcggggctccacatgctcgccggaaccgcctccttgatcgtctcaagcagcgcgaacttcgccacctgtttgttttacaaaaatcagaacacgatcgagttttcgcgtcgatcaaatgatcgatcgaagcggccattaattagctagagatacctcgaagtgggcgtcggagacgccgttcttgaagtgcgtggagcccagcctcttgatggtggtgtccctcacggtgaccctcccggttttccgcagctgcgcagccgcctcgcacgtctgcgacacacgcacacattctccgtcagtgattgcggcaaaatcttactcatcgacggcaataacgaactatatatggagtagttctaataccatgacgaagacggccatggcgtggatcttgagcttggggttcttctcgagcggcacgtcggagtttcgcaggaacgagaacagctggcgcgccgacggcgcgacctcgaagatcctggagtagtacagatatagattagaaccaatcatatgcagacacacacatcaacaaatgtacaagtgaaaatgtattgcttaatgcttgagaaacacatggttggtgcagtaactgattctgccaaaatggcagtaacatttttcttacttaaggaagaagcggtgcccaatgtgggcggagtcgttcttcatgatggcccacgacttgagcaccagcgcctcctgctcctcggtgaacctgactgctcccctcgacacgacgttgcttccgttcgcagccatggcttcctgacaaaattcctgcttcgatgtggttactctgcgtagcaagtgatcgagcaagggacactgctagatcaattcaagctcaactgaactcaaatgttggttgctgcctgaatccaaactagagcgtagtgaggctgatttatacaggtcgatcggtcccaggatggagctggatctgatggtcgtgacgagcaagagaagcatgcttggtggtggcactccactacagctctacgtactggccggaggtagtagcgaatatccatcaatcaaagccgtgaaactgtgtgcccgagagaggccgggaagctgcacgacggcatgcccgcaaggccgcaactctgctgtctgcatgtctcgctcgcgtctgcataataggggcggtttggcgcgccgcgcgcggaaacctgtggcgggtttgagtttagaaaccaagtcaaaatttgttcgtattcgtgccgcccaaaagaccagtagtggatggaacgttccacaaacatgggagaaagccacggcccttttgggccaaattagccagatgttccgatccaggtttggcagccgaagggctacgcacaaatgcctgggcattttacctctagaagattgtcaaaagttaaatctggatgcagcaatatcacgatcggataacaagggagctgttggagcagtgtgtgccgtactatatcaggtgaatttgtggcagccagtactatggtctgggaagggttctctgactcagccatttagagacacttgggtgcaatgaagggttagcaacttagcaatagctatggactgcaacatgtcaaaggtctatgtagtctcagactgccttgaggttattagaagcatctcagagaagccaagacaccaatatttagtagtccttaatgatattgaggcaataaagaagcattctgtgaaagtagaatttcgtcatgaaagtcagccttgtaattttgatgctgacaacttagtttgtaagtttgcttctactttataggaagggcgtcatctttggttttcaaatcctccctgtgatatgaataggaatgtaaacgtggatgataatgaataaactgtccgcttttactctaaagaaatgtccatgcttttctctttcaccacattgtgggcagtggcaatggaagtacagtgagacgatgatgcttcgctagagttgtggagatggagggtggtaggcggtaataacaatagaagaatcttggtaaggtagttaggtggtggggatggtagatctagtggtgggagttgctggagacggaggaggtggggtaggacaggggcacctcatcgaagtagttaggtggcaatggagagtggtgatggttttaaaggctctaacgccagaggcaatggaggaaggcagggtgcgggcacctctctgaactccgaagtgatttaattacaacacatatattttttttatattagaatagtactcactccgtcctataatataagggactttggctataattgtatatccaaaatgccttatattatgggacggaggtagtatcatttaaaattttgttatgaagatttaattataatgatataatcagattgttgatcgaataagtaatttaaaaggaaaaattatctaaaacttagctattagtatctttttcttactattgcatgtttggatactcctcacataggaaagagatgcatggtactttttatcatttattcatgcaaagatagagtcgtacaattgacattgcgcgactaagatttaggccctgtttgaataagtggaaaacaatatatagaaaatgaaatattgatgaagggtgtttgtaagacatgattttttattatatattaatcttattttcttagtactaaatccttttcatttaggctctactgacatgttattgaaatcttatccatccttttatctagtctacttgcttatcaagtttttgggaaccatgatatactttaaataaaagattaattcaaccttagctaatgcactagctctctcctttgttgtcacttccatgggaaaattgtcattagtcttcactacatcttttttcctttgaatgtaaaggaagattgaatcacagagaacatttccaaaggaattgttggctccattcctccattctaaagactttcaagggtagaaaaaaatactacagtttcaaattgctttgattttttcctttgaaaatccttcataccaaacacagtctaagaggagttagttctttgggcccttggttagaacaccgtaaaatctgtatacaatccagtttcatcttccccatgaagaaaagtccaatataactccctcaactatatatcgaatcttgttcgtatctcttaacttaaagccgggtatatcaactcccgttttgtgattgggaatacgaataaaattcgacctacaattgagggggtcaaattggaccttttcccaatccacagtggaaacacgccttggcccagtcttgaatgggctggatgggttgctctgcctgtctccctccgtgcgaagtctttctatttccctttttggcaaacgtccacaacgtcagaatttgacctgtcgcgagcgagtgccggtcaactcatccattgacggcacgccaaagttctccttttttttcgtttgttcaaaagcgcatgcaagcgtagaaaaccatctttatttatgtcttatcacgagaagaaaacagcaggagcgtgcaccaatcgtacaccacatacacactcctttttttgtgggacacgatgaatatgaaacgagcatttgaaagcaacaaaagctaatcggactcgcgaggcgaggatcatggaggtggagcagctagcatgcctgtcgatcactccgcgggcttcatctcctgcttgatggcagcgaccaggtggtcgtaggcttcgctccacgcgctcttcatcgccgggctccacatgtccgccggaacctcctccttgatcgtgtcaagcagcgcgaacttcaccacctgtttacacgatcgatcgatcgcatgtacgttgttcgacaaagacacgatcagaaaacgatcaagtttcatgtcgatcgaatggagcgcaggcagccattggggatcactgtacctcgaagtgggcgtctccgacgccgtacttgaggtgcgtggcgccgagcctcttgagggtggtgtctctcacggtgaccttcccggctttccgcagctgcgcggcggcctcgcatgtctgcaatatcgattgatcgcgacgcacgcacacattctgtcagtgtctactaccacaacaaatttacttgcctgaaataatgatggtagtattaccatgacgaagacggacatggcgtgggtcttgagcttggggttcttctcgagcggcacgtcggagttgcgcaggaacgagaacatctggctcgccgacggcgcgacctcgaagatcctacaacacaatcagacacacatgtatcagcgaaatgcattgctcaatttaatgcttcacaaacccaatctctgattccgcaaaaagagaaatggtagtaacacgcatgtacatacttcaagaagaagcggagggcaatattggcggaatccttcttcaagatcgcccatgacttgagcaccagcgcctcctgctcctcgctgaagctcaccgctacggcattgttatcctccacgagagccattgcttcctgacagctggttaatttcctgctttgatcaatttctctgtaacaaatgatcgagagctagctgggctctgaaaacaactgctggtttcgatctgaattcaaactgcgcaggtgaggccgatttatataggtcgatctgacccagggtttagcggcctttcgcgctcgcgacgagccaagaagcatggaagcgttggccatcgtgccgtggtggcagttgccgttccactcccaagtctacggcaagatgtacagggggcaaagaattgaagatgattcgagccaaaaaaccgtgtgctgaatgcagctgcgaaagcgggtagttgtgcgaggcagcgtctcggggctgtttagatacccaaaaattttacgccctatcacatagaacatttcaacacctacataaaatattaaacatacgctaaaaataactaattgtatagattgcaactataaatcttttaaacctgattgctccatgatttgacaatgtattgctacagtaaatatacgctaatgatagattaattaggcttaataaatccgtcttgcggtttactgacagatactgtagttagttttttatattagtgtctgaacaccctgcgataacctatataatatttgatgtgagatctaaacacccctcaataacgtgggcgcgtggaaaaccattggcgggtttaagaatccaagtcaaaaacgttccactttctttcttgtccaccaagacggaaatcgtcgtccgttcgtgccatccgagagaccaagcaggtagaacgttccacaaacatgggccaaaagccacggcctcttttcaggcccagataactaactttccaagtttgttgggccgggcccaaaatatcaactttacaaggctctgtacattgggccgtgaaactttacgtggaggataggtgggccgttggcgcgggtgggcccacgagctcccgcgcgagcaggtagcggaaggccgggttgtggggcctccactcgacgccgccgccgccgccgcgcgaccgcgccgcctgctgcgccgccggccggagcggctccgggaggcaggactccaccgcgcggaggaggtcgtgcgcaccgaggccggcgtccctcgagtacggctcgaggagcttcgggaggaggaggagcacccggcgcccgcgcccgcgccgccccccgcggacgccgacgttggcgcggacgaactcgtccctcgccgcctccagctgctggaggaggcgctccggccggtacaaccgcaccaccgggtcggagtggctccccgacgacagcgcgaagtgcaccagcggctccggcctgtcgacggcgaacccctgcaggtcttccttctccttggacttccatttcgggtacaggagtagtctcagccactgcacaaatcatatgcaattcaagatggcaaattttaccaatcactcaagcaggtcaaactgtgactaaattttcagggactttggaaggggaggttgtgagagacgctccagggtcttccggctagcttcttaaggtggtgagctaaccggttcgaagcctcactccttatatttatttgatattaggtcattccctaatattttcgtttttcttttttttttgatggggaggttgtaaaatgcaggaagtaggacaaacctgtgtaggagagtgcactcggcagcataggatatggtactctatcaactccgggtttactctctggccactgatgaggtaagataactgtggcacagaagttgttaccagattatgatttcatacggaatgagatactgctatatcattctatctaagaaaattgcagtttgaggatgttttccaccttagtaagcaatattctcttgctgttactttgcggaatcccgtattctatatgggcctaaaagaaattgtcaacattagactccacaattgaagaaatatagcaagacagaaatgtgggttaagaaactagttacatgcatcatcatggcattgtgcacattgatccagaaagcaattttttcttcatttttcattccgttgagatcagcactttctagcagctgtacaagagacctgcagaataacatcttttactagtctgcaaatagatttatgcatcatttccagcatgtcatgaacaatactcacttgtatttgtgtagcatgtctttaacatcagcagacctctgggcccccttgcaaagagcagacacctcaatcacagaatcatattgttgactgaagtatcttgattcgccagttcctaacgcatcgtcttgccaggcctcaatatagccctctttcctacatcttgggctccatatatccccagtgtatttggaagagagcccgctcgctgatgaaaatgatgagcatggtgaggggaagaagggatgttgcacggcattgaagtccctaatccttatgtatatcgaagcaatgcatttgatcatgtcctcagatattttgttcggtgtttgaggaacatgatctgctatcctggtccctaggatatccgccaggctcacaataccaggatccatgcacttgccctcctggtcatttcaattatgtcagtatcaacaccgttacaagtatatgacaaagatctgatagcaaagtggtttaacaggtcagaaatgaaagagagttttcagacatcgtcctgcacctcgacaaaggatagaggcaaagtatggcatggtttgagagccctagcaagattgtttgctgaaggagatactctggctgaacaaatggaacgctgcaggagcgaggaatggctgcgtccgataccagtcttgtcattgtaatgtgaagttctggtttcgctagtgagagttgtcggtgtagacttgcgtgccatgaccatgccactggactgcaggagttggtgtttccttggggttgagaaatccagttctgaagatcctgtgagtatacctgagaatgaccttgctgactgcttgttgatttccatgtcacaggaagaagacacgctgcaaatttgttgatcaaaggccttccggtagagtgctaggagatgttgctccaagcatatgacctctagctccagcacagcaatctcctttattagttcctcagtaggctgagacaacatgagaagaaagacacagaagctttcagtaagcaacgggaaaacacagccttcaaaaacatttgcgatacaattgaggaaaaaagtggaggaaaattttacctttggaatgcagctctcattggatgaatgaatggcacaaggcttataacctaatgctttctccaaagcacgccgcatagcaaattgatcatttagtcgcttctcaaggtgttggacctgcagagctaactctatgtatcaaaaccaatctgcagttctgcaattctgtagtatcactattaccttacaaattacagtagaaccatttgtttagtcttatgctacacttgggcaggacaaaataaaggataccctgtacttggcactactcaaaattgggatgtctctttaactctagcaatgcaggaatgaatgcctgttacggaactctgtactacgacttcccaactgaatcttaaaatttcacatcattaacacgctttaaagtagtccatgtatcacacaaatatgctacaacatcggaaactttgtgcaatacttgcgatgtctacttcttacctcttgtatcaaagagcatgggagctctgtagtccggggcagcctcttattggtgctattctgatccttcagttcttcggcattcttccgtgaacagaaaaatagaaagaaaagtgagatgttttgggttatggactgaaaaaaagagagattatattccaaagggacatagcaaatgcactagtcaagagttctgtactgatcttgggcagaagaaaatggttcagaaagttaaggggaaaaaggaggggaaattctgctgtgaaattttttaccagcaaaaatgacaccgacccacatgcttggagtcaagagaatgaacaaatgaagcaataagtaacaagccattttatctccaccaccaccaaattacctgtagatgctgaacattgcaccttggggaagacaaatccgtgccatccattctgagcattctaacagagtcgctgccgatgcaaattcgtcaagatcattaggcattagccaagaactgatcctatctaaaacatgtagaatcatagcatctggtcagagatcaatatctgtaacttggtaacaagaagtaaagctacaagctttattttcaacctgcaaccccaaccagggtgctgtaaccaaagctacaagcttctcacctcttggagcggctatgatacattgagcaggttaaggaaggagcctacaagtgaacaactccgctgcaagcctgcactgcacctctgagctcaagaagggctcctcctctctaatctttgcacaggtgagcccatcttagcgaagagttgaactctgtaaccactaaaactacactatcagttagagaactaaaaagagcaaatgatgcagggtagagactgcatggaatggggaagcatctcacctttgcagataaaatcatccaaaggaagtgggagcctgggagttgttgctgtggagttgatcacctaataaagtctttgagcctttgagctcttgacaccttttttcctctctctttttctcgtgtaaaagttgcttcttctaaaggcccctttctttctctgctaggaggatgagggtgatgaacttgatgaggtactacactactactacttgtactagcagtactgtccctactgctgaagctcttatatcagtatcatgccggatcgatcctgtccggctattcagatactttgtttatggtggaagatatatttatgtctgtcctaaaacttaccaacttcctttcttttttatgcaagatagaggtgagagctcaggaaaggcttcactctattccatccagatctggttgattccagttatttatgcccaaaaggaaaatttacttcacccaaagtggctgacatttttaccccagtaatatcagatcagaaggtgaatatataacctaatcttctgccacattataagcctgtcccacctgccacattagcttggaggacctctaaaactagtattcttcagatgtcaacacatgcctttttttttccattttcttacaaaagaaattgtttcaaaaagttgagtaactctcgtttctaaatacgaagaagtctacttttggtctctcaagtatgaccttggtttggttttagtgactcagctaacacttgaaattatccgtatttcattactccacccaacctaggtggttttcgatgacatgacgccatgtaggattaggcagagaaataggaaaagaaagtaaggttgatgttgtcactcctcatccatgtaggcaccgcgacatctttcagagctgctggatcaaaagtaaatggttttagttaagggatctaagattcaaagttggaccaaatacatacagttcagtgacaatgtagtacagatttttctccataaacgatggtaccgtttcactgttttcctgcaaatgttctgtgttccccccctacaatgatgagcagctcatatgcagataaaattgcagcagcagagaaggacagtatcatgcatgtcttttctttgacctgtgactggctctgctccggtaattgatggagctcgtcctatgcgtgtacaagaccacgccagtgaacaccacggacagcggcaagtgtgtgcggagaaggcatggagttacatgggagacccacacaagcagccaaggaaatgtgcagcccacacccagtgctgtctcggtgaatttgtcattttttttcgcctaggaagaggcgctcccttgccctcgtttgcactgccttcctgagtgaactccaaaagaaaatttttggcaggtcatgtgacacggtcacatatcttactgtctaccaccagtgcagcagcgcagtgcacgacagtgctagctagctgctgctgctgctactaccaagtactcgcgagtcacaagatcgtcacagccaccgtcctgcactgcggctatagttgctaccatcctgttcggatcaatcataatcattaaccagttaccgattgttaagcaacaatgtgaatcaattgctcttggcttgttaactgtgatgcattccagttactgtcaatgccacagtttttacacacagctgtgttgcctgtttgtttctgtgcgaaacatgacagaggaatcggcacgttagacaggcaacggcacacatggtttgattgtgccaattcatcccacaaagtgctttgttcgtggcaagtagcactgtgagcatacatgacaaacgctacatgaaaaatggtacatcggtttgtatcggtagatgcctcattgccccaaaggccaacactacacccctaatgtggcaccccatccaggtcccagacggagcgtagttgcttgtcacagaatctttgggtgacctaaaatcccagtgcagttgagctatggctttggcctcacttggcctgcgtccactgttctggaaacaggatgcagaagcagcaccacaacagcacatgtggtgcacgtatggatttgtaataaccttttcaatataaattatttaaaaaggatcctcttgaacttattttaacctaaactttttggtagctgtaaaattttacggcaagtttctcttgtaaactcggttgactctcttcttctacagtgaattacaataactttgcccttttcaaaggttcttttagagtgttcgttttaaaattttaataaaaaaggttttacaaaattgtatgtattgttaggccttgccttggaacttctttgtgtttgtgcgtgtgaatcatccatgctataaaaccgtcgtaaatgaaatagtaggaatccttacctgcttgtaagagtacaatgtgagtactgtaccatttgtatttatcacatctggactctggagtgaaggctaccggacaaccaaaattggcccttgtttattccattattatttgtgaacgtgtgagccatcgagtagacagctcctgcaacctagccacttgttaaggcatctctcatgcaatagaagagaggaggaggcaggtcaggagaaggcacgctcggtgttgtgctcttttccccggcccagctcacagatgcatgcataagtttacaatgattgttatctcgaccactatgatacaatgatgctgccaatgacgactagggaagccgtgcaggtaaatgatgacaaaagtgaaccttgagaaagcttaatttccatccctaatcaaatctcagtggggtgattagctgattaaagaaacatccggcgacagacatgctcgaggtttcatgtgctcttggaccctcctctaatttgatacaattccaatactatgtccatctactagaggtaaataattgttagtagaaagagcaggtgaggtgagatagcaataggaaactacatatactgtgattgcaattggcaatgctaccaatgaacataggaaaccagctccagttcatttgattatgcaagctagtagagtccgagatccagaaagattcttcccatcggttttccaagctgtcagagaaagatttaacttaaccaaaccacagcagtagcagagcaagtactactatgacggcaatggtgtcttattgacaaagtcaatgagctgcagagctagtaatattgctgggtagtagagtctagcaagtagcaagtgacctcttgagaagaatggaccaacacgagacaggagaggacaacatagagtgttctttcacgcacaagattcccataagtccagcgcgctgtacgagtgcatcgccgtcgattccgatgggtcaccgtatgcttgtcctttgcatgggttctagaaagaaaaggcaagctagatgccccgttttatcaacgcataatccaacgattgacttgagagtttatgtgattcttagctagtactccctccgtcccatattatatgggattagaggttaaaaacgtgtctcaaaatataagggattgggtaggtggagtactaatgcaaacagacatcgggcagggagagtactaatgcggacagagagctgtcggtggaatttgtccctaccttatcctctcaccgagtcgcccatcgaccaccgctcgttcccctcccgattttcttcgctttttctccgtcccctccatcagcgcctccctcccacccgcatcttcttctacctcctcccatccatccgagctccttcccttccacctcccatccgttgacgccaacgccggcggtgcggcagccaatggcggcggccaacctggcccatgcgccaccgccaccggtgcccaacctggcccgtgcggtgggggcaccaccggagaagcgaatcgaggtggtgtgggagcgggagaacacgctgctctcgttcggccgggccgccgcgcacgccgccgtcgccttcgtcaagttcaacgtccaggtatatatatacagcgcagccgagttcgatgtgcgtgcttccgtttccacgttgttggtagtacctgtgtttgttttggatcttgcattggatgtcagtttacgctttggattgtttgattttgacaccgcagcatcgcaatgcaagatttggaagctagcgtgggtatgacttggatgtagccattgattggtgtggtactggacatgaaatttgcagcaacgttctagccagtgaactatatgggacaagcctcacaagtaggagtatcaatttaatcgcatttaaccaggatctagatgccaccatgctaaattggtcaagaatgaagaatggagcgattttaggtggatgttttgcagggatgtagttatccattaggcaaagtgctaggatttgaagttgcagttcttatttagagctgaagaggttcttaatacattgccaactactcttagatcatacggagtactaggaaattaacggtgttaaaaaaactaaagtgtcaattttattaatcttagacgctgttaggcacatcatatcttagattcatgttagatttaaagtttatatgtttcattttgatagtttaaaattaaaaaatttatttaaaataggaatataatgatttaacatgtcgccggcagcggtttacgggctggcggcagaatgcggcccagcggcagggttcgcgggacgtggtggttgctaggcaaagagccgcgtccagtggcggaaggcgtttgttttgacgacttgatgtttgtccctgacttggatgatgaaggggctggcaatgagttcaactcacaaggttgtgatgacgaatttgtgcctgaaacacaacaagatgttccaatcgaggagattggcatagggttcctctcttatttatttaattattagtcctttccattcaattttgttaaattatgtgctttttgatgttccatttatttctccttacggtgcaaccatccagtgacaagcaaatcaggagggccgcgccagctcggagtgcgtcctcgcttggggtatgtgattcacactagattgtcgatttgggatggttatgcatttgtagcatgcaaattgagtcacatcttgatttatattgatttgtcttatcttctttacagtacaatgttgcacaattggcttcgggctatttcagagtatgagaagccaagcatcgacatggaaaccatcgagaaggcatgggctgatgagaaaaaggcaatcgctgatgtggactatgagggaaatccaaggaaggtgaacacaagctccgagaagaaggcatgcgtcgacgaggggaagtcaatctccgatgcagaaactgatgatgagggcgtcggtgtgcctgagaagaaggcatgcatcgccgagagaaagtcaatctccgacgcagagactgatgatgagggtgtcggtgtgcctcggaatttacatatgaaagatttgcacgatatcatgtttcctacctatacccaggtatgcaagcgtagaagaatttaggactaccaaactgttgaatgtgattttgttgtggtattttgttgtggaaatgcacaatggacgtaggagtacttagtgcaatatggatgtaggactaccatgtttataagtgtacaaattaccgtagtgttccatatggttgccagactagtacggagtattttgttatggaaatgccctagttatagtcatatactcctataatatattgttctaatgattgtagtattgttccaaagttagtgctgaaattaactatgcaatgacatgttctgaaatgggttcaattaagtattcattgttatgaaattagtgctgaattaaatatagaatcacatattgctgattgctaaaactagttatgctgaattacctatatataacaaaagtctgaaatcatatttacaaactccatcggagtacgaaaaacaaaagtatggctaggctggactagttgttcaacatggtctgcatcaccacatacttacaaactccatcggagtacaaaagacaaaagtatggctaggctgggctagtttaacaaggtgtgcattaccacatacttacaaactccatcggagtaaaaaaaaaacaaaagtatggccaggctggactagttcaacaaggtctgcataaccttgttgtaaagtgcaatatcacaagtcagactagtagggagcatgtcaagcctctccaatcgatccttgttcatatggggtatcttgtagccattgcctccatcggctttcatcacttctatgaagcaagcttgtaggtttaggaaaaccctactcaccaagttagaattatactcattgtactcttcgtccacattgctgattaattcatccatgttactacaatttttgaggtatgtcttcgattgaagagaagcaaagaaacccagatcaagcacattcatgtctggtgaattagggggctggttcatgatgcgtatgtctaggcctacttgggccaccgcgagggcaaatgcttcgtcgtttggcagaatatgtgtcagtgcattgtcttgctgaatccaaatggtcttccctacatcttctctaggccaacaagaggcaatagctggaataacctttgtaatcaagaaagccctacttgtttctctcgacaccataatagattttgtgaccaatgtacccttcggcctgttgcgactactcctttgtgctggttcctaacatatagagcaaagaacaagttagctacaaagtgacttgaaagcaataaaaacagattgaatcaagttgagacttcaccttcctaacaaagggccatattcctattttgccatcgaagtagcaatttccttcctcatcatacctaggctttgcaagagttgataaaaacataactttatctatggcatttttattttgcacacatctcacaggttcatcttcattgaatacaaggtagaaggtcttgtttttcatagtggcgttgaaccatttttcatcaatatgcacaatgttttgcatgtctataaatcttggttcagcattcaaagtagcagcatctagcatggatacacagaactcgagcctttgttttttattagcttccttcaagtaaggtttaatgctatttgagtgacggcgaagggctccttctttgactaacctatgcacctggcttttgctagcattcaatgcactagcaagagatctgatgctacaccttgagttcaaaggaagtgctaaaacctgatccaaatcaatgtcacttcttttttggccacaattaccaggcttctttgatttaaagtcaacttcaacacctgctgctaaacatttcttcgcctttgtccaaatgtcttgtacaactctccttgtcacatcaaacatagctgcaataatttctgtagtatctctatcagcaagtttcccattgatagtacttgcaagtaaagctccataaatagctttcttctcagcttctggtaaatatttccttctctttatattgtcttgttgagtatctgcacaaagaaaatatttatatatatgcatatcagttggcaatatattttatacttgcagtacactaatgaatgtcatttgcatgtcataccttcctcatcacttgatgtatggagatcttcatcaaagacaacatccatataaggagaataaacatcaaaatcctcctcgtctgcatggacagaaaaggtgagacatgagctactcatatgatatccccatctgcatcactgctgattacatatgagcaaaaaataatgtatgtacctgcataatttgattgatcttggagaacatagaattcgtcatcgtcaaatacaatatcatcttctccataatttgctgcatgacatgtgacgaagataaatttaaagttgaaggttgtacaaagaaactagctaatgaagtagtgcattcgcgcggctttaaccaccctgtcatgtgctttgtatgatgaaatatacagaaaagtgcattataaattaagtaaccattcttgaccacaaaagttttttttttgcattaggtcatctaccacaaaaaaaacacatgttcccatacctatatgggtcatcctgcagtggtgttatatataaagttcatactattcattttttgggttgttttagtagtttctgatattaaaaccagctttatgaaataaaactttaactatgctgattccaactatttagaacacatgatgtacgcttataaactttggaggttgttgggctaatggctggttatcataatgagcaaataaaattcatagagccatttatgatcatcatttttgcatagtaccacataagagtatatatatgactgatggctgaagtttacaactcctgactaaaagcaacaactgattgacactaatagcaaagctgcaaagctctgtgttatgcaaagaagtaatattgggcttgttagtttatgaatttggtcataaattttgatcatacaaactttgctactttcaacatttatgtttctgttatttcagcagaagggaggatgggaaatgtgaataagcccataacttgctttgcattaagattttgattccatacctggctccatgtttagatgacaaatttcttgtgcactccggccattggagagttcaactgcttgcatggcagggcctggatgttcatcttcatgagcaccaaaacattggttgtcaggaagctcttcatcttcatattggaaggcatcttctccttgcacagcaggaaccaggttaaggtcagggatcccatcaccttcatcttgcagcacttcttgcacaccaggatcaaggttgagatcaggaatctcatattcctcttcttccatggattagttgagggtctctcttggtgtaatgatggagtaggttgctaatatgagtgtaatatgagagctttggtttttagacctgtgagtgagagcaagggagtgaaaatggcgggctggttctgagcatcaagtttaaattttgaacagctaatgcatgtgtatttgtggcgctaatgtgtagtgcgtgtgaattttgggcagcaaagaggtgagtgggatttaattgactcttgtcaacatgtgcattaatgtcattgtgtactgaggaatgcttactctttctttgtgccaatcatttgctggcaagcttgtaaacccaaatattctcactgctagtgcccagtactaagtaaatgaggggtacatgcgtcttttgctaacctccttattttggatgaacagtgcccagtcccatataatgtgggacggagggagtacaagttgtgacaaataatccaaaggctctaggatgaaacaagagaagaaaaccagaaatcctgtcctgaacagggaccaagatttgcatcttgcacttcagcagatgggaatcggaattcagacattcccagaatcccagcaatgaatgcttggatatatgtcaaccaaaactgacctagagatcagctgccttctggccacaaaataggtttgacggataagatgagcccataagctcggccaagaatatgtcgcgactcaattagtttgtttctattaatttccaggtgctacgcatccgcaggcacttccaatatgcttcatacattaccttgcatgtttgcaaaaggacatttcaaaattttatcttccaaaatgccatcgtcttgcccgaggggtagatttagcattataagagctatgcaacgtgcacattgcacattgccaccaattcttgtcatgatttacaagagaataagtgaacgctaccctattgttggtattatagccccccgtttaaacttgccatgtcgacactctaacgcaacaaaaaagagcagagttttcctttatgtagctgaagaagcccgggtcagctgtacacttgcaacggaatgtgctgtaagttatttaagtttcatatcttgtctgccacttcagctggcacattgaggtcaaaaagggcagccccaccatgggcatcatttctttctcgcttgtgaggccgcccattgttattagaacttgagccaagttgccgctttccaaaaatagatgaacctacagggcatgttgaaatatgcatcagctatcagaaacatataaattgaagctgcaatagaaatgaaaggtgtcaatataagtaccagataaaccaggctgactcttgtgttcatcttgactgtatttaattggttgcaaaccttgttcagaagaatcccaacaaacattgagctctgaggccctgtcaaggcccttggatttgtatggagcaatattatgaggcgtacgcagtggatacaacaaatcattctcaatgcactgatacctgcaaggtaatatagttagaacagtaatttacagacactaccaaacttttgttgagctcttacatttgcttgcagagtctatcaaccacattggaaagattgatgacatgcttcattgtatccataacctcatcatcactaaaattttgaaaatccctctcaaggaaaccagatagtctttcaacgttgaattctaattgttgttgttggtcctcaaataggttttgctttagttctctttcatcagaagtcatctcatccttgaaaatctcatcaccaaacatgtagaatgcaaaaggataagaatatgaaagaacccgccttgacctgaaaagtctgtttaatccatttatcacccaagagtaatcttttatcttggaatccttgttttcagaaatggaaatcttcccctggatgtcgcccttaagctttgcttcctgcttaagagaatcagtgtgagctttgtatctgttgtggtagtgcatgtaccgataaaggtttctcctagcttgctctgtcttctttgactgatcttcagtgaatcgaccacaactgtggccactaatacttgaccatgtgtgatctctgccagtagcaccaccgcataaccagctacattcaaaagcatcaaatcagaataaatttaaactaaattttcagtgaaaatgaaatttctgtcaaaacacattcaccacatgatacttcaaaattgttgttttgggttttgacaatcatctaacaccatgtccttcactgatgcaagttgcaaacacgttaaaatagtttgaattttacaagctcttggtgtgatgacttgtgttactgaaggagaagaagctactagagagatgtcaatgtaacaccagttcaagtaatcaagtgagtgaactgcctaaataggttcaagcttatacaaaaacatcaaccatcccatataatcaaggttaaactgtttaagtcatagaatttcagaaactaccattagcctgtcaaccatatcatattgcaatactgaagaaagtatcatattgaataagctctctagttcaggaatgcattcaacttatcagctagccaggtggtggaacctgtgagttcattaatgaaaaaaatcatgttggatggtacactgaagcttactcaaagcaggaagtttaagaaaaaaaaggttgaaatgctttgagtttgtttgtatgaacaaatatatatctactagaaaaaggcatggatatatgctaatagtagtatatcattatctaccagcaaatgggaaccagtaaacatgcaaaaatgtagaagttgaagcagcataataaccattaccagaatgcttgcccacatatacatgcaaccagattgcagccaccgttcttctcaacaggtttgtggcacttgggacagggcttagtatttactgttatccaattcacggtctctgactcgtcacggcatttcttgatccagagctcccacatcacacaggaacatggtgaatgtgcttctgaggagcaattaaaacaaaactggcgtccacatgtacattccacctcacagtgaatatcacctttgacgcgtatagcatttccacaatgcggtgtgcttgggcaccacttgactgtatcattgtcctcaatataagattccaacaagaacctttcaaagcgctctgcaatatctggccgctttgcatttactagcttacgaactattgcttcgtcacagatagtattgcacttcagagccatgcacttgatacggcggctttgtccctcatttatcttcacaatgaaatatcctgtccagcctggaagggggcaggaatacacaaattagtagctagctacccaggaaataaatcatcatacagcaaaaggattaatccacaaaatgtcatatactcttctatggcaacacctataaactgaggtcaagacagttagtcgacatagaattaagataggtgcaaagactaaggataagttgaagcatgtgatagttttataagcataaatgactattcatacaattataaagtgataaggcaccatcctatcccagaaaataaagaacacaccattcccatagtttagtttcatgcatttagtagacaaaaggtgcttgctaaaagaagctgttatgtcacatcatttcctttgtagcatgagggtagtaagacgttagccaatacgacaacttccacatacctaacagattagtaactactagtggatgaatttcagactgttgtttagcattgaggtcaaaaggtggggcattgacccaatggctttgctacggaaagtgcatttgcatttacatgatcaatctaccagcatatccaagcaaataactagcacatacgcaaaggtgaaaacttcatagtatttccttttccccaaacggttgttgcttacattcattgcagtagttgtggccgcagtccatcttggaggcgtccgagaggggcacatcgtcatagcaaacattgcaggttacctccgttgaggagggcgagccgggattattagcaggttggagagggataccagcctccgagaagagcctgtccctccccttctgatcaagcagctcgaaaatcctttcgacatcccacctgtagtggatgagcagcgtccgcgcgtggtgctctctcaaccctagcaactccatcaccttcctaagatcctccctctgcaaaatcccaaacaaaccaaacaaaattttaccaaggcaaggaaagggaaaaggcttcaatctcaggaaaatcgcgtccaccccccggaaatcgaatgcgaagagatcctctctagtcgcggaatcacctgcgccgccaagagggattccttggtgatcacctgcaatcgaaggaacccatcaacaaccgaagcgattgggactcggacaacaaatacgacgaggataaaacgatggatagtgggggggcatacggaggtggaggaccaatggcaatcctcgtcgcgttcgtcctccagcacctggaggacggactcctccaaggcgtcgtcctcctgatcgctcaggtagcagtcatcgtcatcgtcctcctgctccaattccgacgaggacgccgtcggggagacctcctcggcgtcggtcaccatctaggggggggcgatcggatcagccccaaatcaaacccccaccggcgacgcagctcgcggcaaaccggggcttccccgggtcgggggaatcggcggcgcctgcgggaggggcaccgggaggggcaatcgcggcgcggggcggcgggcgattgggggcggcggcggcggcggagaagctcgcagtcgcggaaggggaagtgagggaggggaaacggaggggaggcggtggtggtgcggccggaaagagggactggtttgcggtgctttgctgaggaggaggggcgtaaatagaaaattgccgcgatgttgtgtgacctgctagattccgttggattttcgcttgcgtttttgcatcgtaaaagcactcttcacccttccgattccgatgtgctaaacatccgccatcacgaagtacgaacgaaaattggaacctctgtgcaaatgtgtgaagcattgagatacgactccctcacatttttttttctcgagtttgcgctgaatacacaagtgatgatggtaagcaattgtgtacaacatatttgtttaagctggactaacaacattttcttagagaagtagttgtgttatttccataccctatatctcattgaaattgggatgttggggcgagtggaggatgcaaaatcaaagatgtcgacggagatgacatgtggtatggtgttgagtgttgtagcggcatcagccatatatccatgactataccgtctctatgcaagggatctctccttcccttccaacatccacatcgatgatgttctctaccgacaacgccagatcttgcatgaccacattcttcttccctccaaccccaaggagtccttgttgccatcggaagcaacagtcatcccaaggaacaatctgtccctaccaaaccctagcagaagcaaaaatccacctccacaaccacagatttccattgtcattaataaactcttggtcacccaacctccaccctcctactaataggcccatcaaagccttctgcaaacagaatcaaccctcccccccaactaaaagcctgagaaatcctctcgccccaccaagaaaaacagaaaaacagggacaaggccaaggtcaagaagcatcgttgctccgagcacattgatcttgactgggagacgtgcaccaaaaccgaggttgccatcattcgacactagcaccgatagatagaatgttgtcaagctactcctctgtggaggcgatgtctagatgatcgacgacaagaaagtctcatgagattttgaatatgtgaattccaccaaggttaagaagagggccagattagtcacaaagatccgaagggacagagagaagtagaaggataacgggaaagaagcaacctcatcagcgagagtactcttcatgctctatagttcatcttcttattgcttaatctgccagaccttggatcatgaaaacccactcacctatttgcttttacttgtagaaagttcatttttatatagaaatgtagtatagcacgcctctagtgatattgagctcaaaaaaagaagaacgttggtgacaactcccttcatcatatgtagatggtagcaaaataaaaaggcaaagttgaggtttttaatcttttccttctagagaatggacatgagttaacatcactataaattataaattagagaacttacttcaaaactatagtataaatcccctagaatatggaacaatatgaaacaacgatgtatgtatggaccgacataaaagtagaggtcaagttcacatggtatacacaatgcactagccaaaagaacaatattataatcattggatacattttaactacagcgatttcacgtagaatgttggatattgaaatataatttgttgcttgtgtattcctagcattttctctaattatgtgtatgatgtatgtttattgcagtggaaacgttgatgctagtattagatatggggtgaaagaattagattgtaccattcaaactctgaaaaggtaaaaatgtgataattaatcaataactatgcttagatgataaatatattttctttaacataaactttgcagatctagattaattgagtaagaatcaaaaaacaaagatacaatgtattttcattgaaataccacaaatagagtactagaagagtggattaggataggattccctaacggtgactttagaatggattgaagccaataatcacatgttggcgatattgtcattgatctgaaattaaagcaatccgattcatcttatcttgtacatctatcatgttttggctaatgcccgctagatattcagactattgatatcttgcctttctagagttataagcattgtgtttgaaaatgacaacttgctaggtcatttaaaagttttttctgtagatgggtattgcatgattgatttaatttgtttgccctgtcatgtactaaaattcatatgggtagtttgcataattttagctgtcaccgttggcatttggaagaccgtttcccataagaattaataatggactgaatggtaaaggatgtctttgtgagctcatttcgaccatttttgtaggtaccttgatggagtatttctcatacaggatgaacaatatgatgcttgtcattcaattttgctttttttgttgatctatagggttgtgattgcaaatttacacgtgaaatgtagtttgaattaaaaataattcattcgtcgcgaataaatgagatgatgttttagggtccaattaatatatctaatttattacatagctaaacattattatatccttaaaaagaaggataagaaaagtggtctaaatatggttgaataaaatatctcctaataaatgctaagagccgacgttgagccattgttatacttagcaactatatttttctttcctctcatctctttcttccacgacactaaatttaaatttacttgcacggtaataaagagagtccactaataaagaacgttgtacatgttcttaggccttagctctctgctttagatttttgagggccaacttgatgtcaatatgggccatatatgttaaaaatgccctaccaagagaaagcgataaacattaagagaatagtgatccaataatatgttaggaaatatattgatagagccctttttttgaactttcagcgagtatttccctacgctctatgggccgggacgggtgagaagtgagaatgagcgtaataggatgggaatattattggagccatggagagtatttcctaccgtggtcatgacagagagaatttgagctgcatcgcactgcggtgggttgctgtcgtctggtggtctatactccatgaatgaagtactgtaaatcccatgatgaaggttctaggtgttagggcatgtacaacggtctttattagtagtctctctctattgccatgcaagtaaatttgatgacatggaagaaagagaaaggagtatggttgttagggcatgtacaatggtctttattagcggtctctcttcgttgtcatgcaagcatatttgatgacatggaagagagaggaagaaggaaagagaaagatggttgctacgcatgacaacggcatagagtcgactcttagcatttattaggaaatttttcgttgcatcgagtctaacaaaggaaagatgactagtaaaaaagtattttggtacattaatgattagagatcatattgttttaactattgtaatatggtagcctctaattgacgtagagaccataccggtctctacctttgtacttgcccttatgtaggacaacggctcagagtcgactcttagcatttattagagcaaatttttttgcatggtggtgaaaggaaggaaagaagagtaaaaaaatttatttgaatacattaatgattagagaccatattgtttctatctgttgtaggatgctaatatctagataacgtagagtttatatctgactatatatctttgtacatgcccttattccgctccggctgcaacatcattaccttccttacataatccatatttctttctgttgataacgatgcccttgtgttgttatctgacgggaaaacctccaatcagatggctgatggcggcagaccggttccgttgttccggctgcaaaacggccgctcatgaaagctccgttcacaagatacaagcaggccgacgccctcacaataattttctgatcaaatgatgcgtactattgtgaactaatctaatcaggcgtgatgcagacacagaaggaatggcatctgagccgcgaggagggactttcacgaccgaatcaaaagcagcagagccgcgacaacagacgcaccggcgtttgacccgaacaaaaaccccacgctgcacgttaactccactgaaaaaccgagctctctcactcctcacaactagtacgttcacaagcaccgtgacagccagctccaaatggaacacaagggtttgtgcatcctcgccgtcgtcatcgccttccagctcgccggcggggaggccgtcaccgatgccactgcccgggcacgtcgcttcgcctgtaacgtgtcggcgccgtgcgacacgttcgtcgtgtaccggacgcagtcgccggggttcctcgacctcggcaacatctcggacctgttcggcgtgagccgggcgctgatcgccagcgccaacaagctgaccaccgaggacggggtgctcctgccggggcagccgctgctcgtgccggtcaagtgcggctgcacgggcgcgcgctccttcgccaacgtcacgtaccccatccggcctcgcgacaccttcttcgggctcgccgtcaccgcgttcgagaacctcaccgacttcgtcctcgtcgaggagctcaacccggcggcggaggcgaccaggctggagccgtggcaggaggtcgtcgtgccgctcttctgccggtgcccgacgcgggaggagctcagcgccgggtcacggctcctcgtcacctacgtgtggcagcccggggacgacgtgtccgtggtgagcgcgctgatgaacgcctccgctgccaacatcgccgcgtcgaacggcgtcgcgggcaactccaccttcgcgacggggcagcccgtgctgatcccggtgtcgcagccgccgcgttttcctccgctgacctacggtgccatcgccgccgatcccggagcgggcaagcaccgccacggcatcatcgtggcgacgagcatcgcggggtctttcgtcgcgtgcgccgtgctgtgcacggcgatcttggcgtaccggaggtaccgcaagaaggcgccggtgccaaagcacgtcagcccgaagctttcttggaccaagagcctgaacagattcgacagcaatagctccattgctcgcatgatcaatggaggggacaagctgctcaccagcgtgtcgcagttcatcgacaaaccgatcatctttagagaggaggaaatcatggaagcgacgatgaacttggacgaacagtgcaagctcggcagctcgtattaccgcgcgaaccttgaaagggaggtgttcgcggtgaagccggcgaaaggcaacgttgccggggagctgaggatgatgcagatggtgaaccacgccaacctgaccaagctggccggcatatccatcggcgcggacggcgactacgccttcctcgtgtacgagttcgccgagaagggctcgcttgacaagtggctgtaccagaagccgccgtgctcgcagccgtcgtcgagctccgtggcaactctgtcgtgggaccagaggctgggcatcgcgctggacgtcgcgaacggcttgctctacctgcacgagcacacgcagccgagcatggtgcacggcgacgtccgtgcccggaacatcctcctcaccgcgggcttcagggcgaagctgtccaacttctccctggccaagccggccgccatggtcgacgcggcggcgacgagcagcgacgtgttcgcgttcgggctgctcctcctcgagctcctctccgggaggagggcggtggaggcgcgcgtcggggtggagatcggcatgctgcggacggagatccgcaccgtgctggacgccggcggggacaagagggcggcgaagctgaggaagtggatggacccgaccctcggcggtgagtacggcgtggacgcggcgctcagcttggccggcatggcgagggcgtgcaccgaggaggacgcggcgcggcggcccaagatggccgagatcgcgttcagcctctcggtgctcggacagccgctgtccgtctccgacgcgttcgagaggctatggcagcccagctcggaggacagcatcgggattgggaacgaggtggcagctagatagatcaaaacacagcaatgggtatgtataacactgttgggtagtgtttggttgcaaggtttgggatggaatgcgatgggacgaacccacttttaaataggtttggtttaggggtgagcgggatgggttggtccctaaatagaataactcttaaatccgggaccaaccgatccggcaaaatcgagcggacgaactcgtcccacctgagatgggcgcacggcatgagtcccgttgctactttgctcctcgcatcagtcacctggggatgctcgacgagagcacgtcgggctcgagcgacagcaggcggctcagtgacggcggcagtgaagtttggcggtagggagggcggcggcggtggatccgaaggccggggactcggcagcggcggcagatccggaggcaaagcacgactagccatagcacgcagaaataaaggagacccaataaggggctcaatcgcggaccagtaagacccatgaaccagctagaccaaaagacaatgcccttacatatatccctgtcacgaggacaattatgtaaaatcattagcacaccaaaatttaaaggttgtaaacctataaatagatctcaaataatgtgtaataggagatccaattttagagagaaactaatatactatttattattttcctttccacttaaaatgaagcttgactttggtacaagcgtttgtccttcgataacagtgtgtcatggcccatatatatatatctgggccttaaaaataaacttgcgtttgtacgaactcaaatgtgattcaatcctttgtccaagcatgcactttacattgctatcgacttttcatctgctacggaattgttgccaccaatccacctccacagctccactacctccactccaccgatcaatctgagccactacgcctatatttaggcgtgaatggcagaagttgggcacgcgacgtccggcgctgctcgtgccttcctccgaattctcaacaaactccgccatgttctctccagttcccacctaatatctgaggatatcaccaacgtccatataaacaagataatcaccgggcaaattactgttgctgctagttcaccatttgcgcatttcctcttctattacccgcattgttcaactgccatttctctcctcaattccaaaaaaaaaacacatattcattttttttctcattcgagctaaaccatttcaatccatggaattcggacgaactccagcccttcaaatcatcgttggtaagtctgagaaactttcaggttaactttaggctgttagcatacatcttctttattcttcaacaatgcgtgtctcaatgcaggggtcctatggtcgcagctgcagttcggcgctgaggcagtcggcacgacggtcttcacgctgcgcaacaactgcacctacaccgtctggccggccaccttgtccggcaacaccgcggtggccgtcgggggcggcgggttcgagctgtcgcccggcgccaacgtctcgttcccggccccggctggttggtccggccgcttgtgggcgcgcacggactgtgcaccctccggcaccgcgtccctcgcctgcgtcacgggggactgcggcggcgccgtgagctgctccctcggcggcgcgccgcctgtcaccctcgccgagttcacgctgggcggcaccgacgggaaggacttctacgacgtgagcctggtggacgggtacaacgtcggcatcggcgtggcggcgacgggcgccagggtgaaccgctcgacgtgcgggtacgccgggtgcgtcggcgacgtgaacgcgctgtgccccgcggagctgcaggtggcggggaaggagaacgaccagcagtccggggcggcggcgacgacgacggtggcgtgccggagcgcgtgcgaggcgttcgggacggcggagtactgctgcacgggggcgcacggcgggccggacagctgcgggccgacgaggtactcgcggctgttcaaggcggcgtgcccggcggcgtacagctacgcgtacgacgaccccaccagcacgttcacgtgcggcaccggcgcgcagtacgtcatcaccttctgccccgcgcagcagcagtgatgatcaccgcaacagacctcaggatttctgattaggccatccatctccggtgattcaagtccctctcttttttttctcttacctttgcttcgtagtagtagcctagtaggtcgtgaatgactgaatgcaaattgtatcctctgtttcgtttttagggatttgcactaaaaaatgggttgatcagcgctgatctctctattgtagtactgtgtagttgcatggagccattttttagttgcgaaaatcaagccaccatccccgtgacaaagcgggggtttagtgggggcatggaatcttgggcctcgtaggctgatggttcgccaaccaggccgaccgaccaagttacgcaatcacggcccagcctgttaaggaacagagtggctaggtagcgggtagcgaaggaataagttcaccggaggtccctcaacttaacagcgagattttctgagatcccttaaccaaaaaaccagaaatcttcacccctaaactatacaaaaccgtctaatttaggtcccaaggcaatggctggttttgatgacgtggcatcctagtcagcaaaaataataaaataaatatgtgggggcccacctgtcagtgagagaaaatgatgtgggccccacctctcttttttcttttctttttctcttctgttctcaacttctcagctctcacgcgacggcgggatcggcggctggtgcccatctctacccatctagagccgcggcgggcgagcgggcgagcggcgacctcgctgtcgccagccacgccgcctccacggtgccgtgcacctcctcagcgcgacaccggcggaggatgcggaggagcggcccacccgccgcccgccgcaggccgagcgcagggagtccgccaagctgcgcatcaaccgcgccctcaaccagagcggccctgtcggccgcgccttcggcagccggttcggcatcgttgcgatgctcttcaccaggaccgagagtttcattcgcgaccagtgcgacgtcgccgacgactgggtcaacaccgtcgccgcgggggccagcgccggggcgctctaccgcatcgcgtccggcccaaggtcgatgattgtcgccggcatcctcggcggagtcctgtccggcgccgccgtcgcggggaagccgatgcttcagagattcgcaccgaagctatccgccagattggactatttactttgagtaaaatttcaggttaattactactcagcgttgtgcgcgcctggagatgtttttattcgtagtatctagcaaatctgatctcaattaattcatagtttgtaactgttcatattaatggacaaacaaacaccaccgcccgccgcaggcccgcccgaggtggactggtccttgaggacgcgcttcacgacgcgtgacgccacgttggccgtgtcggccgcgccgcccctgccaccgtcgtcgcagccgagcgcctggagcacctgcctctgcgtcgcgccccgcgcgccgcccgcagccgagcaccagggagatgtggacgacgagggcggacacggccgtgttcccggtccccgcggcggcgaggacgcgccacgcgagcggtaggcagaaggcgcgctgtgccgcggccagctgctaccgccggcgccccttctcctgccgctcctctcccccaccgccacgtcgcgcgccgctactctccgccgtcgagctcgccatcatgccggccgtctctctctccctctcccactgccgccgccgccccagctctgccgccggccacctcacgcggagtctgccgctgcgcctgctcgagagaaagagagaagggaagagaaaaaaaaaaggaaagaaaggagagatgtggggtctacaccattttctctcacttacatgtgggccccacataattattatttttattttttgctgactaggatgccatgtcaacaaaatcgggtgcacatactgccatgggacttctttgcacggtttgagtaagtttaggggtgaagatttctggttttatggttgagggatgtaaaaaattctcgctgttaagttgagggacctccagtgaacttattccggtagcgaattagcgaccctgatcgtggcccgtcagggaacctgattacgggcccagcctatgaagaaattggatcgctatagtgcttgtgggccgtaaacacttcttagttacagaaatgctatttcctataccaatataccatcgggatgggatacattttgtcaacctttcccatccaaagaggaacgaggctgagcgcctgagccgtgaggaggaggtggccgtcggtgactccggcgcaggctggggaagaagacctgctcggcgagaggagggcgcggccgtcggcgacatggttgccggattgtcgcctagtgctcgagcaccgctgctcgccgtccacggcaccgccgttaacgcccaccttcggctccatccgcgtggccagccggtgcgccccaactccgtcgccggccatgtggccgttggcgacgtggtcgccggattgtcgcctggagctccagcaccgccgcccgccatccacggtgccgccattaacgcccatccccggctccatccgcgtggccggccggtgcgccctccgccggcgtcccaactccgtcgcgggccttcttcggtcgtcgccttcgtcgccggccgtcgatcccgctgctaagtccgggcctttattctatccatctgctgcttcgagagagcaaagagacaagatgtggtgcaaagagcttattgacttggtcatggctgactgttgagtgtggtagaatcatcttctacgtgataagaatcgcatgatacctgataggtatcatcttctacgtggtaaaaatcacctgatatctgataggtatcattttctaggttgtaagaatcgcatgatacttgttagtatcatctgatacctcacacgtatcacttgatacgttgtagaatcgcatgatacctggtaaggggtatcaggacatgatacatcacaagcatcacccaccacgtggtaaaaatcgcatatcatctgatacctcgtaagtatcatctgatatgtggtagaaacgcacctgtcctgatacctacccggtttcatctcgtttttgaacgtgataccggtatatagcagccctccttagttaacatgtagatttctgaagaaaatgtagcgcaaatcacacatgagtggaaacttaaactattgttgaatctaaaattgaacgcttgagatttatccgtgttatctggagaaaaaattttacttagtgattcaaccaatttttcagatttctgaccgaataaatggctgctggtacagctggacatcatggactcacccgagtcccggatcgtccacgtctcaaactacgtggagtacagtattactgtactactcctagctggcaactacgcacgcgctcgacgtcacacctaattagccacaccaaaaaaaaaaaaacaccctgctgctgctgctaatgaacgtgcgtgacgtgctgctgcctcaacacgatggcgtcgcgcgccgcgacgccgtaccgtgctcctcctcccacctgctccttcagcgcctcgtaccgggcgacgtcgaagctgcgcgcccgcatgaggcgtcgctgcctggacgcgaggcggctgcggtagaagccctcgaaggacggctccgtggaggtgcgcatgaagaaggcgtatccggacatgaagtagagcgacgtgacgtagaagcagacgggctccatgacgtcccacgagagctcccagaaggtgagccgcatgaaccccagcgtctgcgccgccaggaggcccagcccgcaccacagctcccgccgcacctgcgccgccgccgccgcgtcgatgcccgccttctcctcctccatcgcccgcagctcctcctcctcctcccgtttcttccgcacttcgacgacgcttgctgcagctcgcgtcgcgtgtgccgtcgccggtatcatgctcccgatcgctttcgctatctgcacgacaacggagacacgttagtgtgggacgtaatttgcaggtgttcgatcatggattgtgtgtttgtgtttcgtgagtgcgtaacgaaagacgtacgtaccatgtcggggcggaggaagacggcgtcgccgaggacgatgacgacgccggagtcgtcgagcgcgcgggcgagcctgcgtcctccctcggcgccgccggcaatgtcgacgcagagcgcggcgaattccgacccggacacgacgctctgggcgttggacctcagcctcgcccgcgcgacctccatctccgccgcacgcgccaccttcctcgcctcctccaccgtcacgcccaccccctcctcctccggtggccgcgtcacggccgtcgtaggcgggaccagcccgtcgaggcggagccggttgaacagctggtcgccgacggggagggcggggaagcaatgggcgggaagcggaacggacgccgtggtgtaccggatggttcccggtctgggccgcaggtacgcgagcgtcgggcagtcgtcaaccgccggcaacggccgccgcgccggaggttttggagccgcagccgccggacaagcggcggcggcgttcgcgttcttccccgcccatatgccgcgtgctagtgttcgtcggaacgccattttcttcgcctctccgagcaggcaaccaaaatattttgcagattttgtgttgtgtacgtactcgtgttacgtgacagagatgagagatggcggcaactgctggttggttggtttggagttggccgatgaatcgacacgattttgacgaggagtgaacggcagccgcgggtcggtatttatattgggctcaccggtgacgcggcggataggggtcgttagctccagcggcgcgccagaaattaaattaaattaattaaggggcgtgtaacacggcgcacgttattattaatctgacctcgacgcgacgatgcgtccaggcaaaactgtacgctggatttggagagaccttctcaacgattgactcgtcgtgggaaatgctacacgtacgtaccgactaatttggatgtcgatgacacgtacatgtttggagattttaccgggtccgtcggggccgtacaggaatgtggacgaggacgacctggttgaagcaacacgcccttgtgcaaaggaaaccaacgaactgaacatgtcaaggaaatcaactcgctacttagcttcgaattgattttaacccattttttttctcaaatatatataaacacatacactcgtgtacggatgtacggataagagcattcccagcagctcatctaaatttcatcctccatactcctatttggatggccatccaaaaagattcatattacatcctacatataccaacatcctatattttactaatatttttcaactaccacacatttttactcctatttttctcacctttcaccacttaaaaaataatcttgggaagtgggtggttgaggatggagtgaggagagagaacctccatatttggcttgggaagagctaagtttggaggacctcaaaaaatagagtatgtgatggagactctgttggagcactgtttttcttctccatacttcaaatatcggatggatgactagatagaggagctgctgggatgatctaagttgattttgtgatacttgatgatcgattaatcagtcagtatttcgatgctcgtcgaatgtagtcaaatgatcgattatgtagctttttcctgggcagaacttgtgccaaatgtgcgcagagcaagcggctgctgacctaaccgagataagaccacaaggtgttttccatgtctatccttgatgagaagcctggaagaggtgcatatgtccaagagtcgtgttctggagtactgaacatatatccccatgacctcatcgcttagctagttcacaagtcaaacaagttgttcgattggcgattgctaacggctgatcgagctgacagacattggataggcatggcaattttattatttaaccttcgaacagttatgctagcagatatatctatttagtactgtaatgcttactggtttagtacatgtgggcaaaaagaacaggaaaatatgaactacggttccttatcagatcacattgagcgcgtaggctgacgttgaaattttagccattttcatgttattgctattttcaacactaccaactttaatttcggcaatgccaatttcagtaaggtaacaaaattcaaacaagttttagtgtctgcttagattttagccaaaataaaccttaccaaattttggcaatttggcaatattgccaagttttgacagtatttcttatttatttactagagttggtaagaaattaaatggatgtatatatttgacaactttaccaaaaaaaaaggcattaatttgaacaagcccctagataataacctatcacatcctaccatgcaaaaatttagtaattttctagaatcttcttcacatagcttcatagaaaaatatctgggaagggaaataaactaaacaacaactacttagtgtcgacgggggatacccgtaaaccggatatatagggtattggggtccgttggcacgaggatctatgtaatacgacatcaaacaaacaaaagacaatgattatactggttcagaccccttagtaggtaatagccctaatcaagttgatatgggattatatgatggaaaccacggattacaaaaggaatagcagaactcgatgataccgacgataccgtagtcgagtaggtccaactagatctcccggcgacttggctcctatgcgctccggcttcgtaggctgtggtgggtgtgttggcggtgagattcgatgccttaggtcctgcccagggggtcccttttataccgcgggtcagttgatctccaagtaggactcggagatatcggacctctcacgatatggtaaagacccagtctttgtctgagcagaactctttccatccgtagataccatatctatcacgtgatagatttccttaatgtatacgggaactatctgtatacgcgcgggtataccgtattagtatacaacgtatatccaaggatagagggtataccttatccgtaaccctgacacttagcgttatcaaatcttaccactacttaatgttgccaaatcttagtattgccaaaaactttgtaggattgaaaatagtagtaaactaaacatgcccttcatatgtgcaacatactccccctcattataagaaaaatgttgttttaggtattaacatagtctttaagatacaaatttttattactactccatccgtttatattataagatgtctcgaccctttttctagttaaactttttaagtttgatcaattttatagaaaaatactaacatctataatatcaaataaatttagctaaatctagcactaaatatatattgataatatgtttgttttgtgctaaaaatatcgctatgtttttcctttaaacttggtcggtcaaacttctttaagtttgactagaaaaaaaatcaaagcgtgatatgatatgaaacatatatgaataatttatattgcaccttattttaaaatttgatgaactagcagtgttatgaaaaaaaaaacttttcaccaccaatctacatatatgattttttatatatccaaataaatatttaaaaggtactaatgttcaaagttccaaagattttactgcataacaatgtaattcatgaccagcattcaacaactgagggcttaagttcatttcagattatttaccggattattgaaactgattgtttgctccaagtttcaaaaatatacgttttctaaaaagaaaattctactttagacttaattttatttattaaaatatttaatttagtctcataagcaagtagataattcaaatcaacaataccaacaatatgttttaaattgaacctaagtctatgatgatagactcctacgactttcacaatttcctttttacttgagactttcacattttcgatgttcaaacaaaaggtaaaccatagcaaccttgaagttggcctaaactaccgtggcaaatttgccgatacacgctaggagggtattatatgtgtatgaggattttatgttttttttctcgattacatggaagatgcattcatacacaccactcttatgtacccgtgattgcattctctattgtacgctaaaaagacagattaacaacatctccttagttactaaaattctattctaagtacatcggcctgtacgtaatgttcactagaatttgaaccctaaaaggtggagtcacgctcacgcacccatgactcattgatcacacaactagtgcttctgtggattttatgtattctggttttgatattttccatttgtacctaaaagaatgtagttttatcattcaaaagacaaatcagtagatggaaagtaaatgacttagacattattaaatgaggagaggtgctttgtaagatggggagaaaattgaataggatggtttggaagcaaaatattaccttgtactaattgttttcttcaatgaaattttaatgttagaattgtattcttgtagtgacggaggagtatttgtaagttctactgatatataactcgtatatatatctcgtatgtggtacaactcccaatcatttcaaaatgtaattttgaagtttccatattgtgcgatacacaactaaattacattcttttttagcataacgaaaatgtgcacacacaattatacacgagaaatagattattggcacacacaacgaaaatgttttttcgagtcaagtatgaaaacaaaaaacaattataaaaatatgtagcttaattaactggttaggtttcttttgttaaaacttatccagtttaattaatttataggcacgatatgaatatttagatttgcaactaattattctttcactgatagacgacgtatgtatttcagaggtgttaatttataggagtaggttgtattgtatgcatattgatagaagtgagtgcgcgtcttttgtgagtgtctatgatttttactttttaaagaaccaaatagaaaacgatgaaggagtataagtcgagtgtgatctaagacatatcagttgacgatgaaaaaggttgtcataaaatacgtttaaaacaaaatgtccgattcgcagttaaccgacccctggtaccacagaatttgtgacccttcacattgccaaggctcaagaaataaaaggtgatctttcaaaaagaaataaaaggtggctaaaacaaatgtctgactcttcattcgaaactaaaaaatcgttgactagtagtagctctttgcaccggatctagcctaacagaatttgacccttcaaattagcaaggctcaccttaatcctcttgcgataatccatcatgaattcatgattacgaagcgcacctttgtattttaaatttcagaattgttacagcctcctctgcattgatcaggctgttgacaaatgtaaagctggagccatggcaagttgctgcagatgcgcgcgcacatcagaaaaatttgctaagaaaccacacactcctccagtggaagcataggcagccagcactgcgcgtctttgcctgatgcaaagttaggcagcacaaagcaagcaatgctgatgatcttgcggtggattcgccctccggagagatgacttcgcttccacaactcccggaacatatcccacccaaccgttacattagctgatactgattccactgacaagtgaagtgacaacatgcgggcagccaccaccaaattaaaactgttcgattgttcatcatccattcctggctgcttgcttgctagctgctgccgatccattgtcgtgtccttctcaaattcacaagttgtgtcattcgatcagaattgctcgtgtgacgcatgcgtatcccttcaaagacggctctcactgtccacaagattagatccttgttgcctaggcaggcaggcatgcgagcggtgaacatggattggggaggctagttgaatgaatccccagtctattggacgtttccatgcatgcgcaagaatcccaataattcggggaattttctcaccggccggaacggactccgtgtcacgctgcaattgcgccgaaaggctctttccagtttttctcgctgcatttcgtaggggcttagtataatcgattgcgaaggtggattccacgaagcgagctgaggtagctatagctagtgggatctttgattaatccacaggccactagcaaagcgatcgatcgatcgattgagcttgttgagcccttgctacgaacatatgcgacgagacacttgctcatatatgctttctgattcttctcctagctcttgaggatctattaggccgccaccaccgggatctgggacatgtgctgatgcttattccgatactacttcggaagtcgtcgcactggttgccgttctcccgttgcttggaaatcaactcactaaatggaaccttaaaatttgggacaagttgggggtagatatactgtggagggatcggaatacatggccttcatgttgatcagatgtgtttgcagccgtagcatgcagtagcatatatattccagattctgaaaccgaccgggaacttagcaatttagtactagcatgttattataacaagacgatcactgtgcatggcgtgtctggactgattcgtactgaaaaattgatagcacaaataacgtggatagaacatcatgaggaatacagatccatttttgttaggttgcatttcactaaccaatttagtaaaacatgctgcacaaatggttatttcgtctgtcccataaaaaaaataggatgtgacacatcctaatactataaatctgaacaaacatatcatgtattaggtttgtgtttttatgagacaggaaatattgctagcctactctatattgggcaaaactcccgacccagcgactccttccactgcctcgctcctgacccctcgtttcctctctccgctaccttgccgctgtcccaagcggctacaagaaaggcggggttgttccttagtagggacctagcttgcgccttgtgttgcgacggaggaggggggcatcgggtctaggattcctgcccccagatctggcggcataggagacgttggggaggggcgtagcggtggtggctaggcctacgcctggccaaacgggttggtgacgacaacgggtagcggtaaggcatcggtgggtgcattagaggacaacggcgggctaagcgtcgatggctagtccttggtagggagaaggtggatcaggcggaggtggtcccgtaggcagttgacactagggatggtggcggcctaggagttcgggctaaagactccttggtggcggcggcttgagcaccggtgcaaggttctcagtgaggggacggtggtacaggcagaggcagatctcgttggtagtggaggcctggaagtcctggcgtaagaggatatcctcggcgacggtgggctaggaatccgagaggcggaggagggtctgacgacgacggtggccctatgggcggcggaggcctaggaatccagcgaagcggaagcggatcatgttggcttgcgtttggtgatcagctaattctgactggacaatgacatatgaaggtggggctaaccggtggcacatggcgttagcttacttgaagcggatgaagatggcaccagcggaggttcgcagtgacgacacactaggggcggctgtgactagacgacttccacttgtcaaatctggccatttcaggagaggatgtcaggaagcaagtttgtgctaaggtagtagttttttttttctgttgttatgtgttctcctacttgttgaggtatgagtgtaagtactcttgtattattttggctgtgtatatcctttgtggaaatagagaccggattaacgaaaatccattaatcgagaagcggatggcgaggcctagcaaaaatcgagaagcggatcctaagaccagaaatttgcaagatttttgccttaaatttatgtcaaatattatttggcaattccgcatgttgacttaaacttgacctttcaacattgatagtatgatcttagttatacactagcaagttcacgtaaaagtttaggttgttacacaaaggaggcactatgcctatgctttaacactcccttttacccttctttagaaatgagccgggagcttttgccagttacagtcacagtggagaaaaggatacggtccatcttgacgagtaaatgagcggaaattgttttaaacactcaggtggacatccacctatttcttgcatgtcatctaaatggttatgaaaaattttcaaaaaaatgacatgataggataatatgtaatatatcatctcacaaacatgcaagtttaaattcgacttctacaagctgtaacaaaaataacaaatttgactgtgaatatacacatgctagttagagtttaatttgttatttttgttacagcttgtagatgtcgaatttaaaattgcatgtttgtgaaatgatatattacatattaacctatcttatatatatatttagaattttttcataatcatttaggtgacatgcaagaaacgggtggacatctacccgagagattagaatcaatctccgttaatgagctgattcatgatgttcgaaagctccttcctttccaaccaaagagtgctagaatttgatgggggcgtagaaatgagagatcattcacatctaacaacattcagcatcttttatgtttcacagtctgacgacatagcacactattttttttcttttgagaccactatcaatttgaattgggaatcgacctgttagcttagctcctaaagtctgaaatttgttttttctgacaaagaagccaaataattttagtgatgcttttgtggaatgcgttcagagactttggtcgggtggttagttaaatgttgatttaaccgatgcttagtgtgctgtaattatgagcttctactttacgtcttgtgatttttccccgttgtgctagatctgtcagaatgaaaggtacaggactgtaccagttgggcaactaacactggagtaataataaaaaggcatgcctcatcactggttcgtctagcgttagtttaaatttcaaaagaggtcgaagaaacagaatacaaatataaacaacacaattgcagttgagtggctctattcagaagctttgttaggttttgaaaaattctctaaagtttggtagcaacagcgtcaatacaaaaattcaagacggacggaatttgtctgctctgtccaaggaaaaataagtttttggcagtctgtattactgcacacaatgacacaaaccagcattctccaaggtgtttttatctcgtgaacaattgcatgatccaatcgagatagcaacactgaatctgaatcgaaacattctcggagaatctcgggtgaatgctcgatgaatcacccgtcagttgaatccaccatatctgcacatatcttgaaagcttcagtagatgcctcaactcggatatgtaattaactagtgtgacagtgtcccaggatcaccgtagctagttgcaacgaataatgtcagattcttgctggtcctggtctagtagtgctgctgctcaagtatggaatgatgcagagaaggcgacgctgatgcatctggaggaatacgagcgtggcatccggttctgggttctttgattcggcagcctgagaaaacaagtgcggtgtatgcagagctggccaaaaggaacaaactttggtggccacaccccagcatcccagattcacaggaatcctttgttccttccttgtcaagcagcactaatcgcctattactactctactaggatgctctgtttgccagattctggactttgatgatcgactcttttcttcattctgtttcagggaacccaactagtagacattcttccaccggctgccataagtgagtgcgttgtaattgaatagtctagatagatcgtttgctagctggcttatccgtaactagaatttaaattttaaaacttaattttaaagttgattttgagaatttatcatatatatatttcaatattgtcttttaaatttactcctacaacagactcttggactaacactcccactctcagaaccgaactcgcaaagggggtctatcgattccccattgcagaagctccgttctccgatacacgtaaacattacgtcattcaaaactggtcattatactattttgggactatttagggcctgttcactttgatgccaaaaaaaaccttaccaaattttggtatagttgccaaaattttggcaaattttgacatgatttcttatatagttacctaaatttggtagcaaactaaatgtagccactttttttggcaacgttaccaaaatttggtaaggttgaaaatgacatcaaagtgaacaggctcttacaccgatttaaaaagctgagaatgtgttgtacttagttttaccgtagaaaaaaaatccaaaacgaagaaggaattttttttcctatcttgcttgttttgctgggccgatattatcttcttctatcaatcatagacggaataagttcatctgaggtctcttaacttgtcaacgtcgtgtaaaatgtggggcccaccatttttaaattaattttttggtgtaaactgatatgtgggcccacaatttttaatattttccaattacattgccacataagcgccacgtcatgtgaagaccgagtcaaaatagccacgtaggcgttacgtcagtgaaaaccgctatccaaaccaccatgggacctatattgcaccggttttaaaagttgagggacccattgtatctgtttttcggttgaaggacgaaaatcggatttgttgacaagttaagggacctcaaacgaacttattccatcacagactccgtaccccgggagtcagagttggcccataactgacactggcccgtaggccgtagtagcttatcggttaacaatctcatgggctcagttttcaacagatcctaacatccccgtactatacgagtctacgacgatgactatgctgcaaagcaaaggaaaaggccagtaaaccatatctttcgctttcgtccgtataagcacgaagaaaatgccaccaaacacgcccctcgcgtttgacgagatttctgaagcaatgaaaccgtcacgcttcctagaaatcttcccgaaacgcacggcacgtcgaatccgtgatgaatcgctcgcaccctacccaacccaaccctccccgactcgccgctccacgccgcaggcccccgcgcgcgcagaggcgtaggcgagcgagcaaacgacacggcacgacagtacggcaccaaaccccaaccccaacaccggtcgcgctcgcgtcgcaccgccccggcagccaagagagagaagcccaggaaaggccaaggtgatcgacgagcgcacgcacgcacgcacgcggcgccgtcagaaggccagagcggggggagaggggaggaggggctaaatcggggagaggtctccgtcatctccgactcgcggcgcggccccctcgccgagaccgacgggccgacgcaaccgaggcgagccagcgatcgagcgggcggggggcaacgcgtacaaaaaaaccccctccccttcccttcccttccctctcggtcgcgtcgtcgcgtggtcggcgaatattcgagcggcaacggcataacaccattgtcgcccgggacgcgcgctctttctctctctctctctcttcctggcgatggcggcggcggcgggggaggaggtggaggcggcgcggtgggcggaggcggaggacgagaggaaggaggggctgcggcggcggcggaggtacgggcttgtggagtaccgggcgctgccgggctacatgcgggacaacgagtacatcctgcgccactaccgctgcgagtggccgctcccgcaggtgctcctctccgccttctccatccacaacgagaccctcaacgtctggacgtacgttccctcgttcctttctccgtctctcctccccccctctcgattgattgtgcggttgaatttcctgtcatgtgagaaggaggttaagttgttcattgcacgggtaatgcggtggaaaggagatgtgacatcgatttctttcatggatggatctgttatacggagcaaagaaattggtctatagatcgggcgttcgaaacatctcttgtctgcttgtggatgctatagctttatgtttcaggctggataaatcccatacaacatatttcttctggcattgggtatttgaagtctgaatcttgaaatattaggctgccctcaaaatatctagccattctgtagatttttgctcttgtgcttatttactaatttatttatttattttatttgaatattctcaatagtgcatagttttgtagttgtgtaaattagggaggccaaggcttacagtttctaaacagtctggtattcaatttacctacctttctctctactttaaagactaaactcaatttgctcatatggattctcatgttgcaagctgacattaatttgaaagaaacgggcaaggaacttcaacaactagaatgcaatagagggacgactcccagctggaaaagccttcgttttgtacttgactgttcatatcatgcaacaggtcacaggaccacctaacttattgaaagaagtcccctgtggatgatttaatgcgtttaattgtagtagttaatggaggacagtggtctagcagtatttcttttatcgggattgctatatgtcattcgaatgaaatttggggatgaaatcttacagattttggaccattggatccatgccaagattcgtgcaccaccttctctcctccaactccggcgggctccccttcttctccggcgccggcgacaccccaactccggcagggagcatacgggttagggtctggggttggggtgagggtaggaggggggttgggggagggggaagaggggggtttcctcggagcttagagggatggccgtgggcggtgtacttcggcgaggcggtggcggcgccgccgaagccgcagggatggaggagggtggtgggccggcatcggcggcgggggcaaagcaagcgtgtggttaggaggcggcgggcggtggttgcggatccggcggtagggagccgccggagacggggaagacggcggggcgggggcacctcgtcgtcgccgcctcgaggagaaagagaggagggaagggggagggggcctcgccggcgccgttgaccccttccggccagccggcgaggcgggcagcggcgcggtggggcgatggcggtggcagtggtgggggatcgcgcgaggacgaggagtggcggcagcgtgcgatctgaattgggggaagaggagaggagttagggttagagtggtctacacaaatcttgaagcatatccaatggtccaaaattcgaataataggaggtggcattttttgtcacatgatatatagacagccccttcttttattgtattcgttgcatatatatatcgagctcgaatggagatcaagcaatttgattggcatcatacaacgtttatttggttactgttatttaaaagttatgtgctcgtatggagatgtatgcattctggaaaattatgactgtggcaagtgcaactcctaggcgacatttttttatgtaaaaaagttatcaatgtgattaatgcaggaatacgtctgctaagttacttttcctgatatactaaagctgttttttaatttgtgaactcaggcacttgataggatttttcatctttcttgttcttaccatatacaccgcaacacaagttccaaatgtagtagatcttcaaagtctgcagcatttacctgatgtgctgagaaacgctgatcttcataagattcagacagaacttgtggcatgccttccttcgttacctcacctttctgacttgcaaaagctgaaggatgaattgaaaagctcatggaattcaattgaggtgcttccatcattgtcccgttggcacctcttggagttactatcaagttgcttgccgcacagatttactcattccaatgaaaccagtctgtctgttcttgtaagtagtcaacaacttccctagtttattactcacttattatgctactagtatgttatttcagatatcgcaaaattaatgataatatgctggcacaattttcaaccggaaattattactagggatggaatatcaattcgcaatcgtttggtttcttagtttatgctagttcgtactgatctgatttcatctgacttatgacaaagtttaggccatgaccatgaacaaaagttgagtttatgctagtttaagctgatgctgacgaaagatttggtttctataccatgaccagtaaaaaatataaaaaccaacagattcctaggcaggtcactgctttactggaaaatcaggatcattaagaagttgcaactttatgattttgagaaccctttgtttagtcagcactcattttattgaaggtgtctagttttacaaacactggcacacaattacacatacagagaacaattgtatggtatgactagattttatctagacatttttgtcttcagagatagcaaataacattttctcacatgtgattatttgattgaaattttggagtgaaggtcattaattcagtccccgtcatcttatatacccccgttttttttttgttttatgcagcaaagcatgaaggaagatatagcaaacatgattgcgccacagttgattaggccaattccgagatggccattttatgccttcttgggaggagcaatgttttgccttcttgccagcagcacatgccatcttctctcctgccactcccgtcgccttgcatacattatgcttcgccttgattatgcaggcattgctgctcttatcgcaacatcattctaccctccagtatactattctttcatgtgctatccattcttttgcaacctgtatctcagctgcataactattttaggagtggcaactattgctttctctttactccctgttttccagaaccctgagtttcggaccatacgagcatgcctcttctttggcatgggtgcatccggcgtgatccctgtcattcacaaattgatcctcttttggcaccaaccagaggcattgcacactaccgcatatgaggttctgatgggccttttctatggcattggggcactggtgtatgcaactcgggtgcccgagcgctggatgcctggaaaatttgacattgctggtcatagccaccagctttttcatgtgttagttgttgctggagcatacacacactatcattctggactggtatacctcaagtggagagacgtgcaaggctgctagaaattatctgtgtgctcgtaggatgtggatagattgtaggtgccctgcttgtgtcccgaaaaagaggaccgctgattctctctcgtcttcagaaacaaaagatgactgttgttgttggccaaaagactagacctggtctgttgtaaaatgtaacggaggacttgctagtactgtgagatacaaattgataatgagtgatgatcggtacctgtaaactgtggtgtggtattggctgatttttcagggtgcaactcacttgataaatcaggccctattattcccagaaaataactattcagtgataccacagcccctgctgtgcatcttgtgccgctatttatcagcttgctcaagttcaatgcatacataaattgtgtttacaataggagcttgggaagtgaaatgaatgttcaggtaatgtccctatcgaacgaccaccgaaaccatcatcattcatcaccaatcatgagatccactccccgatttgctacggttgtgggcagcaaaacgaaggaaaccaacggcctcaccggctcgcctcgcctgtgcggtcaccatcaccggctcaatctgccattctgccgcctccaattctccaagaacttaaggcctttggggctccacgttgaagtcggatgtgtttccttgcagctagtacgatgtattgctgctagtatctactcctagttcacaggccgtgctgctgattttctgatggactcacgaagtcgcacacgtacgagtgcacgttagagacgcccgtccaagggctatattgcttgatggactcatagctgtgggctgttcagatgagtaacccatttccacccatcgtgccaagatcatgtgccggcccgactgcgatggcgacacacaattgtcgattgcctaccacaaacagctagatcttgaagaagaagaaaacgacgagatttttttttggcatctcgactgcgcccgctaagccgtgacgttgatcgtgatgaaaacttgacatgtcgagacccagagacagctaaccactataattgctgtaggtggcccgtattctcgcctcgcaacaaacgcacccacacatggatctcctccggcgagtcgccgtggtagccgtgctcctgtcgctgccgtcgcgtggccgctccggcggcggcggcagcgatctgcacccggtcgtgctcgtgccggggtacgggtccaaccggctctacgcgcggctgactgcggcgtacgagccggcggcgcctcgctgcggcgcgcgagaggggaaggatgagtggttccagctgtggccgatcgacgcggcggcgagcgaacccgcccaggccccctgcctcgccgagaagatgagcctcgtctacgaccccgtcgccgacgactaccgcaacgtcgccggcgtcgtcaccagggtcccctccttcgcctccacccgcgccttggttgggtgagtatcactgtgtcacgctgtcactgtgtcagagtatgtcttacgtcgtactaacaatcgtacgcacgtgtatcaatgcccgtgcatcaccaggtagatactcctagatagatgggcagccaaaatttatcggaattgctagaaaacttgcgacagttttctccaaagaaaacagtcgaatttgcagcccttagatccgctccgtgattcatgcgggcaagaaggaagaaaacagctaaaaatattgtcatagacaggagtcgaaccaaggccctccccttaaaaaggacagcataacaaccactaagctagctcaagtatacgttgaatgtgaaattacattttggttacattttacttacgctttaattaactacacaattagtcccctgttttcatctaatttttggataatcttgttatatttcactctcttacgggcttgctagcaatgacgtcgctgttggatgcaaaggctaaaaaagtttgaatgtttggtacctagtttctgtcgaacgtcctatacgtattcacgtgttttaatctacttacatagcacttacactctagttacatagtagttacgtagcacttacatcctagttatatagtagttacatagcacttatatcccagttatatagtagttatatgatagttatagggtaattacattatataaaattaggatttacaatttttttaagatcatgcatattacttttgaattatttttcccttatatatgttgaacaaattcttaccgttgaatcaacctaggcataagattagtggtttgtacttgtgtggacccgtttcaacagatcctatggttgaaaaatttgaaagttttgagtctcaaaaactgtcaacaactcactagctacttccaaatttatttactatttatttattcttgtctgactggcaggtgggacccactggtgcggcagctggaggcgatgggccaccgcgacggcgggagcctcttcgccgcgccctacgacttccgctacgcggtggcgccgcggggccacccgtcggcggtgggcgagcgctacttcgctcgcctcacgcgcctcatcgagagggcgagccggctcaacggcgggcggcctgccgtcgtggtggcgcacagcttcggctgcgcgctcacgtaccagttcctgcgcgcccgcccgctcgcctggcgccaacgcttcgtcaagcacgccgtcctcctggccgccgcgctcggcggcttcgcggaggggatggacggcctcgcctccggcgccggctccggcctccccaacctcgcgccgccggcgagggccaggcttgcgcggagccagcagagcgcgctctggcgcctgccgacgccgatggtgttcggtgaccggccggtggtggtgaccaagaactcgacctactccgccaacaacatcaccgagttcctcgacgccatcggcttcacggaaggggtccagccgtacgtgacacgggtgctgccgatgtggcgggcgctcccggcgccgatggtgccggtgacaagcatgtacggggtcggtgtcaggacgccggagacgttcgtctacggcgaagctgggttcgaggggacaccggaggtggtgtacggcgacggcgacgggaacatgaacattgtgagcctgatggctgcggaggagtggtctggggtggaaggccaaatcttgaaggtggtcaggttgccaggtgttagtcacgttggcttcttcagcgatcttgctctcaagaaagtagttgctgaaatacagaaggcagttagcagcatagaggtacacaggaaagagaaaatcttctcttttctgaataattttgaatttacaattcctgtgccactaggatggtgatgtccatatgtcattactgatccgtgcaaataaataatagcaataattttggctgctgtaagtaggcaatttatgggtgactagaaatgatatgattttttttagataagttagtttggtacccctctaactatggttgattgtcggggtctttactgtaacagtgaaggatgttgatgaagccgaaagatgcacgctaaggctggggctctttgatctcggtattgcttgaagctgctgagaacttgcactccgaggtgggaatggaatgatgctggcttaccttgcgaaggattctgatcttagtgttacctatagtgtgactgtatttagtttctggtgttgctgcttagttgtctaggtaggctagttgcttaagaacctcctgtcttttgggtgacctatgtgcccatggtgcttaataggtaaagctggttttgcctaggtgggacttatgtttctgtgagaatgactaaagtttagtccctccttcccaaacactaccctagtatccatcttttttgctttctaaaaaaacagggctatgtaagagaactcttttaatcacttgaattaacatccacacgtttattacatattaattagttatgatttttaaaaaatatcaagataaattaatatgtaatatatcacttcacaaatatatacaggttcaaatttccaacttatacaagctataaaaataataaatttaactataaatgtatatatactacctagagtttaatttgttactttttataactagtcgtcagagtacggaactcctttaacaggaagctatgcgctccctaggtgagtttagctagggtgcaagtttcaagctcaagtcatgatcctgcgaagggaataaacacaagcatgtatacatattcggctcgtacggatacgtaataccctattcatgtatggtggacgatggatggtgaagaggattacaagtaagatatgaaagattctaagtgagaaggagaagatctttgctcgcacggtgtttggctagtctagaaatgtgaacccttttcacggtggtatggatcctccttttatacattaagtggagtccacaatactattgcacgcatgcaggagtgggtctcacttctctaaacttaatatacttactcttgttgttgtcacttcaagccagttggccagatgtgacgaccacagctactgattgacaaatggagtagaaaggcaaaagtctttgttccaacttccacgggtccacgtgttagcaacaatagtccacaacggtgcccccgaagggaggatgttgaggacacaccacgtcgtacgtctcgttctcttcgggacgatgtgcatgcaaggcactacatgcacagccacatctcctatatttgtggatgagctgtgcaccgagtttgtaccaccccataatcaatgtaatgtgatgatttaaaagtaaccacggtactaagtcaactctccttaatagggtaacccctctaaggagagcctagggcgtcctcaggaccctaattagcttgcttatttgtgtagtgatgtattatatattaatatatcatgtcattttagaaaaaaaaagatagaaatgtaggatatgtacatatactagttaaaatttaatttattatttttgttacaacttgtagaagtcgaattttaatttgcatatttataaagtgatatgttgcatattagtctattttatcaaaattttattattaatttattatcatttaatcgatatgtgataaacaagtggacatccattcaggtgattagagtccctcttcgggctataaacctttcctcttaaaaaaaggtaggatattttagtttgctaccgtatagaatctttgccaaaattctggcaagacaaggtggtctggtcagatactcagatagcaaaggccacaaagctccattggaagtgtggaaattttggtatggttcaaaacttcaaattgcatcgattcaaaccaaacgtgcctacgactctttgccacccaacgaagcttcaatagagtcaggacagacgggctaaaatagttgggctttctggcccaacatcagtcatagtcggcttcgtcagcctggatgacagccgaacacttctctttatcgaacggctccagttatctcgtcccctgacaaatccttgtttgggctctatagatgataggcactcttctaacatgggctgcccatgtgcacacgcccatgcgctacttggcacaagcctggaaatcatcacttcaacgaagcaacgaacacttgcccaacatgaaactgtcagatgtgcccgctttcgagtcgtctacccaaggaaatgtccctgtagcgcacgaacacgacaggtcgcgattttgcgagtgctcgtcgtatcgttcgtcctgtaacgatttcgcgacgagacggagcagcagctagccatctagcgaggaccaccattatcccgcgggccctttcgatgggcatctttcggccccattaccccgcgcagtgaagttgatggcgctaggccatccgggtccagccaatcggaggaggggagatgggcccggatgcctgtgtggttccaagtcctgtcgttggtttggctcttttccgccacttccacggtttcaaagcaactggatcttctgcagatcagtacagtggagttagctggaggcctggacctttgatttcttgagattttgctcaacataaatggcgcaggttatctgtcgtttctttttctgttatggccatgggtgtgagtatgctttaggtctatcattttcatcaaacctttgtgtccccgtcagtggtataagctatttagaaaagcttgagaaattcatgtgtttacttccggacattgtgtttttgactagtccatttaaagctatcttgatttgtagggaaaacatttgaatcttggaagatttcaatctatagaaaaaaaatcttatgaagtactttcaaatagagaattgaattgtatcctatctttagaaattactatgaaatcgacaacaaaaagttagcaagagcttaaacggattgaaaatttccatgtgagaatattccatttgttagttcttacggtctattcatacgatcattcttatatttttcgaagtttgttttgcaattgaatttctatcaaaattaaatattttttctattcctttatgttttcgatcctgcattttaaagagctttagttgatatttttttccaccgatcgattcggtagcacctgatggacatatattttctttccaaaatggtccagagcgggaatttcttgtagcgtatagccccaagaccgtgggatccataccagccaaacgagtcccctaccggcagggcaagggaagcaatcaaacggatccacgtccactccgtcagttcatctcttcaccaccacccacctctacgaccacgattactcctatcatcttcctctctctccctcttcccatccaatcctgttaacaagtgttagctgagaaaagaaaagaagcgaaagcgttgctgctgctagctacaaaaacccgaccagcactggtccttgagaaagcgaagtgcaacagatcgatcaaacgcttggtgaggtcacggtcaaagcgaggaggaggggagcgaggcacggaggaggcagcttgcaaaggtggttggcagcaccgagaaatgccctcctcgattgctgctgctgctgctgcgtgccgtccccccctcaccctcccctcccctccctctgccttccgctgtgctggcccatccgcccatggcacattggcatggctcgctcgctggctgcatcccccaccccaaaccttggaccacattgaccggtcagacaagaggcctcaaccccaccccgtccccgcgcggcacactgcacaccgccaccccccgtgcatgcgacgccacgcgctacggtttccgtctcctcgtgagccccagcgccgcacaccacacgccctgtcgcggtgtcgcccccgtcctcctccggattagtagcctacgtcgctgcctccggattattttgattactactactagtaatcagaccctgtttacatccctgataaaattttacacgctatcacattaaatatttaaataaatatatgaagtattaaatatagaaaaaaaaacaaattacacagattacgtgtaaattacgagacaaatcttttaaatctaactacgccattatttaaccatgtggtgctacaataaatactccatctgtactcataaagaaaatcatttaggacaatgtttaagtcaaaccttgggaatataaatcataaataactctcaatttattgagtttaaaaatataaaaaatatataaatagatttatcatgaaaaataatttgataaaagtatacatgcatcgcctggagcgtagcgtgatgatgatcgtagcagcagcgcgcggttaagttattgctgtttgggtcgcgcggatgccggtgcgggggctggctatctcggcgagggggaaagcgaccctgtctccctgatgccgcgctgatttgttttatggctgctcagacagctgctgttcttctcctttgtgcttgtggtactagagttgtactatactaccactaccaattggagtattttagccgggggggggggggggttagagcaagtttaatagtagagctcactacttactattagttaatgttaaagctaacatatatagtatgttggctataaggttatctttattttcttcatcctctctctctctcaccatgaatttaatgcatattttttagagtttgtgtgcagttagctcttgcatgagagccaacactctctactttttttatctctctcttccacataagcatatagcttgcttatagcccactattatcctttttatctctctctttcacataagcatatagcttgtttatccttactcttataagatgctcgctttctgcctctcagggacagaccggattaattagcagcgcgcgcatcgcacaggcttttgacagttttattatagtgctgctgcgtcgtcccagtgaccgtcagggcggttttggatgcacgtggacgctgacactaacctgaaagatgggttcaaggtgggtgcgtacccatgctagctcaatgccacttgaattcacaaatgtttcgcccgggtgaggccatgtactgtagtacgatggtttgattcaggtataggaaagctttgaaagaaatgatcgtaaaactaaaaataaaacctcgtaaaaacacatgcataaaaagacagaaaccaaatgccatactaattggattcctatgaaatttcataattcacaaaaaaatcaaaactattgttcgattggcacgcatgaaaatcacaagaaatcaatacacctgaacaagaaaacatgaggtgagatttcacttttattcttagacaaatttgcttctgctattccataggaattttacaagaattgctagaaatcgatcatttgtttcaaaggatttcatagagttatttttctcagaatacaaatcctctataaattatatggagtgaagtgcatgagcggttcttaaacttgtacggatgtatcatctatatccataaactttcaaaatgcatttttgggtctccaaacttgtcatgagtatcatatatgtccaaacaggccccaacctactccgtgaggtgacgtggcatccatggtgacgcttatatgtcagtgagatccacatgccagtcatatagaaaaaataaaatttaaaaagaggggggagagagagagagagaggagaaagcgatgtttttaattttgaaaaaataaattaaaaaagagagaagaaaaaatatgttcttattttttttctatatgtgttgacatatgggtcctactgatacgtaggcgctaacgtggcatgctacgttagcacatggagcaggttgaaatctgtttggacctatatgacacctgagacaagttgagggatccaaaaaattcattttgagagtttagggatctaggtgacacatccagacaaatttaggggccgcccgtggactttacttaattacatgttattcctttatttcaaaacccgaattttttattcataataattaataatgcagaaattaaatatataataaagcaaagtcattttttacgaaaatagaaaggacgctattgcatagggcgtccaggtgtggacgctgttgtagacaacgtccagatggggacgtttcttacaagggcgtccataatgctgcagttgaagaccccaaagagccgtccaattcaccggactagggcctgtttggttggtgccctgagtgatgagcctgagaaaaaagcatgcctgggtggaagaaaatttataaaatgttttccctgatcaggcatataagagggtttgttgtttggttggtaccctggacaagaaacgagcctgagagcatgaaaccatgtgaaagcaaacaagaaaatataaaatattgcattctcaaccggttagtacaagtaaacattctgaaatgacgccatgcaactagaatattccaacctcacctaatctaccttctttaattcggttgcctgagtcaggccacccaattcaagcgcctgagcctgagcaaccacgcctgtgtccagcaccttctcaggacttgaaccaaacagaccaatgaaaatgtcaggcaagcttcagctcaggcgaatttgcttcagggcagcaaccaaacagacccttataagattggactttggaaccaatcacacaatggtcgaactttgcctcgttactcctatgcagactattgtctctcgttgattgcttgcttgccgagcaggcaccgctctctacctgatctgtcagacagggtcgccatcccccggccctccttcaatgcttccgctgttccgcatgacggacactctactcggggtcatatgtgaacagccgccacttttattttgagatatttgattagtttggtttttgttctggtccattgtttactacgcatcgagctctctgctgactgaatcttgagaagcagtcgtcagatgaactgcatgcgaggtcttcgatcgatgcttttttttccttttgcaacaggccagagattggaagtcatcgggcgacagatgatctgatagaaggaggatgtttgcgtcctacccttcgtaattttgcattctttgtaaactttctattgcagaacatatacacttgaataccaagatctatgaactgagcatacttgctcggccagccatctggagtgaggcgatgcctggacttgctgttaggaaccaagaggggcggacagacgacgcaacacaagccggcacgagtgggttattgttccagcatgactcaaccagaacgtggatagcggctgcaacctcccggcgtgaaggcagaaagcggcggcgtcctctccggattcgagagccttcgaggtgagttgaggtaaacggcagattactgacgttgtggagacagaagccggaaggcggctgctgcagtctcccagagtcgaagtgaacggcgggcatggcagcaccttgcccgagccctgcaccaacattgggcccgaggagaggagagttgacgatggcgcctctccgcatggcggcatgggcaccccaaaccgagcctggacgtgcttcggtacagcgtccacctctggacacttcttagaacagcgtccaaatctggacgccctttgaaacaacgtccatcctatttttacaaattcaatttaagatttaccacttatttaattcaagacttattaattactataaataaaaaattcgaaaaccccaaattttttattcataataattaataatgcagaaattaaatataaaaaattcggtttcaaaacgacttctcatttctcaaatcatcaaattccctatgttttgtgtgtttcaagtcacctttgtctccacgccctgtaattccagtactctgctcaccattggttggtccttgcaagttgcaaccgcttcggagaaaaacagctggtttgcttactgaaaaatcaacggtggctggagcaacgtactgcgtaccagtactactactccaccaatatactcggatactttctccataagtcagagatatatttcttttatcaccaagaaatatactccctccatactcgtaaaggaagtcgtttaggacagtgacacggtctccaaaacacaactttgacttttatttctataaaaaaatatttattgaaaagtgatatatatatatacttttataaaagtatttttcaagacaaatctatacatataatttttacattttcaaactcaacaacttgatagttatttatgatttatattcccaaggtttgacttaaacaatgttctaaacgacttcatttataagtatggagggagtactttattcgtctcatattaagttaatttttagctcctttagtttatcccaaaataagtttatttttaagaacaatcattgtattgtagcttgtaaaagtaaggactagttgtaatgggataagataatgcaaggaataattgtattggatttgataaaatataggcattttactattgttggttttatattggtatgtgtggaatgagtgaaaaaaatatttcgggatggatgtagtatattaatatatgcaaccaataaatattaaaatgatttcttgggttctttaaccgtttaatttagtacatcaagattacaaataggtattaaacttttaggaaaaaccaaaaaataaaatggatcttagacttttggatgaatgtctgagtactactcatatatattttatttaatgtgagtatgtattaggaaaaatcaagaaaatgcactttaactctccatatgcacaagaaacgagagtttaacaatctctaaatacttgcatgcatgcatacttaatttgtatataaagatgtaataatactacatgtgaaacaagaaacaaaggatatatgatgattagtttcgaatttctaatttttgatatgatgatcagtatggagggagtactaacgttactttgtcacgtcaggaccgtgcatgcatggtgcccatgccagcaggcgaccggttgccctgtttacctgtagtcgggcaaaacggaaggcgctcctccctgcgctcgcacgttgggtcagtcagtccgctcgtcagtcccttccgacttccgtccacccatccgtcagcccacgccacgcgcatgcgctgtcgtgcgtgctccgtcctccccccctcccgtccccgtacgtcgctgctaccgtcgtccccgccttttccaggcctcgctgcagccaccccggcgccgtttcctagccagcggcgtcgcatgcctacgccactccagggcgcaggcaaagccagcggccggtaggcggctgtgcgaagaggaagacgacgcgtctccatccgtccatcgaccgacccacccccggctcgctccggatagacttgtcgtcgttgttattcctgccccgtgtttaatgcccccgatcgatcgcttcgattcgccctttgacccgggtaatctgcagggtacgtacgcacggggtacgtactttgcatcgcatcgcatcgtgtggcagctgggcgttgagatcgtggcgttttaatttttctgtactagtactagtaggcgtcgtatggagccgctgtgcacagcgtgtggccggtcaaggagctcgctctggacatgtccggttaggctttactgtttcgcgtactgttacagacttttcccctttgtgttttcctctttctccttttgtttttcctcccttcgttatctctttcttttgcttgagagaagaaatctgtcctctcgtggtctttggtcttggtcattaagacgtccttccgcaagaaagaggggctccaacctggcatcaatgcacgtgtgatgttttgccaacctttttctctccccctatccgattgtaacatcttttccttctttcctagcatgtgtgtagatcggcttccccaaagactttaaaattcaaatcaacatcgtttcctataataaccctagtacacctgataactctcgaagagtgtttgataaactagggaattgtaatggaagacactaaaagtatagttaaatttgattaaattatattttcattgacacagttttcttttataccaaatatatttttaaaataaaattggatttcatatataattttgagctactgtttctctatataaaattgcactttttttcagtaaaaaaattgtattgtaggagtatataaatatattcaccaatttacaccattttgatttggacccaacataatctaatggtctaaatatttttctttttctctcattagtgtaggaatttctgacatctagagtaaaaaacatgtgcaattttttagctctattaataatataagtatgagattatcaagtgtgaattgaacggtgctacaataaaaagctagaattatattcaatacacaacacttgttttattttcatagatactattatattgtatttttgaccaatgtattttaaaataaaattttatttaatgtacaaaatttagcttctgttttcatagatacaactactatatcatcgaatcaacgttgttacgttctgaaccacgatcttatcgtctaaattgttttgttacctgtggttttgttttcagggctctaaagcaaacgttgtggtttacttttttttatatattttgaaaaaaagttcttttaacttttttagtaaggtgcagattgatattccctctgtttaaaaatatatatttaattttcacttatcccatacactcaataaaaaaacagaatacccactttaatcaaatctgaatgcatttactcattaattttacaaactccaataaaacaatcaattaaaaataaacagattttgagacaaattaaatactcccagatactcacaaattaaatcaattcctaagggcacccgcaatggttatcgataggctctctacaaaagatctatgtcagcatattttcctacttggaaaatattaaatagagagagaataaagctatctactaactcggagatagtctatagagaaaaatgaaacaatggattagagagctatagatacccatgtaaacatactattgaagtggtttactattaatctagtctattgctgagatgtacatgttctatagatagcaccttactttactattacgggtgctctaggttcccatactcgctgtagaccaaagagaacatgatgagtggagtatactgtgaaaactgataacaactgtgctgccagtctgctactcgtactgaagtttagcatgactgctccagtgattcccatggatttgattaggagcggcgattggctagggtttgaaactttgaaaactgatctgcggcgatcaatgcgcggtcagagctgccctcgggagagcggaacggtcaaacgggggccgggggcaccacctccggtagcgtaacgtgagggtcgcgtgccacgaggagaggctgtttgcttcggtgatggatggtgatctcaccgcacgtgcggtccgcgtgccgagaccaatagtacagtgcacacatcacggcatcacgctcgcttccgtctgcgctccctgcactgctcccattttcccagaggtaatatagatttaaaaataaaagcagtgtagtgtgagtttaataaaagtaaaatatggaggcggcaccatttgtaatgggaatgaaaatcacatcaagcctagctaacgcaccattccctgctatagattctactccatcttttgttgttgttgttgcgctttggcataaaccaatttcctcgtagtggagtagcagcagtgaaaaagaaaaaaaaatcaaaaatcaaaataatataatgccagtctgcatgagcagaaattactccataaaaaactggggagaaaggaccagctatgggcccacctcacaggcagcttgtcagtgagtgtggcaatgtctggtccccactcttctaatccaatcccctcactagtcctccctcctcggtcatcagtcatcccaacccaaaccaccaaaatgaaaagaaaacccaaataattccatcaggatattcttgctcacacatacacacaccctctcacaaggtcacagactcatcgcccttgcagccttcctctctctcctctccacccactctagcttggcttggaccagatctcacattttttgttcagtttctctccacgccaccactccctcctccctcttcctcttccccttcctcctcacctcccattccctcagatcttcccccatatctctctgtctcgccgcagtccgcctcccaatctgaggagcttttcttcagctcaagcttcttgctcgcttgctctctactatctctccttttgactcgtggccaagctgcagaggaaacccaaaattccaagaaaagcaacaggtcaagaaagagggaaagctaaggtgagaggagatgggaggaaggaaggaaagaaagatggtgatgatggcgataagtcgccccatgattcgcgccatcattccgtctcgcccgaggccagtgcgctggtaaaagggcctcgccgtccgtccgtccggccggccgtgcggcgcgcgtggaggaggtggtggtgggtgcggaggtgcgtgcgtgagaggggcgtcttgccacaatgccgcagtaccaggagcttccctgcggcgggcaggtgctcgacatcgacaccgcgctcaaggacggcatccttgggggtggcccggagctcggggacgcggcggccggggacggagggaagcagccggtggagctgaggaagatgatggacgagctggacgcggcgggggacggcggcggggacgaggcggtgccggcggtgttcatctgcccgatctcgctcgagcccatggtggatccggtgacgctgtgcaccgggcagacgtacgagagcgccaacatctcgcggtggctcgccctcggccaccggacgtgccccaccacgatgcaggagctctgggacgtcacgcccatccccaacaccacgctccggcagctcatcgccgcctggttctcccgccgctacacccgcttcaagaagcgctccgccgacttccacggccgggccgccgagctcgtccacgcgctccgcggcacggccgtcccgaagaggcagcccctcaagggtcaggccagggtagccgcgctccgggagctgcggtccctcgccgccgcccaccagtccgtgaccaaggccatcgccgaggccggcggcgtcgggctgttgacctccctcctcggccccttcacgtcacacgccgtggggtccgaggcggtcgccattcttgtgagcggcgtgccgctcgacgccgacgccaaggccgcattgatgcagccggcgaaggtgtcgctcttggtggacatgctcaatgagggtgcggtggacaccaagatcaactgcgtccgcctcatccgcatactcatggaggagaaaggcttccggccggacacagtagccagcctgagcctgctagttggagtcatgcgcctcgttcgagacaagcggcatccggacggcgtcgctgcggggcttgagctgctcaattcgatatgcgcagtgcacaagcctgcaagaagtttgattgttagcatcggtgcggttccgcaactagtagaattgctgccagagctgccaacggagtgtgtagagccagccttggatatcttggatgcgcttgccgcagtcccggagggtcggatagcgctgaaggattgccccaggacgataaccaatgctgtgagattgttgatgagggtttcagaagcatgcacacggcgagctttgtcaatgctgtgggtggtgtgtaggatggcgcctgaagaatgcgcgccggctgctctagatgccgggcttggggccaagcttctcttggtcatacagagtgggtgcggaccagagctgaaacagcaagcgtccgaactgctcaagctgtgcaccatgaattgcacatcgacggtattcatctccaagtgcaagcttacgaagacaatccagtgagtggagtttggaattgtgctgttccgcttgtgatttggtcgatggtgaatggttcacctgttgggtctcacataatctgaagaaatggcagcaattagcaattggcagtcgacagcgtctatgtatagataaactttgcagttatgcagaatttgccatgtcatctgatggcataagggtggatgatatgagtagattgtgagacctgtggccatgttatcactgtccagcgagatgatgcgtatcgcagcattcaaaatgcagcatacacacagctaattcagtggcaagcaggtgggatgtacatgcaaattgatgaggattttggtcagctcaataagcactcgaggctgggaggtggtaagtacagccagttttgccattggtagtagaaaaattaagcaagaaacctgctgttttagattttcggcaatgtgggtctttcagggctgtagatgttcttcctttttctcatcttcggtgtaattgatggtataaactgggtagaattgtatacagtactgttgcttcataattgaaatacacattgccataggccatatcttggaaaaaattggaactctttgctgcatctttcattgctttgatcatccagtaaatttttcaaggataacctttgtcctgtagcatatactgaaaagcttcaggcggcgttcctggtgctgaaattgaaacagtagaaagacgaagtccagtgtcagcttgtgctggtgccacaagtactactgtaattaacaagtatagtatcagatggcccagtttgaatctagagagcataatcagtcaagcaattgtagtcttcttgtagatttagccgcacactatccttaaaaagggagaaaacagataatttggtttaagttcttttctgatgattcagcaaatagtcgagaattgccagtcaaggttgacaacaacaccaaacattcattttcctggattgcatctactagtactctcactggaaaagcgggtctttgtatatttcacatcagggggctgtcttatctaatctcagggaaaaaaaaccttggtcatcagcaaggacagataaagccatggcaacgcctagcatagggtcactcatctatgatcaggagtaggctatgctcagtactttttccctttatacgttgccaatcgtaaagcagatgatgggtgctggtgccgcacaattgacctgtggaatggaagcaggatgaggaagtgagcgcaccatgcatgccatgcctcgtcagtctcctgcttttgccatgatccgcgacgtgacgtaccgccctccatgcaccgcgccggcgcgcgcacgcacaaacgccacaaacccacccgtcgtccgtccccatttccacacgccattctccggtctcgcctcgcgagaaaaaggtggactcgcgggccagcccaaaccatgtggcgtgggcacccccacctctcctctcctcgcctccgcgcagtcgaacgcgaggtgaggtgatcgcctgcccaaaggctggatcgggagcgagcaggaccacgggcatgcgcgcctgcctcctcccgttgatggatggacgacgactactcactgattgggtggcgctactgtgccgagcacaactcgtacacgggagcgccaggattgtggtagtgctggtgcctgtgtacgcgtactctactcggacggacactggagtgagtgatcgagtcagctgctgctgctgctgcatgcatatgtgtgcgcgtacattttgcctgggggcagaggtcgccgggaacgaacgctgcaatctattcacaggacgtggcatgcattcgccacgacgcgagaggggggcccatggtcgatcggctgtacagtacgctgcactgcggtgctgcagccccgtcactaacggctgatcgatcgatgctagtagtagctccatgtgcaatgaatgctggtgaggtgttatctgaaggaaaattttctgccggcttggcccggcttgttcgctcgctcgctcactcggagctgaaggaaagaacacatggacgcagagggaagatgttggttttgaaatttccggcatcgtcgtcagttccccctgccccgccatctccgttcgccggtagagatcacatgagctcctacccccgaaccagataacctcgttgtgagcttgtcgattatttttagacagacaggcttcgaactttcaactttcaagcgcaagctgccgctaggatggagggtgcaccgtgcacgtcattgtcagcttgaacctcatcagggattttgtctgatactcttaaaagtagagcgtacgtgcgtatggtcatggtcacgtcaagagaggagtatagaggagacggatccctcgtgccatcgaccagagaccgatcaagccatcgaccgatcgatcagagggaaaacctgataagcgcgtgggcggcagatgcgaaatcattggcgttcccctgtgggcgtggactttggtctgatggatcggctctccccctgcaacgcttcctctttcgcttatacacgccgatgcatgcatatgccgatcgagctgtccctcactcactcactcactgatgggcaattctgggctcttgccgcgcgcatctggtgatcgatccgcgtcgcgtgctgctgctgctgctgctacagccttttcgtgatgtttgtacgcagcggccatttactccgggtctccggccgtccggcgatggcattggttggtgtacactcctaccctggtggtagggctggtagcagcagcgggtcatctttcagtcactgtgcggtgggccctgcacgacagaggggacgaggtgggggcgagtggctggttgcccccaagcggcagcggcagcggcagcggggcatggggtggtttcattgacctccagagtggcaatcgatcgaacgagacgagtgaagcttttgctgccagtttggcgtccggatcacggccagtatgcgtccgtcccaagtggcctcacctgaccggcaaaactgatcacatcacgcgacgtaggcatgcaagcatatcccctcagcttttttcagctctcgtgtccaggactccggacgcccgctgtttcagccaaaacagcaccaacgcgtttaattttaccctgttcatggtttgacacgcagaacggctaactttaaaacttataaagtgctggttagttaagggttaggggagcaacgtgttgcatgcattgtgaaatagatggccttgctagatatgccagtactactagcttgtcacttgtggacgtgtgacccaccggcgtgaggcaggccggcggggttaggggagcggcacgcgcagcaccggtgaaagtgaaacaccttctgtacgtgcatgcatggctgcctttctgttttctctgctcccggcttcaccgtggggcctgtaaactgtgccctctcgtagtctaaggagacagggctggtcaatcaagcaaactacacattatcaaagcgaaagcgatcatcccatgcaaaggacagcaaggccgagacatactatgcacagtgcacagtcacacacagccagtggaatctagatttacatcatcaaaattactagcagtgcttgttactgccatcatgaagtgtaaaaccatccaggccggcagtctgtcggatcgggcgacgaaatgtatgaaatgcacagtactagtagtagaatttttggcaataagtttcgtgccattgaatgcttacagtcctttgaatttcctaggctgccttcaccataactgttgtctagttccagatcgctccccctgccgccgcagaacctacgccgtaatgtttgcattcagaaattatgaaaagacttaattaacctaggtaggagtcaatttaagatagagtgagaatgcaacctgttaaatgtatacacctgagactctgaggaggggaaattacaagaagctccacatcgcaaagcctctcttagtatcccactataaaccaaagggtcatacaacagaatgagaaggaactggactaaaagctcatgtaattcaagatatatcggcaagggtcaaggactcgtggtttgtaattccctcttccctcttctaagcaaatcatggactcatggttgcttcattgtcccagtaattcctcaactgcgacatgtggaggagcagcccatctcggcctaatccagtaacgctactcgtcatgatccatggaggaggctctgggtacagggaactgatcgtctcctggaactctttgatgttctcctctggccggccccctttacctttcttggatttatcacactttgtgaacacataggtcaatccaatctgaaatagtacccaaacaacagaagtcagactgcaacaatatagttggagaacatgaaagatatgttattagatatcagtacatggcatagactgtcttatgttgccttacattgttacggccaagccaattggcacagtctatgtcaattttctgaggcggaatactggcatcaacaaggagcagtacgccaaccaaggtatctctgttcaagaagtaacccttggtaaatgaagaccaatctgttcgagcagattgagatgcagccgcaaacctacatttgtgaacagatttgattatcaccaggcgccaaatgagttccaacagtatgctggggttgtgtcccaatgggaatggaaaagcaacagtagttgacttataaagtttatttcgtacagaatgtgctcactgttacaatgtcagatactggcatgcagaaacagaaactacagccgaatagaagggaataattgaatctatgccatctaaagatcaccacttcagaaatatataaaactgaactgactaggttcactaatatgatcaaaagatcacagttcaagtttctaacactccgcctagtttcataagccttttcctcctcattaagtggtaatgaagtgaacaacatcgattcaatggtataccctggtggcatatacacaattgcctacttctaacatagtattttcaagtgaaaatttgctaccggacactcaaagtttgcgctctttgctactggacacccaaagaacgtgtatttgctgcaggacaccgtgggaatatggtgacactggccgtattattttattatatctgatccaaatggagagagaaattttcaaaaaaaaaacaagtttacccatacgacatatttctttttaactcgaccaggtctagtttgaatcagacctacaccatcagagtgagaatggactgtatcgagggagtgaaaatggactgggtctggttctaaccagaccgagttgtcttacaagccgatgaacacaagggcaaaattgtacttctcgctctgtttctctccatttgcaatgccatctatgattttgtcattgtgatacatcctagaaagtagcacatgcaaatcaagttacatatgaattgagggtagaaaaggtcaacatacccgtaaccaggcaaatccacaaggtaccaacttttgttaaccaagaaatgattaatcgtctgggtcttccctatgaaagcataagatattccatgtaacaacagaagtacacatttcaacaaaatgcagaagataacaacatgttggttttgtaatgccaaactacattatctgaattcgtgtgcaattacgcagctaaatgcattatatacatcattatatacaattacatttcttatacacctaaaataaccctaatatctctcactagtctacaattctacagtttcaaccatccaaaaccaattgtgtgcatataccttttctccagcaatttacatggtattttttaaccaacttttgttaaccaagagccaatatattcatgaagtttgatatgaaaataacatagagttagatggagcaaatcataaaacaaaggaatcagttcagttctgaaggttggcattttgttaagagttaagcaacgaataggatagaaagataaacaagttgaaaaaaccatgtattcggttctgaagggtgcacaaataccaaactcgtcctccataaaactgcataatcaatagatttataaggtttgcagcaatatcaaagttccccatcaaaaccggagcagtagcgtagcaccgtaagctaaattaatttcttctgttgctttaagcactgagctaacttcagctcccgaattgcgagcaaacgaatgtgtttgcagtctaggacatcgcactgacggttgacgctaccacagtcctaaactcacttgggagttgggagtctacctcagagctaaactagaaattgcatcatcaaacagatatgcagaaacagataaaagcttaaaaatcaccaggctttttggaggtgagcgcggcttccttgcggcggataagggcgttgatgagcgaggacttgccgacgttggagcgccccagcacggcgaactcggggcggtcgtccttggggcagtcccgcgcgcgcgcgctgctcttgacgaactccgcctccttcacccgcgagtcccccgcgtagggccctaccacgatgttcgacgccggtatcaccatctccgccgccaccgccgcgtcccgatccacccccggcgggaagaacagcgcggggttcacggacgaacccctgggaggcggcggcggtggcgcgctcttcctcccgcccttgagcccggttcgctgcgccggcggcggcgcatcgccggcggacgcggtcctcgccgctccggccggcgaggagagcgtgcgacggacggggagcgaggcgcggggtggtggtgggacggggcgcggcgcgacggctcggaggagggagaggcgtggccggagtagcatagcaaccgcagccgcgcgcgcggcggagaggtggcggatggccggatggggcgcggcgcgggtggctcacgcggccgtcgagtcctcgtcgtccctgtgtcgcgacctgcgcgaggccgtccgccaacatatgggcctattaggcccagagcatttattcggtaaaaccagagcccgttataatcacagactaggcccaatagactgcaaaagtggcccaaaacaactgtgcaaaagtgggttttgtacactactgaaaactgataaaaaaaacgcgaatatcaggaaggtatgggaggagactaccgcccggacgtccgatgcaacgcaaaatatcggacactacccgagtcctacgtcagcaagctgatcacataactgctacatgatgatactacatgcatgcattgattaacacatactagtagcgtttgagatgatttattttccaaaccatttatcttattgtcattctgattatatggttgtattcattgtaattaaatctttacaacaatatctcacaaggttatattttaattgaaaaattatatatgtttcaatcgttaagatttaatgtttcacgtgttaaaaataaaaatgtttcatctagaatttgattatgttgtacattttaagttttttatccattagatgttgttttactgttgcacacgggatcaataaatatattatgatgtttcattatttatttgtgaatgttgcacatcatattatttgaatgtttcatcaagtatattgtgtgcaacagttacaaagaattagtgaaacataagaaaatatctattaaaacatctaaataatactaaataatactatgagcaacattttgttgcaacagtaaacttaaaatttattacaaagtaaaattccatttgaaacgtttatttctcatacatgaaaaatctaattgcaccggctaaaaaacacacacatatatataattttttcatcagaaatataatcatatgagatcttattatagtgatcttgctagaacatagaaaacaccacatgcaacattacaaataactatgtgaaacatcaaccaatatttattgaaacattctaataacaccgtgtacaacactaaaaagagtcagaaaaaagtcatcagaatacaatgatgtgagatattgttccgaagatttaattataacaaatccaactacataatttattcatagtttggataaatagttggagaaaaaaatttgaattctcaaccattatgagctgttttcctaaatttgattgcatgcacgaatgcacttacaccaactgatgtgaatgttcgatttcttccttccttctgcccggacggctgatgtgaagcattttccgaaggtatgaggtttcgaacttaattcgtctagcccaccaccttatggagctagccggaagacccaataatatttctctactaaaaactgctgattgcaatcagattattactgaggaattatgttagttttagtctctacctaaaaagaaaaggttacggagtagttttactctttgacgagattaaatgtcgttgatattttgtggagatggcacaaggctccgttggtggcatcgtcgtttctgttgctggtcattgacaatctcgcatcgtcaatactgtacctgcgaatgtcctgaaggattccatatttccattagaatcagtcacttggaagttgggaagttcacttctatggggcgtgctaccgcgtcattattgatactcgatgagaaaacaagcagcagctttatttcccggcgcttaatgacaataaccgaccaaataaacgatccaacagatcgaactgcgattatagtaaatagtttgtactccctccgttcaaaaaaaaaataaataaataatataatatattctagcataacgaatttggatacatctaggatgtgtcatggagcggagggagtatactagatgtaaaaggtagatcgctgacaatgcaaattaaatattagcaagcatactacgacgaccaggcgtacataatagaagaaccagttgtatatttgccccccaaaaaaacgaacatgaggaaaatgaaatgtgtgaaaggttttattgacccaagacctaataactggtatggactcagcaaattctagttctttgcagcgaaccttctattggtttatagttgtggcatacaatttaaaatgttaattgcgtataacagcagattcttgagaatctaagaataccttaagcagcatgtactagtgtttgaactgttctaaagtactccagttaggtcacattttgttaaaccaatgagttataaaaaggagttgaacgcatactctataaaaaaaacacgaatattaggaaggatctaatattaaataattagaaagggtgaggcttggaattcagatcgtctagcccaccacttgtatagctagccggaagatccctgggcgtttctcacacgcatactctataacaaaattgactctatgcaaagccctctgcagctctactagctgcaagttgcgacttgacagataggagtgggagaagaattgaagaaagtagcaacaaccttacaaccccagtgaggatgcgactatgtaactaatggagtataatcatgagctagtttcagcgttgactatgtacgttggcaactatcccgtcagattcaacagctccgatcgttttatttgctgtttggtctagtacagttattaggcagaatacaatacgccgatttttttttcagaaaaatgatgatactaacaacaaagataagtgaagtcaactgcttataataattggctggtagaccgggtgcctaaattaatttgactgcatggctgacgattccatctaggagcccaatacgtcaagttggtcaaccggcctaactgtccgcgcgcaatgctaactgtgcgttcagatgtattgagaagcaatagtatgtctggtggtgtgcgctgcgagcaataggacgactgcatgaatgcttgccaatgaatgaaacatccttccattttttgttctacaacagctgaaataaagtttccaagcatcatctttggggattcgacaccatcgtaacgctagtaatctgaacaatttggagggagcgaaataatagggttttcaatctcgaagaaaaggtagctgggtcaaggtagcaaaagggatggtctaggaggtagcgtcatggtgtgcggctaatatggtgatatggactatcaataattagtttgcagggagttctttttatcgtggtagacagtcaatatcgtgataataggcttatgttcatttgccggttccagtttccgtctccttctgttttttgatttggggctcttggtctgtaaataatctttatttctctttatgaaaaaagtgtgctccttgcgtattccctaaaaaggcaagcaatggtatgcagaaaattatccactttgctgaaatctttaaatgcatgccactacatctaaaactgttagtttgtcaaattattcttctggttccaccggccggcatgccaaatcaaaaatcatacacataactcgtccactttggcccaagaaagattcgatagatattagaaactgtaattttattatagctgaggcaagatggatacataagttcagtatctacagtgcttacatcccaaagttccatgtactatctgaaggtgatggccggaagtcgagaatggatatacgggctgaagaacaaggagcgagaaatgtacagatagtccactacaaagttggtacaatccactccccgcaaaaaaaaaaaggggggggggggggggttggtacaatccacagaaatgaactgcagaagatcgatatccgtttgcctcatcaagcctttcttctttgcttgtttgaacgcaggaattcacagaagatcttgtagaaactgtgcgtcagagctagttcattcctccaagaatcgtggaaaattcccgtgttccaaactaccctgggcagaaacttgtgccaaagagcactggtgcatatatttgcacagctactgtgctacactagttgtgattcccttgggtgtagatgtagtcggtgtgagcaactagtgtcctcctcatcaggcactcttcctctgcttcccctcccttgcactccactgcctgatcaggttctccctgatgcatttccacaccgattccagaactaccaacactcttctgatgggcaatactggaggcaacaacaccctagaaacaccaagaagaacgcggttagatagccagcaccgatagccaaactgctcagattggaagcaaaatgcaaatactgtgtagagttcgaccaggttatgcattacatggtgactgtacctgtgatttgtggccactggatcccggttcaggccttgctgcttggctcctcgtgcagatgaggcagagcagaattgccgtcaagaagagagcagacagtttggagctggatgccatgcctcgccctttttctctgagctctccctctctgggaagttcagggatgagggatcacaggctaattattgggtgatctacaagcttaaccaagtgctttatatagggtgaagaagaagagcgaggctgatatgccaagacaccacatgaaggacagcaatgtgccgtcgccgctaggtctactccgctgttcgcgttcacatgtggagtgtttatctgacgcggacgcgcgtgtggacgtgccagacgctcatggctctgcatgcaccgtgtcaccccctgtgcgtggatgcatatgctgccagattcaggggcatacggttgctcgtgttactgtgtcgatccatgttttctagtagtgtacagtatgtgcctagactatacggtgcccggtgtcctcccagtcacatgctccttcggttttcacgcctccccgcttccaaggaatccaacggatggttgaatcgcaatgtcaatggattacatgtacattaatcgataattatttttaaataatttaacagatttaatacagtataattctgataatttttacataactttcaaaaatcctcagtaatataaacctaaacgataattatatacgatttttaaaatatcatataccaatgacaataaagagaagagacagtggacggctgtagaagagtataatgataacatttgacggaacttatagaaattataaaaacaaaacccaacgggacaataaattataaaaactatgagatccaatttttaagagagaatctcttatatgccactgaaaattggcccgatctcttatatgccactgaaaatttgctcttcccctatatgccattggaccaaatttgcacactggatttttcacattttggtccttttgaaaaacttatttcgcaaatagacccctagaaaaacttatccaaaaatggtcctttttggggcgccagagtggctggcgccgtcatccaacgggacggcccagcctctctggcgc

SEQ ID NO: 10212 - DNA, 8263 bp, Oryza sativa
acccaagtcagtgttttaattcttaaaatttgctcaacaactaaaatgtggaatggttggcctgggttggcttgggacgagctgggacccagggtcgggttgccagttcggtctgaatcatcgtaggccttgggttaaggcaggttcgtgagggttcacggccttgtttaataatactgtgtagctttaggatcgtcttttttttaaatggctttggacaaccaagtgacttttaaatgctgtttactgcaaaacttaacccctatattattatccccttgtacccccttgcattaattatgcatctccggtgtggcttgctgagtactgtggttgtactcattcttgctcaatctttcccctcttcagtaagagaagctttggagaagatgtcttaggtggagtcctggcttataccccagttgagcgcctgtgaagatggagccgtaggtccgctagtccgctgctgtttatttttgattgtcaggccttaagtgcctttgtaataatgtaaatatcatcgatgtaataaagatgtgtcttttatatcatgtttgtatggtgtaccccggcttttcctgggacggggattaatacactagcgttcgggaaaaggcaattttcccggtcgcgacaagctggtatcagagccatctcgactgtaggataagccaagtggataaaacctaaggacatattttataaataaaattatttgcgaaagttcctttttctccttcccctaatgctatttgcaaaaggtttactccgttcttccttcttcggattttcaactagtactagatgattagttttgtgaagaagaaggtgccgtcaattgtctgtcgaagctccagaagactgttggatccgtcagcgcagcaaaggaagcagtgaagccagatgtgaagcaagagtgaagatcttggagaacccgtcgcagaacctaagccaccctctagtgtttcgtttgtcgtgtgtttccttgcttgtgtgtgtagcgcgtggtttgcatcggtgggtggtgatgtaaccatgctaggttgtttgcctaatcaacctgcagaataagcaaaacaaacaacacatcaacaaaaagagttagttcctttaaggtcttgtccctagttctggtctattctttccttgtatgctccccctctcaacctctaccttgtgacagatggataacactggtaacaaaggctatgggaatgatggatccgatgactcaagaacccaagccaatgggaatgagagaagcatcaacgaaacctcaccagagctaatccaagttgtggttaaccaaaccaacatgttggcaacagcctttcaactattacagaattggaacaacccagcaggggcaaccaacgttcaagtacctacagtccagcaacagtgcaagttatcagaatttctcaaaactgggcctccaacctttgccatggccgtcgatcctatggaagccagtgattggttgcgcacaatcgagaagaagctagggttgattcagtgcaccgaccaggagcgggttggcttcgcaactcatcagttggttggaccggcttcagagtggtgggatagctacgaagcatcacggccagaaggacataccatcacctggaacgagttttcatctgtattcaagagatcacatgttcccgcaggaatgatcacactaagaaaacgagagtttcgctacctgaagcaaggagatttgaccgtcacagagtacctgcacgagttctatcgtttggctcactatgcaccagaagatgtggaaacggatgaagacaaacaagagaagtttctccaggggttaaaagatgagcttgcagtgcaactacttctagaggattatgaaaattttgagaaacttgtggacaaagccatgcaactcgaaagtgagcataatcggatgacgaactgcaagagaaggattgtcaacatcccagtatttccatgtggaaaccaaggacagcgcactgagccacttcagatcaccggatcttctgttgcgcatcaagagtttccgccccaagaagatggacacaatgcagacaacaacattagcaatactaatgatgatgatgttaccaccaacaaccatgcttcttgccccaatagtgaccactcgaatcaagcgtgcaatgtcaacatcattcaccaagatgtcgacgatagtatcaatgatggcacccaaaatgacaaccctagtaattgggactctgggaaagactccgatggtgatagcaactatggtaccactgatgccaatgttagcaaggagttccagccaccaattccaactccaagtcagaatgactgtccccagacggatagctcagcaaagaagacgttgatttgctacaattgcaaagaaccagggcattactcgagggactgcctgcaaccaaggcaaagtcgacctccacattaccgccaatttacacgaagcagacatcccaatcgtattgtggtcactggagcaaacgccgtacccgtgaggcctcgtgttaatcagaacccatagcagaaacaatgtaccgatgctaagcacctttccttttaggcagtgcttagtattcatgtaatgagggagaaatgtgtaatacagacaagttccatgaggattcttttggaagatgcggatatgtgattatgtgtataattgcttgttgataaaggagacctagggtctcatttcagaggaactatattctaacctcgagttaataaccaacctgtggatggaaaagaaaaccaattaaactgtgttgggttaaaaagccaatgagacagtagttggggataggagtttgggtacgccttttacagatcaagataaggattgttggatgaaacccataagggtacccgccatgcctctacattgataagttcggatatacctacaaacagttaagaagatccaggagacatcaatatttgagaacatagtagtcgatggttggtaattagtctatcaggtatcagaaaagggtcaaaggtgatatggcagaagaacaatttggatgctccccatctcgaggaagcactaaagatgatcatcggcaattaaaccctagtggcatagatacagatagcaagcaatgtatttccctgaaggtagtcagtgcagctttttgacaaaccacatcaaggtttcactgaaaggcagcaagccaaaggacctcatcgtccccagaagcgtccgcaatccacattaaagaataccacctgttagagataagccgaaagatgattgataaaagagattggcaaagatgttctctagcatgaaagaagtaggccgaaaggtgattgataaacagaaacatgctctgcatcgctcaaggaagacccctgatagtaattgccccgcaacagtcaccttgtcattaagtaagcaagatgacctaggcaaaagtgtttctatgaaggcaaggagtgaaatcttcaactcggtatcagatgctacacggagtgaaaagtgcaagcaccggttaccaggtaatgccatgtcttgggagatgatccaatgggaaagaacgcatcaaggttaaaggtgtagaggaatacgttgaatgctaactgaggacaacctgaagataataatgggaagtaaactgaatgtaaagaaagtgaatccgagctgcttgttcgtgggagctattcccagttatgaaccaagtgatatgttcgaagatagtctacagaggtcagattaaaatcacatctaacaacgaagcttcagatctggcaggatcacgatcagacaataacaagtccagcagcaaagtcattcgggaagacgtcaaagcatgtcaagcgggataaattggttctcttgggaagcataacttatagttagagtggttgaccctggcatcgaatagcagaagtacctagcaccggagaccaggaaagccaatatgagacagttaatggcaagttgtcaatcatggtatccttagtaagcgggatatcatagtctaaagcgtatggtggtaagctggaaggaaacgccaagcatgatattctcatgataacaagcatggtatcctagtaatgacaagctgatatcgacgcataacgtgaagtgggtaacttgtatgaggttgacgccaaagatatgaattatgagaagttctggaactgaagtcccatcttcaagtgccacaatccagtcgaagtcagctagaggtgcaaccagggaaaagtcaggtgaagagaagattccatctgcaacaggagattgagccaagcagtccagagtggagaagttttgctaggcaagtttgttataaaagatgcgacggaagaagtcggacaagaagagaagaccgcccaacctatcttcttgctagcctcctcgaatctcggggacgagattcttgtaaggggggtggatttgtcacgtcctgataaatccatcccgaattaaaaatcattttctaaaaggaataatagaattaattaaaattcgaaaagaaattggcaaacactaaaatacgtacaagaaaaattcgaatgtggcccggagaatttttgttaaattctccttggtctaaaacgagccctcaaattttagtggaattttcagagcacaaataataattaagaagaaataaacaaagttaaagtggttttataaaaagaaaagccctaaaaagtcttcttttcccccccttcccttcttgggccggctcggcccaactccctccctctctctcctctcccccgcggcccatcgactcctccccgcgcgcgcgccgctgacgggcgggcccgcccgccaccctcgctgacgggtggggcccacccgtcatcgcctacctcgcgccgcgcccgccgctcgcccgtgccctagcgccgccgccgccgccgaatccgccgcatcccgccgtccccgcgcgccataaagagggggaaatcactccccgtgattccctctcccttttcccccgtttttccctctctctctctccctcggattcgtttggaatctctcccgaaatcctcgccggcgtcattgatggagccgagatcgccgcgccggtttccctctcatccggccgccctctctccctcccgacgctatataatcgttccccgtgcctccctcctccgtttccgccgctcgccgctctctctctccgtcggaatcgtgcccgcgccgtcgtcctctctctccgccgtcgccgacgagctccggttcgccgccgccgtcgctccggacttcctcccctctcggcgtcgcctccttcggcttcgccgcgtcctcgtcgaccccgtccgctcctccgtttcgcccgccgaccgccggaacatcgccgtcctcgtcgatccgaaccgcgccgccgccttcctccgctccggtcgtcgtttccgccgtcctcgtcgtcccggggtgagccgaggaccgccgcttcgcttccctcttccctcccctctctcggccgccgctccgccgcgccgttggtcgccggcggcgaccatcggggcgcgggtgcgccgccttccgtcggccgtgccggcgaggccgccttcgggcgcgccccgcggctgccaggtgggcccggccgtcagccgcccgcgcccgcgggtgcggctgacgcgtgggacccacggcgccggccggcgtcagtcgcgtgcacccggtccaccgtggacagagaggctgccgcgtgggccccactcccgtggacccggtccgcgcgccctctctctcggctgacgcaataaatccaattttaaattaaaatttaaatgaagaaattcgcaaatattcatttaaagagcatataaacttcaaatggccataacttggccatttgaactcggaattggaccgttcaagtctctaatttttccttaagaagtcaagaacccatttttgtgctttgtttctgctgttatgtggagtttattagagtaaaagccttttcttttccgttggtcgtgtagacgctgcagcttcggaagatccgctcttcgtggaagttgaagccggcgtttgggaaagcaagcaaggcaagtcacatcatccttgaacatattgaatcccagtctataaaagtattttgatttaaattattgcattatcgctttatttaaattcccgcgttatcactgttttatttagccatgcctatttatgtcacgaccggaaataacccaacgggcattccttacgtgcgtgcattaatccttgtcccaggaggcaaggtacaccaaaagttgatacaattcagagtttaacaagcggaagcgtaaataaaattattacatgggcaacgaaggcccagcacactcaaagacaacgaaaaacagcggaagactagggcgacgaccacaggcacttgacggcaggcacgagctagacaccaaagccttcatcttccaggaactccccatctgggcttgggaaaattaagcaagactgagtacaaccaccgtactcaacaagacacacccacaaatgcagaataaatgcaagggagtacaagggaattataatataaagggttagggttgcagtaaacagcatttaaagacatttagttgctcagggctattttgtaaacacgttcctagaactaaacaatattattaatcaaggccgtgaacccacacgaacctgccttaacccaaggcctatgatgattcagaccgaactggcaacccgaccctgggtcccagctcgtcctaagccaacccaggccaaccattccacattttagttgttaagcaagttttaagaattaaaacactaacttgggtacattgctcggcttgcccatatccgagggctcggctattcgaatagattatactctgatcagaggtgtacatctttacccacaagacacatctttctcacgtgcaaccacgtgccacataccaccacggtatacagacgaaagacgtgacatagtttccaacccatcctagccttagacaagagtaccgacccaatcccgcctacggccggaacccccgggacaggcagacggaactgagcccctcgcagcagggcaccaaccctgtgctttttgacatctcgactaccgggccgcagctcgtgtagccttcatttgccctggagaatgtccatcgacccccgacttcatccatctccaatccgtgtacttttgtttatgactagactgagccacaaactaagccttacccactagacatgtggaagtacggtagtgcgttgcaacagaggcccgaagaccggtccttatacggccgaggtgctaccatcaaaaccatgcaccccgagcccagcctaaaaccattttaggggattttgaatagagggggcggtgtgaagccaattccacaataaaccaacaattccagagtatccaggtgatatgaatatttcccaaagtctatagttgtaaaaccacctaatgttacctaattaaaagcgaagcatctacctaaaattatactagggataccatgagtagagtgtccactagttgaggttttgtttgtctagggtgaacaaggtagtaataataacaataacaataataatatggtcataacaaaggtaaataggcatggctaagtaaaacagtgataacgcgggaatttaaataaagcgataatgcaataatttaaatcaacataattttataaactgggattcaatatgatcaagatgatgtgtcttgccttgctcgttttcccaatcgacggcttcgacttccacgaagagcggatcttccgaagctgcagcgtctacacgaccaacggaaaagaaaaaagctttaacactaaataactccacataacagcagaaacaaagcacaaaaatgggttctttacatcttaaggaaaaattagagacttgaacggtccaattccgagttcgaatggccaagatatggccatttgaagtttatatgctctttaaatggatatttgcgaatttcttcatttaaattttaattaaaaatcccatttattgcgtcagccgagggagcgggcgcgcggaccgggtccacgggaagtggggcccacgcgtcagccccacggtccacggtggaccgggcgcacgcggctggcggcggtcggcgccgtgggtcccgcgcgtcagccgcacccgcgggcgcaagcggctgacggccgggcccacttggcagccgcgagggcgcgcaatgggcggcctcgccggcgcggcccacgggagcggcgcgcccgcgccccgatggtcaccgccggcgaccaccggcgc

SEQ ID NO: 10213 - DNA, 14305 bp, Oryza sativa
cggccgcggagttctcgggttccatagatgcgccggcgacgattacgggattaaatccgagcgaatccgagggagagagagaggggaaagcgggggaaatgggagagggaatcacggggagtgattcccctctctttaatgcgcgcggggacggcgggatgcggcgcaatccgcggcggcggcggcgctagggcacgggcgctggcggcgggcgcggcgggaggaaggcgatgacaggtgggccccacccgtcagcgagagtggcgggcgggcccgcctgtcagcggcgcgcgcgcgcggggaggccgatgggccgcgggggaggagagagagagagggagggagaagtgggccgagccggcccaagagggaaggggggggaaagaacttcttttaggatttttctttttttataaaccttttccactttgtttatttcttttcaattattatttgtgctctgaaaattccactaaaatttgtttaagcattttaggcttttaggaaatatacaaaaatcctccaagcctcatttgacttttatctttgcacattttaattgttgaaggctttcacatgatttttaattattcttttgcacaatttcgaggatgaattttagagtcgatttgggacgcgacaatttacctttgttatgaccttattattattgctattgttattattaccttgttcaccctagaataaacaaaaccccaactagtggacattatattcatggttccactagtatgaatttaggtagatgcttcgctgtttaataggacaacattaggtggtttttataactttagactttgggaattctcatatcttttggacactatggaattgttggtttatgttggaattggacacacacctccccctctattcaaaacccccaaaatggttttaggctgggctcgaggtgcgtggttgggctttgttagtcgtacctcgggtactataaggattaagctcgggcctctgttgcaaagcactaccgtacttccacatgtctagtgggtaaggcttagtttgtggctcagtctagtcataaacaaaagtacacggattggagatggatgaagtcgggggtcgatggacattctccagggcaaatgaaggctacacgagctgcggcccggtagtcgagatgtcatggcacagggttggtgccctgctgctaggggctcagtcctgcctgcctgtcccggaggttccggccgtaggtgggattgggtcggtactcttgtgtatggctaggatgggttggaaactatgtcacgtcttccgtctgtataccgtggtggtatgtggcacgtggttacacgtgaggaagatgtgtcttgtgggtaaagatgtacacctctgatcagagtataatctattcgaatagccgcgccctcggttatgggcaagccgagcaatgtacccaagtcagtgttttaattcttaaaatttgctcaacaactaaaatgtggaatggttggcctgggttggcttgggacgagctgggacccagggtcgggttgccagttcggtctgaatcatcgtaggccttgggttaaggcaggttcgtgagggttcacggccttgtttaataatactgtgtagctttaggatcgtcttttttttaaatggctttggacaaccaagtgacttttaaatgctgtttactgcaaaacttaacccctatattattatccccttgtacccccttgcattaattatgcatctccggtgtggcttgctgagtactgtggttgtactcattcttgctcaatctttcccctcttcagtaagagaagctttggagaagatgtcttaggtggagtcctggcttataccccagttgagcgcctgtgaagatggagccgtaggtccgctagtccgctgctgtttatttttgattgtcaggccttaagtgcctttgtaataatgtaaatatcatcgatgtaataaagatgtgtcttttatatcatgtttgtatggtgtaccccggcttttcctgggacggggattaatacactagcattcgggaaaaggcaattttcccggtcgcgacatgtttcttgtatcaacagatggctgaccgcgatgaggaacagatattgtacgatacaatcgcggagggaagcagccagtactggaatgaagaagaggggaacgaggatccaaaccagtacttgaacgaggaaggaaacgtggagagggatgcggaggggaaccagcaggggcacgtggaaagggatgtggaggggaaccaggaggaggaggctagtggtagtcaaccctccgttggacagaagagggcacgcgggcaacgaggtgcagcgaagaagcttgagggtcgacacatcataacggaagtgcaagaagatggacgtcctagtgccccggccgaagccgccaagaactatgtacgtcacagcggttgggttgtgcgggataacgtgcctgtcagtacggtgtactggcgaagaacaagggcacgcggagatcatgagagctttgtcccagattcggagaaagagatgctgtggaccacaatgctcgagacattcacccttcctgcgggtacagaggacaaagtgaaaaggtggactctgaagaaaatggcagaacagtttcagagcttcaagggagatctgtaccagaagtatatactgaaggggcagacaccgaacttcgacacattcccaaagctaagggatcactgggacgagttcgttgcatataagacaggtgaacaagggcaggcgatgatggaaagaaacaaagaaaatgccgccaagaagaagtaccatcaccacttggggtcaggaggctatagcgtcgcgatgccgaagtgggaggagatggaggctagcttgattgagaggggtatcgaaccggcaacagccaattggccggaacgatcgaagttctggtactatgctcacggtggaacgctcaacccagctgatggctcactggtcttcggcgatcagatatgagaggctgcacgatgactaacagatgcagtggaagcctcctctcagggcacgttccgaccagacagagatagggacgaactgacactcgccctgcagactccagagcatccaggacgaacacgagggaaaggggtgattccttggaagattggtttcaaggaggacatccacacgtacaggagtcggatgaggagcaagagagataccgaggcgaagattgcagacctagagttccgggtatcgagctacgaactcaacatgcaagaggaggtggcaaggaaggttgatgaacgcatgtccgcacatcggtcccatgatccccagccgaccattcctcctgcaatggtgagcccgtcaggaaaccgtagcagctgcgcctcaacggggcaggtaggatcacagagcatggacgccatgcaaacacaggacgaatcgacatgtcccgttgatgacatcactcagcggacaccatgtgagctgcatattcctttcaagaacttatcaataaaggtaagatttagccattccgctagttgctgcttatatatgttgattactaataaataatctctcacaacatgaaggtggcgtcgggcatggccatcccaacggacccttcaggtacttaccactgcaggccgattccagcaggatactcgaaggtcgaagttgagttggtcgaaggcgcgtacgaggacctcgagctggattaccctggaggagacggtgagacgcatctacgagacacaagccatgccattattctatggcgcaggcggtacatcatcctccctgggcgacaagcggcgtctcgtgcaccatctcctccggctccgccatctcctcctcaggatcctgcaccgtctcctcctcatgctccgccagcaccgtctccacctcaggctccagcatcgactcctcctcaggatcctgcaccgactcctcctcgtgctcctacacctactcccccgcaagctcctcttccggcaccttcaaagtcaagggcccccccagctccaccgcctgcccacacaagggcaacgaagaaggcgaaagttgacgccgccaagaacaaggacccggggtacgattgcacgcaagaggagcttgacgcttacgttgcatcagaagtcaagagacaattcaagcctcgaagtccagaaaagaagattcctatagaccccagtgtcaggaacttcttcaggggtatgtctgcatctgtcaaggaggccatcaagctatcggactatgagcgaacgctgaagaaagcatcttctggaaagtccaaaccagtccctcagcttggagagcaaccaaaccaggagatcgagccgttggttaccggtaaagaaatgacgatagaacaatttattactgacaccggtctaactacggatcaattgctaggagttgcaccaatcgaaaaggcggaagtgaaatacatgtacgaactcggtaaaccgcttgtcaagcctgagctgctgcagtccctacccacacaaatgtacaagttccatcagctgtacatggagatgagcgccgccggtagagagatgatcggagcgaggatcagggacacggacttcttgcaaggagatgacattctctggatcaatttcaagggaatctacgaactataccagctggacgccctcgacgtctctattatgagttgctggattttgtaagtatatcgttcggttagatttcttactatacgtctcctttaataaattaggtccttgtatataagtagactatagaaaataatatactcccttttatcgttgtagaatggagattcaaagggcccgacggcggagggttttcgatactggattcatcgaccctcggagagtaaacgtcgcaatgctcgaccaatatccacaagaaacagaggacaatctcgtccatctcctgaaggcgcagcattacaagacgttcatactgttgccatacaacacagagttagtttaattttactgtcttcctacataccaaatttcattcccgtacgaacttgctaagtgtttcatatgtaatgcatcccacgcacattgcagattccactgggtgcttttactcttcgacctggaggcctgcaccgtcaacgtatatgactcaatggataaaaaagagtctacgtttgacaaggttttcgaacttatagacaggtaccgtcataagttcctttgttaattaagaaaatcttgttatgttaattgctactacgaatcatagctttaaactccatgtagggcttggtatcggttccgtcatttggtccgcggcaaatggagagaaagacttaggcggaagttcaaatttcctgtgagtacacatgctctacatttatatttctccgattcaaatacatacaagtgtatattaattagatctctcgttgtttgtcatttatttgtagtgcgcaaagcaaaagcagggaaataacttgtgcggctattacgtgtgcgagtattgccactgccttgcaaaccaaatcatcaccacaagagagctcgatgtacgtacaaataaattcaaaatttcattacgtagcgatttcttgtttaattactaatcaatttcatacattcatatagtttattcgcatgagggataacctgaccacacacaaggaatttatcacggcggttcaagaacaactcatgggattcatcaacgaagaaatccttaatcctaagggtgaattctactacgacggaaacacaattcaccggtccttagcttctgagctagcagcgagtactactacgtcgaaatgatagctagctagctaggacatataatggattgtaattaatacatgactacatatgtttctatatgcatgtgtacacattttctataatgtaaatatattttggtcatatatatatctatatacatatgcatttgcataacatatatatgtataaatacatatatattatgcatgtatatacatataatataatataatatatatatatatacatatatatatatgtatgcatatatatgtattgaaacatatatatgcatggtttatatatatatatatatatatatatatatatatatatatatatatatatataccccatgcagccccagggccatgcaaaaaaccgggactaaagatcgatctttactcccggttatttcacccgggactaaagatagcgatctttagtcccggattggtactcccggtttggaaaccgggactaaaggggggtacaaaccgggactacaaagggtttctccaccagtgatagctatcttcacagcttgcacacaaattttgcttcatcgtgatcatcctaattgaacacaagtttcttgatctgacgcagaatacgttttatcattggtcagcaggtagctagctgacatgagttgcacacttgcatagtttacaggaccctgataatgcatgacttgctggtctgaattatatagttgttcaattcgatccccttacagacttgcaggcagctggaagcctggactcgaatcatatcaatgttcgtcaaccatcaacaaggaaaaaaaggacttcgcactagtgccatgtttcacaccttacaagctaggaattaacaatcgtcctatgatcagggaaaaaatgttacatcttcatacaattttcatcagcaatatgagtttctgttcgacgtgagacacagaatacgcgtgagtgtgagattgtgtactggccaggtgcatgcgatttaatgccctactcctttatttcatattataaatagctttgattttttttctagtcaaatttcttgaagtatgatcaagtttataggaaaatttagtaacatctacaacacgaaattagtttcattcaaactaacatttaatatatgttgataatatgtttgttttatgtcgaaaatattactaaatgtttctataaagttgaacaaatttaaagaagtgtaaataggaacaaagtcaaatcgacttataatataaaatggaagaagtagttgacatggttgcttttgtctttatacgagtcactttatatgttttacaatgtgtacagttggtccagtagacattaaaaatgataaacacatattttgtaacactagactctccatcaagcagaagcaacattaaaaaaagtgtacaacagcaataagcaactgtctgatatggatacactacacacaaggtgcacacattgtcaaacgttgtcagctgatcctgatgaccatgaggccggtcgagctacttccagcgtcgatctagacgactgcgaggtcgaggaggagctacgtacctccgtcgttgccctgccctccgatcccttcctgtcacggagagacaggaacacatagatggctacataagccagcaccatgacggccatggcgacgacgtacccggaggtgccccagtccctgctgctgcctgccgcgtacgccaccaggaggccgagcaggtcgagcacgaccaccatgtgcattggcccgaaccggtcagggtcattgagctctgggaggatcaaggtcccttgcaggaggagaacgatggccacgatggatgccgagaaggatgtggagttgctgtagaagaaggcgtggtaccggcggccgtcggtgtcccccaggatggggttccccgctgcgtgccctttgccgtcgttcgtcggccacacgctccctggcggcactaggccggcctggtacgtgacgctcgctgccaggatccccagtagcgtcagatacttgcgcatcttgtacttctctttgtactcatcagtggtctcttcatcatgattattggtgcacttctttcctgtcgaacctttagaccccgttgcctgatcatgattcttagtgacctcgtcttgcttcttggaagagaagaaggaaagacaaccaatgagtattttatggaaaaatttgatgtgtagagcggcgaaaataagcaccgcgccgaccaaggcgaagacgtagatggacgtccgcagccttcgggtggttccggcagcgtaggcacccatcaatccgaccaagcctgcagccatgcaggcatagagtgcgttgcagtagcctacggcgatgctggagaggttccgactcatcaagcaaactatggcaatgacagatgccatgaagctcgtcgcgttgcaatagaagaatgccttgtatcggagagggtaattgtccgcgagaatcgagtcaccgtagcggtggtcttcatcggtgtgctcgatccagaagcctcctggcggggtcaacccagcttggtaggtgatggtgacggctagaattgcaagaagcagcaatagtttctgcttcttctccagcttgcttttctcctccaacttaccctttttgtcatgtggaagcttgctaatcacaacgtagattgccaccaccaacacaaagatggccacagccaatgaaaagacatagatggaggtgcgcacgtctcggcagctcccagcagagtatgcgccgatcaggccaaagaggtcgagtatcacagctgcctcgagtgcacgccggccgatcagagacctactctggaccatgatgatgacgatgatggatgctacgaaggcagctgagttgcaataaaagaacaccttgtaccgcttagcatgggttgcggggagtatcaaacccccaccactatggccattgtcgtcgtctctccagactccaccgggcgggtctaggccggcctggtatgttacggttgtgatgagagtggccagcagaagtatcagtgaccgtgccctctcaacgggatctgtgctgtcttcacggtttttggaggccggattacgtctggatcctgttgctatagatggctcagtgggttgctcgccctgacacggcccaggcatgaccgggtctgggccgaggtcagtcgggctagcacagtccgacctacacgccgggcagggccgggccgttgctgtcatccagccgcaacaaccatgtgtttgtgcttgcggtttagtttttttggataaaaacttgatcacagcaaggcaagaaatgtataggaggacagcgccgatcaggcagaggacgtacacggtggtctccgtctccctgcagctgccggatgcgtaggcgcccatgagaccaagcagcgcgaaggcgatggccacgttcagcgccgatagccttctcccgttgttgcccatgctggtgctcaggagcaacatgatgacagtgagcgacgcgacgaacgcgacggtgttcaagacgaagaacgccacgaagcgccagtagtggccctcctgcaggacggggtcaccggcgcggtggtggccaccggcggcggcggcggcgccaccctcctcggcagcatgctcccatgtgccacccggagggctcaaacctgccgtgtacgtgatcgtcaccatgaagatggagagcagcatcaagaccttgcgccgctctttggggcggagcttgccatcctccacggcctccttcatgtcaagcgggttacttgagcaaccatggagatggccatcctccatgtccatggccttctccttgtcaggtgagtcgtgcactgtcttcttctcaggcgtgtcggtagaaggggcgaccagcgcatgaaccacgatgtaaacgaagatggttgccgaaagcaccgaggcgaagatggtggtgagcctgccccggcagctcccggcgatgtaggccaccatgaggcagagcagatcgaccaccatgacccctcgcaccgccatgagccggggcccctccacgcggaacgggaggaggaggatggtgagcacgagcgacgccacgaacgccgtcgcgttgaagtagtagaacaggtcgtaccggaggcggcgggtgtccggcaggatggggtcgccggtgaggtgttcgtccgtggtctccagccagacgccccccggcgggtcgagccccgcgatgtaggtcaccgtcgccaccaggatggcgagcagcaggaggtacttgcgcagctgccactcccgcgatttggggtggctcgccaccgtcgccttcccaccaccacccggctgctgcttgttgtcgtcggcgtcgggctccatttgcacggtgcaaactgtctcagctacgggagctgaagtcgcctgtattgtgtgatcctgattagtggtgtgcaaatgctgttattgcagatgatgatgatgctgtgtatatatatatatatatatatatatatatatatatatatatatatatatatatatatatatatatatatatatctgcgtttgcaagtcaagtcgcggctaagaaaataaaatgtggtggtcaggtcgcgtcgttgtttaagctgcttctcggtgctcaaccagcccttccatttcccaacctccgtgttgatagtctgacagtcacatgtgaatgcagagtgcacgccatggatgacctgacatggtgccaagtcaagctgatttaaaagtgaaggtataatagtgcacgaatatgggaatcaatgctacgatgaattggaaatccatttaagtactagcagtagttatggccagtttgtgggatattgtgtgttatgatatgctacattaatggcaaaatttgctacggagcatccaaaaaacatgtaattagctggtggacatcgcaagaacacaaatttgctattgggcaaaaaaaaaaactggtaattagctgataaacactcatggttatattttattatttcaagaggagcgaaactgatgtggagtacgattctgtccctgcgcagcttcaatcgatgaggtcggcagcaggacggtggcaggtggcaacggccggcaggcagcaggacgatggcatcgatagcagctcctccgcgtcgcctccgtccgccacctctaccttgtcctctagaggttgttccccgacaccgaacacctctgccctggcgtcaatgtcttccccaacctcgtcaagctcggcatctgctacacctgagccatcattgcggagcagatccgtgcaccgcgcatgaggtccatgtcgccgctcggcggcacgtcctcgtggctcaagctgctcgatgtgctcgtccccgccccggatcttgcttggctcccttgcactcggctgggtcggaagagctagccgcgagagcatcgcatgaggacccttgacgccgcccaagtcgcttgagctcccccgccaccgcccttttgccagtcgctgccgtcccactgccagcctcgttgaactagaggaagatctagggaagaagataagtctttcaggtgggtcccacatagcaagtttgaccaagggcaaacttgtctttaatgagtgtttctctctttaattcctctggaaataataaaataacgtcgtgggtgtctatcagctaattaccagtttttttgtgctcgatagcaaattcgcgttcttccgatgtccaccaactagttgcacgttttttatgctctgtagcaaattttgcctacattaattgttgaatgaagtaaatttgaccaatatttttatttattccacttgtgttaaaaaaagaagcatgcggacacttatataaattgggccgagcattgcatgtgttaacactatatgtcaaacaagctatactttttggtacacatctctcctttttcatattattcattgtgctttagatcgataaataaattatctgctttggtggtcttagattatataaataccaaaaaaaatgcatgtgcattgcaataagtgaagataattttcatgattgataaaagtgtaaagtgcacagacggtttttaaacttgtttagatgtgtcatctcagtttctagactctcaaaatacatgttttagtcctcgaacttgtcatgagtgtcatataagtcccaaacgggctccaatatttttaggtgaagataaagaaggtagtcaaaaatgttattttaaagagaactgagaaggtttacagtgtgttcagaactacaggtttctaacttctactcattcgtttttcacgcctatgcttctcaacctaataaatagtgtattttctaaaagaacattctatataaaaattgcttttaaaaatcacattaatctatttatttcagtttttataggtatacttaattaattatgcagtaatgagccaccctgttttatatgcgcgaaagagaagtttccaacttctcacctgaacacagcctaaagagtatttttgttttattttcatgttagggccctaagggaacataatggaagacttagatggcaaagtcatccttgaaaggttacatgttgtggcaactttgggtaattgggttgttggccttcaggtctttgtccccgtgtcctttttttttcttttttagcaaatgaccatctgtatcagtgtatttttaataatagaatagaatcttggcctttgctcagagagtttcagctaattattacaataattgttcaaaacatatcacatctcaacaattcataaagaacacaaatgatagaggtacacaccaaaccactaacaccaactgaagagataaaccacatacttattgaattatatttgcaaatctcaagccgaagttgacgaaaagttagtgttggtaaaaaaaaaaccccttctctaaaaaaaatgcaaacgtactttctcctcactattgttccctccttgtgatcgctgcgtgagtaaggggtgtcttcatttgataggaggatgctagggtcaatcgtcaccgtgaaagggggttgcccatccaactgatcgtaatcctcgtcagtcttgtcctcaactccgacgatttttcttttgcctgggagaaccacttgacgcttaggctcatcaggccctctgcccttctttcctttgctagacatgtccttcacgaaaaagacttgcgttacatcattggcaaggacaaaaggttcgtctgagtatccaaccttgttaaggtcaacagttgtcatcccactgtcatcaatcattacgcctccaccagtcaacctaacccattggcaccggaacagaggaaccttgagaggaccatagtcaagttcccatatgtcctcgatggcaccgtaatacgtggcagttgttccatcgtgtcccatggcatcgacacgaacagcgctgttttggttcgtgctcttcatgtcttgggctctcgtgtagaatgtgtacccattgatctcatatccctggaatgtcgtgatcgacccagacggtcccctcgccaggaaggcaagttgttggttgattgactcgttacccatgagatgttgtcgtagccacgcggggaaagtatcaatgtgatgccgtgtaatccatgcatcggacttaccgatgttcctggcgcgaactagagccaagtgctcctcgatgtaaggagctaccaatgaagagtgttgcagaacagtgaaatgggctttacggaataaattgttgtctaccgtcgttattgctttccttccgagagttccctttccccatagtctcccttcatggcgtgattcaggtaccccgattgggcgaaggtcttcgataaattctacgcaaaattcgatgacctcctatgttccataacccttggcgatgcttgcctctggacgagcacggttacgaacatacttcttcagaacgcccatgtacctctcgaaaggaaacatgttgtgtaggtacataggcccgagaatacggatctctttcacaaggtgacaaagcagatgcgtcattatattgaaaaatgaagggggaaatatcaactcaaaactgaccgagacattgcaccacttcattctgaagggcttctaatctatccggatcgatgaccttctgcgaaattgcgttcatgaatgcacatagctttgttattgttgcccggacattgtctggaaggataccccttattacaactggtagcagttgtgtcatcaacacgtgatagtcatgagactttaggtttgtgaacttcttctccttcgtgcttattattcgcttgatattcgtggagtatccagacggtacctttatgctctccaagcattcaaacatactttccttctctgccttgctaagagtgtagctggctggactcaagtaatggcttcctttctcctttggttccgggtgaaggtcgccgcgttgttccatatgcttcagatcattacgtgcttccagtgtatctttcgactttccgtatacacctaggaagccaagaaggtttacgcaaaggttcttagtgaggtgcatcacgtcgattgcgtggcgtacgtccaagaattcccaatatggtaactcccaaaatatagagttctt

SEQ ID NO: 10214 - DNA, 12677 bp, Oryza sativa
gattattaccacaagattaattgagtattaaatattaaaaaaatgaaatttttttaaaagaaacttatatatagaaagtatttgaataacatgcaccatgcaatgcaccatttagccgttcgagaaatgtgttcgctacaagttagggagtatctaatcctataaacactttagaacacactcttaaatttattacttaagtaataaaacacatattatgtagtttacaatataattggtcaataatagcctaaaatatcaattgtatgtcctccctgatcccatgtttgtaagttttatatacaagccactatccactaattgccaagtcatatttcatattagttatgaggaatccgtctaatgagcacgtgtgtcatcaagcacaaagataaagcgcaatactaagtgcataacggtcaacaaatgatagttaagtagagtatgcaaccaatccaccgcaaacaatagttgactacaagtagattgcggctatgagtaatagcattcctacactcctatataaacacttataagatatcactacactcctataaatgcttataagatgtcacgcgaccctctaattagcgagaatctaagaaaaaaatataaaaagcaaaacatctataaatcgatttgcactcaaaattggcgatccattattttcaaccattaaattagatatatgacagtagttcctctatcctaaaggccgtctaatccgtccatacatacatacacaactcctatgtacatacgtatgcagcgtatataaaaagaaaaaaacagagtgtgtatatgatctgtcccatttggtacttttctttttcttgctataaggtttttcccaaattgagcatatacgtagcaaccactcctagcgaggaagtaaaagaagccacgccatggcaccgcctcacgcaacccgttgctgaccgatgtaaaaggcaatttcataagctcatataaatgcatgagtacacatatgtacaccctatccctatgatagacaaatattcattaaaagaaaaagaaaaaacaaaatctatacgagagactactattcgaaaaaaaacatacacttaactacattatatcccctttctcaacgtcgttctcatccaaattgtgttaacaattagcacaaatagttttgataaattccatcaaatattaatcaccgtgaacaaagcataggtgaataaatgtataaacaagaaaaaaaaatctaaacccaaattaactcgtatgttagcaaaggatcacaattatgttaatattttttacgtggtcctcaccacagaatctattagtttttttttgaagtagaatcgaattatcaactctgctaacttttaaagagaaaattatatttgtactatcaattaacaccataaacaaattatattatatctactctatacaataaatcgactcaagatattagaaaaactattttcatcacctccattttctttcactcatacccaaaagggcaacaagcgtggatctcaaccggctatgttgaaataactatggcaggagtacgcattgttgagttgaggtggtccgagtaaaaggttattgttgacaatagagctcaactgacctatttacgaatacaatcctttacaaaattatactccacacttttcttgaggagcacgactatatcaatgcgggaccatgagtcaaggcatcgaaggaaaaagccttagcggctacaatcggcttcacccagcttttagaggggtattcatatatgatttttttcttattaattggtagaagcagtatttttaaatatttatatatagatttggatacatgtgagacatggtatgaagtagagatgaacttttttttattaatgacacattgggtttatttttaggtatagatgtaattctatctattaaaatgacatccatattttaagacaatatcatttagtatgtcaactgttaacatctatggtctactccctccgtcccaaaaacaaacccacttcttctatattcaaacccagaaatgggtgtccacatccaaactcaaaagttggtcttataatgaatatggtgagatagggcttcttttagtattctttttataaacagtaaataaattgcccgcacatgtgtgcgggctttcttcctaattatatatataaatggtataacaagcttattaagaagcttctaaatagttcatcaataatgagttgtttaaattgtttagaggagtacaatacctagcaccgttacacgggctaaaacttttatactacctctgtcccaagataactataattatatgttgtttagcatatattaaggtttgagaagaaagactatggtgcccctcattaaatagtgtttatgtgagagtggaaagatggttgagggtataatagagataaatttaaatgagatgattgatggggcaattagtactctagaattacaattattttgggacaaagtttgaatcatagaaatacaattattttgggacggaggtagtacaaaatacttactaccataatgcttaaccattcaatttactcataaatattgtttggaatttctctgcgtatatttttttctttttagagattgtttgttttattttcataattaatagaccgttacaatttttataatttgcattaacattactataaaaaaatcgatgaaagattagactcgaaggaaaacgaagagtaggagaaacctcttcgttaagaaaagaaaaccaccgacgagtccattcgttttcatcttcttcttgttcttgtactaactactcctaactcccaccacctccgcctccgcgtcgccccgccgcgcgcctcctccccgcctcgccgccggcgcgcacctcctcgcggatcgcgatgcacaagacggcgcaggcctggttcaccggcggccccgccgcccccgccgcctccgccggcgagtcgcagccgtccctcctcgccgactggaactcctacgccgcctcccgccccgacgcctcctcctcctcccctctccctttcgacatcgaggccgccgtccgctccgccaacgacaccgtctccggcaccttcagcgtgtaaccccacccacccctctcctttcctctcctcctcctcgcgccgccagatctgatcgagatctcaagcgatcgcccctctccgatgcagggtgaccaagggcgtgcgggagctgccggggagcttccagagcgcgacgagcagcttcccgtcggggaaggcgctcatgtacttcggactcttcctcgccaccggcatcttcttcgtcttcatcgcgttcgcgctcttcctccccgtcatggtgatcatgccgcagaagttcgccatctgcttcacgctcggctgcgggctcatcatcgcatccatcttcgcgctcaaaggacccgccagccagttcgcccacatgacctccatggaggtacagctgctattattattattcttctcgctgtaaattgttttggtgattgttaaattgttctgtagtgctatatctcaattttgggagtagagacaatccaacacccaatttgacaccgcaaatttggtcgaattggcttagggcctctttgtttaggcttaggcttttaactcagctttttaacttatatgatttataagccaatggatagaaagtcgtaagtttaatgttggagtcatacctctacctcacaaaagccaaaaaaagcttctcaactcagcttttggcttaatagtgtagagtggcttatggttttcaaaaagccaaatgaaaaactgcctatttgtttatgcttagacttttttggctcataagctggcttataagcctaaacaaagagggccttaacgttttggagctgcaatatttgctcacaaattttgctgttaactctcaagcacaatgagtgttctgtgtatatagccaaaggttgtcattcgcattattatcaaacaacattggaggtaaatactaaacagtaatataaatattcttgccaccagccatagaaaaagagaagaaaaaccccaccaccacccgcacctcagcccagctgtagatcatctatcttccatgcatctaaagagttcttttagcacaaacaactactctgtgcataacttactacctgtatggtgttttaaattttctctgctagattagagaaacactgtaggtttgtttggatggggttgtccgtaattaattccatgtatacgatgaagtgtaggaactaaagcaatgtttagacagaacagtatggattctaacggccaaatgtacttacgagttaaaacagtgcaacttgaaaaaaaaagagacagaaggcaaaacctggatgaattgactagaaaaagacaatactgctgctcttttttcttagttcctcttggatggttgtaatccagattccatatatgaattgatttgtctatgatcctttccaaaataggaccttgtaaacttatgaaaggaaaaaatatattgtgcatactagcttttctttatggaacaagaggcacctacgaaacgtccctttcatgaggttctttttaatccctcggtaatcatcagaccatcatttactcctcagaataggaccccaaaaacgaagctattttttccttatcatcaagggacctacatgctttaagtctgtattccttccatcatggggtgcacttcttttggattttgtacttggatggaattttcgtgtggaggtagcggttataaattccctttttattctcctgttctccatatgggttgcatgagtactctagcctatgaatgcagaaaaaaatcacagattagaaagcatagaaatggacctttagctcttcttctggttcttggttcacctcttgaatgtttactcattgacctcaacaacgtttctaactcattgaccttttggcacctgcacctccagatgttttattcttttgtctcctgaactatactcagcaagcaacacagaaattttctttagaagccatttaaaaatactccaatatccatgtagcatcaagcattcaagcctagattttctaactatcacaagtctttaatgcaagaatccgagtaccctaagacccaaaagaaggaaaaaagggaagaaaacatctagcaaaatgaagaatctgtatggtgtacgctactaatttgagcacgtccaaaagaaatgtgaacagtattagttgagaacattgtcatggcagagagtgatccttgatctttcgagtgagtgctcactgcctcattggcacttgagctgaacaacatgcaagaatatgatgttaacttggctgcttctgcttagcctcttctgttcgtttggcttttccaatcaggtgcaactgaagaagacatgttgtcatcctttttacttcatatgaatgagacaatatattggctcaatctaaaaggaaaacttgatatggaacctgtgaaggaatatattttggctcaaatttaaaatgatttctaaacttccatgcatcttaataagctggatagaactagaagtctttttccctaaaaggtttctgatttcaatgagttaaatgtaaggtttttgcttataccagttctactaaaacgttagccacttagccagaatacagtggatggaagtgctagaggcagcaccttattctgcatccccaacaaaacgggaaaaacttttatgaataattcaacagttctttttcctgtccatggccagttagtattgctgtggttgctacatttttttgacatagtcaggttcttcctccactccaccatgaatttgcagctacctcatgactaatgcgccctttgtcagtccactcacttttccccctctccctttagtcggaggccttggctcatagcctcatagtcacagggtgctacttctgctgcctcttgcataagctgtgtggatcaggtgctcaggttaggggtggtagcggcagcaatgttaatcaggatattgtgctctgcagtttgttatcaaatataactggtttctcaccatcttttggcttgcaaacaattgagacagatgcgtacagtttgacttaagtgcaattccctgattagattgtttagcacattcacacaactgcaaagcccataagaacatttctttttcttgatagatgcttcgaacatgccatatatgcaatgaagtatataattcttatatctccaagtcatcaaggagagttgttgtaggtattgtttttttttacctgtactacaaatttacatatcctcatctagatgaaaaactccaaatctcgcatgtaggcctgtaaacattatgcaagggtcatcaatgcaaaattgtggataaaatagaaatcttatgacgattcaagaactatttatcttattgttttaatatttttgaatggctgcttctcctggctcaaacttgttaaatagtttgcagggtgatatctttgtgctcctgtgtttttaaaattaatcgtatagttgatttaataaaataatctgcctgttctcttcagaggctaccatttacaggggcacttattggatgcatggttggtaccatttatgtgtcaatgtttcttcacagctatttcctctcagtgatattctctgtccttcaggtgcgtccttcctctgaataaatctttttgacttgtctttatctttaaattttatagttattctagtctaggggatagtaagcatacttctgtgtctctaagaacaggctactagtggaaatcatgctttaaatggataatattttctccatttcttcaatactttaaatgtttgagttggatggggtgatctatagttctttgatagtatgatgcccatccctcctacctcatcccttcacataaacaatgccatgaagcatataggccatatcttcgtgagtaaccttcatctccttctgttacaggttctatctcttgcttactacaccatatcctactttcctgggggttccagtggattgaaatttatctcctcgagtctcttgtcatcagtaacgagctgttttggccggtaacctgagtaggatgacaactacttgatcatatatccttcatttttcttgcaatatttttgtatgtagcactgatcaacgatagagagattgtgacacccctcctactcatgcttgttgctgtttagactaagatcaatacggggtgaaaaggtttgtcgtacttatgtatctgaaggtcatattgtggaaataaagctgtcctttccttgtgtatgatgttttttttcttaatacgttggtgaaaatgaaaccgctcttctgctagcaccttagtgtaaactctccaactactacctccattttaataattatgtcgtctacctttagataaacgttaatcattcatcttattaaaaaactttgcaagtattaaaggtgttttgagcatgacttacatttttacatatttacactaaacagagggagtagtatctttagcacttcagacctcttcttttttctactaattttcgtctctttagtggggtatgtgtattaagagagcatgaagcacacccgcaggtttgctggtgtgtagtggtgtccgtttgtgtgtcttctatatacagagtaatgaaaaacataagcttgtcttaagttttgctcatcccttcccttctctatatgtgtaaaaaaattacttaccttcagcgattctttaagtgacgagggaatgtaacttgaagcgtttttttttttatcaaggtgcatattcggtcatgcattagcacgacttttcattttggactatgttttcttacgctttggactaaattggttatcctagtggcatgtgcattatggaagcaccgtaatgatttcaacagtgcctccccaagcatttctgctattttgcatgctgtggctagaaagggttctgtttggtgtattgctagagcttaagtcactccgtgtcatgttgtgtgatgttcttttgttttggtgattctagaggggccctttgatgactcagctgtacattgtctcttcttcttaatgaaatgaagcgtaactgtattgtgttttcgagaaaaaaaatcccatcactttagacagattgctagttttggtaacaaatcctacataaaagtgaaaaatataagtgttggtccaatatactgctagggcaataaaatctggtctaaattgcaattcatttttgaaagaagtcctacgtcacaaataataaaccttccaaaattatctttatcgtgaatcattaaagtttaagtatgaacccaccccctatgcttcactccttgaatctcaaatctcctctcatctctcgagaaacgggggcgtctagtctagtacgcggacgttcgcgggccactttttctactgccatcaaatttagaaaatccagaaaaaaaataaaaacaaagaaatacaaataacacgggtcactttttaaaaatatgtgtatatttttggcccttatactttgcttgaagtccatttttcaccatgaagcaaaaaaaaaaaggggtcatttttcatctggaactttttaggaccggacatatgcaagatcctgtaactcatttcatggtgattttgattgctatgccaatgtatttcaccaacatgaacttcaaaaacatatggtttatggttatggacctaattaatgtgacatctgcatcaacagaaaacacacaataagagtatcaaccaggaaaacacctctgttttaaacaaaacaattaccgatgttttgctttggaccaccttttattaccgatgtttcgctttggaccaccttaggactaatgttttcactttggactgggtattttttcctttatttcactttggaccacccttgctcttttatccatctacatccaacttgtaatatgtcgaagaaatagtcttacatatagctgtggcagttcattgacgagtaggagacgatgtaatcgagatcgttcatatgcttgagaagagagtcgggtggtccaaagtaaaacaaaggcaggtttacccagtccaaagtgaaaatattgcttaaagggtggtccaaaatgtaacatcggtaataaaaggtggcccgaagtgaaatttactattaaaaatatgtcgtaggttgtttctgtttggttttgaaagcttaaggtgaaaaataacaactttctaatcatagagtgaaaaacagactccgagtaaagttcatgggctaaaaatgtattttcggccttttgagcttcaataaaaaaattaaagttgagaaagatggatttttttcctagaaaaaataatcttgccaaaaatttaatattttttaaatgaaattgatccattgtatttttgttaataatatatatatatatatatatatttttgttaataatatatatatatatatatatatatatatatatatatatatatttcttgatttttctgtgaaaaatggagcatgtttgtatagtacaaggttaataccttgagtgatcttttgtaagaaaaaaaagaaaacttttccattttctttagctatgatattttttttgagattgttcttgatacataaatttattaaagcgttttacaaattgtgcaagcacaaaacccttccggttgtgttcgatagtagtggattaagagaaagtctcttttttcacgcgcacatcaccgaactactaaacggtattttttttaaaaaaaatatgtatgaaagttgctttaaaaaattatattaatctttttaagtattaaaataattaatactcaattaatcattaattaatggctaatatcattttccttatattttccatactctcatacacaccataaattccaatctaaatgagaactttagcatatgaaacatacggtcatatatagcatcatgccacatctagatttgaaaggacaacaagaactaaatggaaagtgttaagctctcaaagaggtatgcgccttcattcattacaagttttgtgtggtgatagatgatactacaatctacgttattcagttccttttgatttactacaatatttagcatcaaatatatcacaaacctacatatataaataagctataatattgcaaaactacatgtttagtcgcaaatttatctttaaaacaacatattttagagatgaaaaacaaagcatatatcttcaatgttgtggattcagtgaaaacctgtagttttggtgtattggcactcaaatctatgcttatgtgacaattctttgaaaatacggtagttctgtcaaatttaattaaaagagttttttttcagaaaaatagatgttatggttgaagctacagaaacaccagatattttgacttgacatataacccctgatgttgaggtcccaacttttttctctaaaatatcttatatgtattaatttaaattccaaacaatacggcatgctggtagatatttacttaatctttcatgtcaataaagtgtatatggaattttgaagtagatatttacttaaggaacggatttattaaaaaaatgtgaacgcctggtgttgaagcatcaacaacagatatacagtgacatctgctgcaactgtcactcactcccatatactgtacaattggttggttgttaaaacttagacagttgctgatgcactaacaatgcatgattatcacaactcataagcgcatcattgtacacatatacagatggaagttttggcttgactgcactcgcagaaaacaactacgattaataagctaaataaaggaaacaattaagagcgagctggttaattgctctccaacattatggccatgccgatatggctcatcctgctggcctccctcggcgccgtccatgtcgccgccgacgtcctccgactcgtcgccaccctcacgttcggcctgcgcgcccgtcccaggggggacctccgccgccggtacggctcgtgggccgtcgtcaccgggccgacgtcaggcatcggccgtgccatggcgctggagctcgcggggcgcggcctcaacgtcgtcctcgtcggccgtgaccccgccaagctccgcgacgtcgccggcgccatcgcccgggtccacttccaccacggcgtgcgcaccaagaccgtggtctttgacttctccctcgtctccaccgtgcaaggttgatggggtacacacttgtgtttttccagcaaaatttcagaaatctctgtacattttttgtccaaaattatttgaaaatttaacaaatttttaatgaatttaaataaaatttgaccaaatttacaataatttgaaaaacaccgaaaatttcggatatgtacttgccagtagggggcgaaattttgaaaaatttgtttcgaagtaggggcagatatagctaggtaggagaggtggggggccaggttgctcagtaacccggtcaagaaattttttttagctatagttcatctatttttatcatatgtgtaccctcaatccaaactcagacactcgtatcagtcaaaatttggtctaaagtagagtaaagcaagcgagtggcacctctctccatttcgttttagctccacccttgtttcaaagtataacataagttaatatttgtggttgcgttcatggtgtgtcatagactcatggttcatgagatccatcgtcttctccatatccggtgcgcaggtgagaaggcgatggcggcgctaagggagacggtggaggggctggacgttggggtggtggtgaacaatgccggcgtggcaaagcccggcgcgatgttcctgcatgaggtggaggtggagccattaatgaggatgatacgggtgaacatgctagccctaacgaaggtgacggcggcggtgctgccggggatggtgatgaggggcaggggtgctgtcgtcaacatcggctcggcgtcagcggaggctctcccctccttcccgctctactccgtctacgccggcaccaaagcgtacgtacccacacatgcatattcgcgttcttttcttgttaattgatactaaaggattgtttggttcaattcttgttgaatcagatatgttggtgagttctcaagaggcctctccgtggagtacaagagaaagggaatcgatgtgcaatgccaggttagcattaggacatggattttcatttctcgagtgaatatttttttctcgcatgtcacatatcaatagtcatcctagatcttgtttaattttacgcaatctaaccagctgtggctacctgaaaaaaagtgcctatataaagtgatacaacctaaagatcaatgaaactaaattaactaagctagacccaatgaacaatactattatgacttttcttcccctatctcctgcaggtgccatgcctggtggagacgaacatgatatcgagagccatgaaggatatctttctgtcgcagttcgtggtgaccccggaggagtacgcccgtgcggcggtgcggtcgatcggccacgggcggatgtgcgtgcccaacatggcgcaccgagtgcagctcctggggatgagatccaccccggatttcgtgttgaactggtaccgcctgcggctccacttgcagcagcgagccatctttcgaagccgcaggtgtcatcggatcgcgctcctctgacgtaaagtcagagggacgtgggtcactg

SEQ ID NO: 10215 - DNA, 33354 bp, Oryza sativa
aaaaaaatgtcttgatttgcacacctcagagtcctgcagaacaaaaatgagtagaggtgccatatccatttggttaaatgttccatttggggggaattccacctttctggttctgttttgataaccaatgtggaacaaaacacatcctgttgattccattagatatattgcataatcaactctttatatttgttgattcgatatgcataggaaagaaaagtgtcatgcttttgcctacttgctacttttgtcctttgtctttgctcatgtgtgagaaattccagatatccaatatatgttgctgctccctggtccccagggtgctgtgccccctttctcatattgtgattagattgtttccattcaccggatgacaatggcagtcttggcatgtgaatgatgtcctatgcaataatggtgctttggtctctcatgggcattgattccatgcgcagtttgtgaaatattattgcacataatgttactaacttgccttgttatatggtattactggccacacaaaatggacatacaagtttctttcaagtttcaactcctaatcggccatctcaaggaacattttattgtgattatgccgtacattttctattgaagcactccatcttttgaatagagaaggaagtgattcttagctttggaaaatagtaatcatgatgccagtgatcagatttaatattttgaactatggctgcaggtcaagaaagtaatttcttcccattgacctaattgtaaacttactattcaaatccaattccagttccatattgctttgtgactgagcacacctgggttttcactcctaacaggtcgagcactggaggagctgaggggttcactctacaatgaatttcatacttcagaaggggccaagcgccagcagcagaggttttgcggaccaagtgttgcactgacattcaacttttttgttgctgtcgggatcatcatggcaaacaaaatggtctggatcatcttttcacctattctataattctcactacacttagtttttttttcttcacatggcatctcttgtctgtctggcaggtcatgggtgctgttgggtttaacttcccagttgcactatccttaattcattacatagctgcttgggtcctgatggcagtcctcaaggcattttacttgctgcccatagctcctccttcaaaatccactcctttttcctcattatttgctttgggtgctgtcatgtctttttccactggcctagctaacatcagtttgaagcataataggtgagattgctgatttgatttctccatttaacaaatgaaaaggcatatatgcactatagggatgtgctcaatattctgtgtcttcagtgtaggattttatcaaatggctaagatagctgtaaccccaacaattgtagcagcagagtttattcttttcaagaaaaaagtttcccttcgaaaggtatatttgctagagcttagaaactataagcttcatatgctgttcagtattcagttgatctaattgttctcacaatatttaaggctagttcaagtgtcaaataattcaaataagagttgttctaatcgttcgcaggttatcacattggctgtcgtgtcatgtggtgtggctgtagcaaccgttactgatttagagttcaacctttttggtgcttgtgtagcggtagcttggattattcctagcgctgtaaacaagatcttgtggtcaaatttacaacagagtggaaactggactgctcttgcgtaagttgtgatttttgtctgtttcggcaaaaacatattgcatatatccttttctcctaacattcaggttcttttatcaggttgatgtggaagacaaccccaataactgtgtttttctttcttgttttgatgccattattggatcctccgggcttgttgtctttcaactggaatatccagaacagcagtgcaatcatgatatctgctttgtttggttttcttcttcagtggtctggtgctttggcacttgggtgaggcatattatttctatcacatgattgttcttatgttctattggcacactttttaaacgtgagatgaaactgagagaaatacagctctgccaaagcttgttagtagtttatggctttatgctctgaaactttttaactcgcttgctggtgctatttgcagctagccaacaatatcttatatttcaaatgaaaaaatgttcatgcatgcctattgcctagatcattagacatggtagcatcacattcttcatgtcaaatagactcataaaattgaactgcaaggatttgcagtatgcctctaattatctgtttgtaacttcatgttacaactgatgattatagctgataggcacttaggcagtatgttgacatatagaatgtcaactgacaacagaatgcctatgtcaggttaacatcagcagctttgcaaaactcacccaaatttgatcccgaaaaatataggacattgttccgtccatttattggaaaaatgtagtttttatcacttatcctagtttgcgaaacctgtggaatgaacttaactatttcactggattttgtgtgatgcagcgcaacctctgctcttgctcatgttgtgctaggccaattcaagactattgtcataatgctctctagttacttggtatttaactctgatcctggattcaccagtctttgcggagctataattgctcttggaggcatgtcagtctacacttacctagggctgaaagaatctgccagtggtggtaagagagctccttcaacatccaggcaaaactctcatttgctgaagtccaaggttattgtagatggagaaaagccagaaacaaggcctattgattctgtttaagttgaagaattgccatttattcttgtatttttgaaaatccactagaagcattaggtgattgcatttgttgaatatttgttgtcaaccagttcaaccgacctctgagtcgcatttgttggttcttgctagctatgattcttgttttaggcgattttggtcagctattgtttgtagctgaccatgtccgttgtatatatagacacatattatttttccagtgttaagcaattttgctctactatactagcgtttgcgatgtcacttgggtcgtggaattttctttttgtgaatttggagaatgtatgatctgttgccctgattgaatttcatttcgttcaggctatacactgaattgttcttggctgtgtacatccgattggatgtagaggccgggtttatcccattttctaaaaaaaaaacactgaattgttctaactcactgtgttgctcttcaaggagactctcgtgctcatactcacaacatcatatatgctagggaaaatgtacttcaaaatgacctagaaaaatgtacagagcatggcatgctcctagctgttgtgagtggcaccagcaaagaatagtgttcaaatgcagcataaacgttcaaactccatttaaagatagatcaaattaatccacagaaaaaaaaaacggatctccagaatttaccgaagtgaactggcatgctcgagcatatctgatgagaaaggatataaaggacaggtcgagaaaaagttcagattttcattttgaaccagaaaaaacaaagtctgaagcatttcggtttgctcatatcctgagcacttggaacagcagcatcaagatacgagatattccagcaatgtttccttgtagaacctgacattaagcgctcacaacagcaatttcgctccaaaaaccggtaacgtgacaaaggcacgtcctgactaaataaataatacaagttctgaaagacaactgaaacatgcaaaatgatatcgagtgatctgaacatatgaaaactataagctctgaatacaatttaaatttttaaaaaaggaatatattcaggatgctgatgtttccagatggacaaaacgagatcatagagaaaagttttacatttgaatgtacaaagcaaaactagcctaatatatccaaatcctggatacaccaagcagaagaactagccaaatatatagcgatccgggaactgatgatgcatctgcattatcttaggttttgatgtaactgtccagattccgaaaaatgcaatgtcatcaaaccttttcaccaagaaatgatcttgttgacagaaacccttcgaatgtttattacaatgccactggcaatgaatggaaaaaggaacagtgaaaactgaaaaggggctactttgcagtgataggttatgcattttgcttaactcttacaatttgttgtaaagctgccagccaatatccaaccttaatgacaaaccagtcgcaatgtcctgtttcattcttacagttgcttcagagacattcagtatatagattgattgatgctaatatattggcgccgatatattctctcatttagcatttggttactagctttttaccatgagaatagtgaggaagactggaggaattaccaatctttgatttaaaggagaataaggactttaactcattaccccgagtcgatcgccttttaatatcacggtagaaattgcaactgatgttgtttgaggaatgcgaggaacacatgcaaattagttcattcctatggtgacagataaactgtcagtacatacaggtacaacaatgctgttatcctagttttcctatgaatgaatgcatcaatagctattcagcttatcatttgacctgcattaaggactgtaggtttctgctgggaagaaaaagtctagatggttaatcttaaactcaattgtcacttttccatgtatcgttagatttggcttctaatttagttatctagtttccaatcgtttctatttgtgtatcttccaaatggacatagtcacataggcatgttcaaacatacatcaagagcacaatagcaaatgaactgacacacctggtgttttgcaccttggatccttatctctgtcattccactgaatcatacacatagatggctgatatttttcaagctgatttgcacagatattggattggcatcctgatattctgcaggtatttcatcaaacatcataatcaaaatttccccagtagcacttctgaacaccacctgtgcatttccatagggtcacttcattgaactctgacagctcctcatgggcctcctttcatcagaaaataactgggtgattcctggtaggcattccacctcaaatatcagcttgagcccagacatcacttgctgccacaataatagcactgtgcatcagcatcaggatcgtgaaataaggcaatgtagcagtctagcactgcctgcaaatgagttttcactaacaacgaggtcacagaatcttgctatgaatgagctatgcccatattgaagaactgctttccatgccccaatgaaacgctagttaaagagccagtgtgtcaacattacctgcagtaatagaaagaaaattagtaagaggaaaagccctgaaagtacacaaacgcataaacatcatcaacccacaagaacatggcatttggcaccttaatacctgacttaaggcatcagtgcagatgaaatgccatcactagctggcaataatgaatccgctgaattgctttgctgccacacaagttttccaaaatatatattactttctggttttgacagaatatcccatttctcccttcatatacctgccgagaaatgacttatctatgcacaatgtttcgcccctctccactaggtggatatgtccttttttttcccgtaaaagaaaagattaggtgggctaatattagttaatattggccactcccagaaaaaaaaagtatattcccctatttccctattacctaggtaaataaattccattccaaatagtagcctacaaattgtcaactgagaaataactacctctctcacagttcagatttgaaccaggtcatattttgtttggtttgctaccctatcagattttggggttggatttggtgttaccaaaatttgataatagaagtatttgaggcatgtttggtctgttattttaccaaaatctgctaacagaaatggcagcaaacctcacaggctcagaatgctccctagaaaacaattctacacgatgactctatacaagaatgaaacgcaaatctgctttacaggttgtttaaatgtcacaatagtggcacaatgaatcatgctattacacaggtggagctcctgattgcgtagcagaaggttgatccgaagctcctgtttcaatctgatcccacatcttaaggcatggcatccatttctttcccttctctttcactaacaatgcgacctcatcaaatgacagcaatacatgaatgacgatgtagataaacacggcgatgacaagtgcaaaaatgtatgcagatgtcttgaacttcctgcagctgccggctgcatatgccccaaggagaccaagcaagtctaataccattgctgtcttcatggcaaggagtgatctcttgtacttgcttattgtgttgttcagaaggaggatgaccatgaccgttgaggccatgaatgctgttgcattgcaatagaagaataccttgtaccttataggatgggtaaccttgaggattgggtctcccgcataatggttgccttggtcactaggccaaagcccacctggagggagtagcccagcttggtatgtgacagtgactgcaagagttccaatcagcatcaaatctttgcgccatttgtgttctgttcgtttcttatcagtgcttccagttggaccagtcagagtcatggatctttgctggctctcaaaaccagaacggcgcttcttcagtaagtccactttttgttctgcaacttgtagaaccaggatttgaatcatgacatatgcaaatactgcagcgacgacaagaatgacgtagatagatgtcgacactctcctgcagcttccagcagcaaaagcacccatgagactaatcaaatcaaccagcacgcaagcgcgcaaagcataggacttcagacccttgtcacacagcctcttgttaacaagcaacagaatcactgccagagatgccatgaaagcagtggcgttgaagtagaagaaaatcctgtaacggcctggaaactcatcatggagcactggatcgcctgctcggtgacgatcgttgtcactccagaagccacctggtgggcttagaccagattgatatgtgatggaagccgctagaatcgcaagcatcatcagaaacttgcgccgcttctccaaatctttttcttcattttgcagctccaccgaatcacttcgtccatcatcactccccccttcagttcttctgaaacaaaatctcgtaaaacgatggaataagtttggcacatgttcaatttttgtcttcagttgagtcttgagagccatggacagcagaacatgaagcgtgaaataagtgaaaacaacaaggaccaagatgaacacatacactgacgttgagaactttctgctactcccagcagcataggcccccataagaccaaaaaggtctaatgccatggctgtttgcaatatgtgacgcttcatggcaccaacagtaatcagttgactctgaagtaagatgatgatcaccaaagatgccacaaacgcggtagcattgcaatagaagaatgccttgtagcgcttgggattgatggcctccaagattgggtcaccagcagtatgtccattattatcttgccaaaagccacctggtggatttagcccagcttggtatgtgacagtggcagcaaggataccaagcaacagaagatatgtgcgcaacttctcaacatcatccttagcagtatcggaagtgcctgaccttctgttgttcactggattttgtgctctgggagtagagcgcgattcttcagtaggattcctagtcccccgcatgatgaaagaacccagcttctgaagtaaatgggtcttcttttttcccacccattccatggaactctttatgcaaggtattggcaccatatgctcgatccactgaatacagaggtagaggaaaacagcaccaacaagggcaaagacatatatagatgtatggacttccctgcaactcccagcagcataggcacccataagcccaaagaggctcaccaacacacacaaccgcagagcatttgacttgacaacatgatccactgctgtattgctgagcagcatgatgatgatgacaagtgatccagcaaatgcagtggcattgcagaccaagaacgccttgaaccggcgcgggtagtgatctcgcagcaccgggtcaccggcaagatggctaggcttgttgtcatcaggccagaatccacctggtgggtttagccccgcagtgtatgtcaccgttgcagccaatgtggcaagaaccagcaagaagctgcgattctgttccagacgtttcgtcttttcagaatccccagtttctcccgtcttatcggttcctccatctccatgtatactccccagaatctccttccagtgtttccgaatcgtgtagaatatttcacacagccattgaggtgccagatgccggaagaatacgacatggagagtgatatatgcaaagatgccaacaagcaaagcccagatgtagacggaggtcctcacctccctgcagctgccggcagcgtaggcacccatgaggccgagcaagccgagcaccatggcgaactggagggaccggagccaaatggcgtcgcggctcagctccttgacgaggagcagtatgaggacgatgagggacgccccgaacgccgtggtgttgcagtagaagaagacgaggtacctcctcgggtagctgtacctgagcaccacgtcgccggcgtggtagccgtgctggtcctgctgccagaagccgccggggggccctagcccggcttggaaggtgatggccgctgctaggatggcaagcagcaccaggtacttcctcagcttccacaggagatcggcctcggagcccgcgtcgcacggattctgctcggtttggccttgctgcgtcgcttgtgccgaattagcagtagcagcagaagcgttggcaggagcatggccattgctcctgccattgcttgggttctctacagagctcatggagttgagctcaaagattccaagaaaatcttgggttttcctctgaagattgtagcattggatggcttgaagtcgtgcagatggagagatgaacttaactactgatggtttgcaagaagatggagatgagctgctatatgagcaggggtttgggtctttggatacacctccactagatagaagagtgaggtacaacaaacgataaaaaatgaaaaaggaacaaatccaagtcaacggctgtgattagttcagcgcaaagtttggattttggttgaaattggagatgatgtgactgaaaagttgtgtgtgtatgacaggttgatgtgatggaaaaggactgaagtttggatccgaactttggatctaaacacagccaacattgggttctcacttctcagccgtggaccagctcaaactggcagaaattattaatgtgtttggataatgagttaggctgtgtttagttcagcgcaaagtttggattttggttgaaattggagatgatgtgactgaaaagttgtgtgtgtatgacaggttgatgtgatggaaaagtactgaagtttggatccaaactttggatctaaacacagcgttaggagaggtgggattgggaaatggaaatgaatggatggattggatgaaatggagtgagaaaaatgtatggctaggattgaagcttaccctttaaggggtgggaaatcatatcccaaacccattatccagacatggcctattagtatgttgttatgtcattagccgtcgattaaatcacagtaattttactcagtgcagtctcatataaattgaagtcagtttggtggatcatgcaaacaggtctgaatctaatgtgtgcattagttcaaattcagaaaaaaaattctacatttcaacccagtctcaggagataatttggcaaattatgcacttcaacacggaaaattttccaaacaaaagagcaatataagagtcagtcaagtctacatactttattcaggaggcagtgtcttcgttgcttcttagtgactggactcctagttcgtctgctttctgccccctctttcttcctcctttccaattccccttttcactaaacttttaagaatatactaaaagttttcttttcatcattcagatttcttaattgtgactagtgagacttgatcagtactcagtagtatactttagttccaatactgcaacagctatgtgaacaaggaggcttctctttgttttaccagttgacttgacttggggacttttccttgatttctgtcgtgggggccatttcttcagcacacagacgattctttctaacaaccttttggtttttggcaccactagatgaaacaattatgacacggtttgaaggcccatttctgtctaaacaataattaatctgctcccatctaccattggttaggcaactagcttatctccatgagtaacaggaaagcagtttactataacaagtgtcttacagaaatacaacaaacacgccactctgatccgttgctcgattctttaattatttcagtataggtctttagagtgcaatccaagtcatgccgattttttgtatgtgccaaatacatttgcacgagttgccaatccccccttctctttagtccaaagaaaccccaagttgcattattgcataataagttaatactaattgcaatacgagattagaatagggacagtgacctgtttgttttatagtcagggctaacaacccacagttgccactagaaagcaaccttgcgtcgaagactttggcacctaagtcttccacctaaggccctaacatgaaaaataaaagcataaattggtttaaacctttttgaatccaattcttttgctaatctatgaccacgaaagaaccagagaaccctcccaaagttaccaaatgatataaaacaagtcctagtatatacaagcaacgaagcatcacagcagcacaagacgcaattcagcaaagagacgagcagctgggggtgggtggggaggcacgcatagcatacctggcgccttcttgaactgtgaaatgcatcagccaggccagcagcactctgcaggtcccagcgcttgcgccacgacggcccatggtggtcggcgtggcacctcggggctgggccgagaaagccacgccatcgccatgagcgtggggaaaaggcgccggcccatccccttgcacgcatttcgtcgaacacctaccgggtggaccgggggcaccgggcattttcgtcgagcacggagacccccggcgctcccctcggcaagcgcgcagctctcgccgagctgagcagcagccgcgccgcgccgcgcgctcggctcaatgccgcccgccaccgcgcctccgtacggtcgaccgcctcccaccgccaccgtgcgtgtgcgccgcgccgcgcgcgagatattagcgtcacatgacggcagcagttttgcgtcgcgagattagtagtattgatagcatgcatagcagcagtgtgccgcggcccgccgccctggcaaacaactgaatttctttaaaataagaggaaataactggcagtttgaatagctggaaatcgcgaatctcaaataagaggcaataagaaattgaatttgcaaacgaattcagatcaacaacataaacaaccgttgaaatcacttctttaagaaatcgatttaaattatatggatcgatatgtatttaagtaaagttgttagtaaaaaaaatgggtactaggattttaggccaccactgtcttctctttttctctatggctcttcttttctccaacaaaattaacttttggatactcatggcacactttttaaactgcaaaacgatgcgtttcgtgcgaaaactttctatatgaaagttgttctaaaatatcagattaatccatttttcaagtttataataattaaaacctaattaatcacacgttattaccacatcgttttgcataaaaaacttaatcttcatcttcatctgaagatctcttcaggacattcaaacactctttttgcctcaacattgctcctttcaacctctcgacccaccctacctacgcctgccacctttctctcaaaagatcacacccaatggcgtccatagctacgagaacgagttatcccttcttcttgccctctctcaattctcctcctcttcgctctttatttattttaatctttcgtggatctaggaatggcaaaagtcaggtatggcttgagcagatccaggtagctgaggtactgaggaggtgggaggacagaagcgaggctgagctcaacaatggcgaactcatttgttgttgtatctttgacccatgttcttccccagtttatggctcaatttgtgaggtgtgtgaattttgaactggcgttagagacggtttacttatcacgactgctgttgatgtctccaaatacatctccacatgcgaccgctgtcttgtttgtaaaaatgcaacatttctatgtttgttcgttaggaggcagttggttttctcgcatatgcaaacaccattaactatatgtaaaatttgttttttagtgcaaaggaataagtaaaactaagagtttgaaaggatttgctaaaatttcaggaattgtccaaaaatataacctaacttttcgttaatatgataaccatttacatttatggttatgaagataattattaacaccattaccatagaagttgatggttatgaatctttttccgaagaaatacatccaacctgtggaaataggtgaatggtgaaaacttttttgtgctatcactattacagtatagattttcctggatgttgccccccttttatttccatacggtaagtggaaccgcatgggaaaataaagggaccggcaccgggttgttatctgcacgggaaaatgcattttcccttgcatgcgtcttaatccgaccgcacgggataatcctcgttatcccgtacggtcaacttaagaggaccgcacggaaaaaaacgattttcgtatacgggctttttaagtggaccgcacaggaaaatacctcccttctttccctcccacccacttcaaatttttgacatcctctctcttccttttttccccttttatcctccctcaaccactcccctctctctctctaccttatctcttcccggcttcccacctcctccccaccttaactcctaccggcttcccctcctcctccccctcccctccttcgtcaaagcgggcgtcggcggtggccccttccgtgcacgcagcgaggcagaggcgtcgtcagccattcgttgtgcatgtcgtcaaggcagcggcggcgagcggggcggtggcgagtggggcggcggcaagcgggcagaacctcctcctggtcattgtcctcgtcatgcacgtcgtcgctcggctccctcgacgatgacgctgtcgtcgcgtgcgtcgtcaaggcagcggcggcgagcgggcggcccccgcccagatccggcggcggcgggcgagcttgacggtgatgacggtggcagactcagcggcggctgggggcgtgcggtccggcaggcggcgacgattttcacgttttttttatttttggtttttttttgctccgtgtgggcggtataatttgaccacacgggataacgtgcggttgggccaccgcacgtgaaaatattcatttttctagacccctggtttcagacgggaaaacctccacacggaaaaaatcaatttgaccgcacggaaaaatctatcctgtagtagtgtatatatagatattctgaaattgagtacccgtatatccgtatatgctatcgttctgatttcttttatttacgtgccaaacatatttgaaagagttgccccatcccttttcttaatttattccaattttagaaatcctaattgcattattgaataataagctaataccaattgcacacgagactaatagagggacaaatagcagaaggccaacgacccaaagtagcaactaacctttgcatcaaagactttgccacctaagtcttccattatatccctaaggcggctaggctctaacacgaaatgaaaacaccaattgcttaaagcttttgattctcattttttttctataatttatgaccacacagagaatttttttcgataatttatgaccacacataggaaaacaagtaatttcccacaatttgccaaatgaaagtatttcttttcctgtacaagcaggcaaccttcacagatcaaattaaacgcagttaatctagacggtctagaccatggtctagacgaacactgtgttaacagcgtcttgatcatgacggtggatgatccacaacgcgctcgtccaggcagcggaagagggtctacatcagttgcggcggatctagggcgagccggcctgttcatggcgatggatcctggttgagctcgttcactgcggcggcgagttgatctagatgagcgtgtccactatgccactatggtgagaggcagatccagacaagctagtccacggtggtggtgatggttctagggtgggctaggctgctaggttttatgttgttttttaaggttttgaaatgattatcgcaagtggtcctattaaggaaccacatgtgataatcattttaatcattttcaattatcggtaggactgtcaacaagccaagctcgatacaagctcgagctgagcctataaaatattcagctcgagctcgactaccgagcttcatttttaattagaacaatgtatattttaaaagataatcttttaaaaataattaatttatggtttatcatattcatagaagaggaaaaagaataaaataaatatatgatgcaaatacaaggcatacaaataacatatttaatctattaatttattaaatagcaaccagaaatcatatattactaggctcattagaagctcgacctcgactcgacaaagctcgatcgcgagctttgggacaggctcgggctcgactcatttggagctcaagccgagctcgaatcaagcctaggacgagtcaagctcgagcagttcgcgagccttgagcttttttgacagccctaattgacgatagattctcagcatgtgggaatacaatgttttcctaggtgttttgttagaggcgaggatgccacccgcctctacaaataaattttatccacccacagaaacattttccctagtagtacttggaggcaacacatactagcattcaatttggttgaaagtcctctcctggttccctttgaattttagtttttaaattttagcgattttagttaaatgatacgtagtcacgtcccgatagttacaaattttcatctgggaagaataataggtggcatggcatataggagcagaatttaggtctgcgtggttgcattgtgtctccctcattgagcgccttcagctagatacagggctgtacctaattaatacagatatgaaataaaataccctctccttatttatatgaaaatttgcatgtgtaaatcgattaagtacatgtttgagattagtataaactgaattgaactggtaactctcatcctcaaaacaaccttattcaaagtttaattagttagaaggacttagcactttaaatcttcagccaccccaccacaaactagccatgattactgtcattttggagtttccattccattacctttgtcttttctttgttaatgacaacttttatggattgctggtggcttacgtcagcacaattggggtcatccatattctcacatccatgaactttagtatggctgtcacgcatcagtggcgcggggaatgaaaggtgagaagaaaatataaactatgacgacgcagttaacctacaaccaacgtatcttatgcagcggctataaatcatcggccgggagaccctgacagcatcaactcatccttccattacattttacagtttctaagtttcttacaccgtgcaaattatggagcgcaacgacaatccactgcacgccggctctggccaggccacgacgctcgagggttccgaggggcgggaacccatcatccgtgccgggtttgctcgaaccgacactgataatggcggttctgatgtgctattctgtggtagtgaaatggaccacaacaatctgcagcccgcgggctctggccaggccatgacgacggaagcagacaataaccgtgcgtggcagctgcagaagtacctcatgctgctcactatcctagtggcgaccgtgacttacatagcggggctcaatccaccggggggcgtttggctagagaccaaggatgggcacctcaccggcaatcccatcctgccggacacccaacccacccgacactacgtgttctactacttcaatgcgacggctttcgtggtgtcgctcgtgctaatccccttcctcctccagccctgcgtgaaagcggcggcgcagctgaaggcggtgcgtgtggccatggtgtttgatctggtcctcctcatggtggcctacatcgccgggagctgcccggataggccaaccaccatcttcgcctcgctattgtcggtggttgtttttggatgcgtcgtggttcactggctggtggctccttcttccaagggccagctctggcttgacaaaccaaacaaggtcttgatgctactcgccatcttcgtggtgacggtcacgtatgtggcggggatgaggccgccgggagggacttgggaacatgcccaggaggcagggcgaagcgatgccggtgaacccatctggctagagcgccaccgagggcgcttcatggccttcctcgtctcgaacaccatcgctctcgtcgcatcgcttgccgtcgtcatgctggtcttgagcagcaggctgcggagaaacatgtcgtgccttgcacttcacgtgttcatcatcaccatggctcttctcgggctcttgggggcctacgtctcgggcagctgcacggagtggatcttcaccgtgcaagtcggctgcgtagctggtgctatagctgttatcctcccctgcatttcttgtcttcccattgttgagtgtcttttcggtggattcaagagccaacaccactcgttggcaggagcacccggtcgcagagtgacaatacaaccattggtgccaattgttccagtgggagaaggtgaaccagtaatggcaggaacaccaggtctcccccgaatgacacctacggaatcaacaatggttgtgcatagacagcatagtagtgaagcccatgcgaatccattaaacaatggccgctctatgatacttctactagccacactcacggcaacagtgacataccaggccggcctagagccgcctggtggagtttggcgggacaatgagggtggccacaatggcggtgacctgatactcctcgctactcatgctatccggtacaaggtcttcttctattgcaactcggctgcctttgtggcatccatcattgttgtgatcatattgcagagcaaggatctagtcaaccgatatgcgctccatgccgctataatactggaccttatgggactcatgggtgcctacgctgctggaagctggagagatattggtgcctccctatctatcttcgtcttggttgctgccatcattgtattgttagtagtgacctacattgtgagttgcaagtctctgactcgagggaacaatggaaatgtgtcgttagcggagcagaaaagaaaaagggaattgcagaagaggcaaaagctgttgctcaatcttgcagtactggccatcaccatcacctaccaagctgggctaactccaccgggcggcttctggatcgaacatgccgatgaagaacaccataatggagatccggtccttggtgacaaccaccgtggctggtacacggccttcttcttctgcaacacgacgagcttcatggcgtccgttgtcaccatcgtttccctggtgagccaaagcctctctgagattgatatggcgtactgcaaggcgctctactgctgcgtatttgttgtcttggctggattgacgggtgcctttgcctgcggcacctctcgaaggatgcaagaatccatgtacgtccttggctcggccagcctagggttaactcttgccatcctgtacattcaccgttcccatccaatggtcagaaatggggatggtagtaaccatgccgacgatgatactgagcttgttggcgatgtggtcactaatggccagcacatcacaacacacaagatgtgcaagtacctcatgctgatcagcatcctggcagccaccatcacctaccaggctggccttacaccaccgggcgacgtgtggcccgccgctgacgacggggaggggcacgccgcgggcgacccgatcctccgcgacagcgaccggtggcactaccttgcattcttatacagcaactccgtctccttcgcggcgtccgtccttgtcatcgtgctactactgagggtggtggtggtgcggaagctgagctctttcttgccactgatcacggtggtgcacgcggtggccgtggttgatttgctcgcccttctggcggcctacgcgacggggagcagcagggaccgggggacctccgtctacgtcgtcacggtggccgccacggtgctggtctacgttgcgatatatgctggtctgagttcacgccattgtggcagggaacaggatggcaatggaggggtcggctctcgtccgtcgtcgcaagctgctcgtgtttgacgatttgcatatatgctagatgcatgctggctcggctcgtttagtgctctacgttttccaattatgtgtgcttagatgttgtgctacttgtaagaaataaccatccagccatctgatggaaagtcacatgatatgtattgttgtgcttgctggaaatgtgtgagagtttgtatctcgatgttaactattattagttggagtcttccataggtgattgttagtttgtctcccaaataaatgaaatcagttttcatggaacatgttttagtagcaaatttgtatcaaatcggcggcttcggccacggcggcagcggcgtcctggtttccgggctggaaccttggcgatctctctcctctacctctcttcatacctctagctacctctcctagttctagaagcttccagaacttgtattccctagtttcttcttctctttttcaccccaaaacaatggttgcttgtatggtggatccttgctattgaattggaagaattgggttcctaacaatctggtatcagagtcgttgattcgtgggatttctatcatggagtcgattggagtgcacttcagcaacgcccccatgcgagtggttgcttgatttgggcaagggtggtgctcatgacacccatgttcgatggaatgccaagccagcctgaggtgttcaatgatgatgaaaggatatcagagactgttcccatcaaatccaccatgaagaaggagggaatatccatggacaaagctttagaccggcttcttgagaagtttgagttgatggaggccaaccgtaggcaagaggagaagttcaatcaaatactacataagttgcaagagatagaggcttgtaggagcaaggctgctgttggtatttgatatggttacagatagaatccacaagcgcatggatataccgatgcacttcccctacggagtattccaagggtatcgaatccaagggaatgtgtgtgatcagagcttcctccggttcatccaaagacaccaagaaaacgataggccaggatagagaggatttactagtgagaaatagtgtccagggaatcctaacgcaatacttcaggcactagcaacccgctgttcccagatgttgctctactacgtacccagacagggaggacttcagtgatctcgagggctgtcaccacctctacacacacctcaaacgtactgtgggatacgcagcaattactggataataattacctaaacaccacgtctaagcaattaatatctactttagtgtttataactcaccaaagcaatcaatatattttagttgattatagtgaacaataatcccgtacgctaattaggaactaaccaagagataattctcacaaggtaaatctaaattactccagaagaatattatattgaattcagagtaataaacagaataaaagaaataggagaagattactgacaactccggaattcttctgactccttctactccactctcttcctattctagtatacaatatagtacaatagagcctcttataattcagctcaagcttggaagtgtgtgtgtgtaaagtgagggagtgatgtctttatataggggtaggtatgatcgttggcgaaggggaaatgtccaaaatgccccgcaaccgccatcaggagatgatcaggaccgtccacgccaaaccccagcctggatggctgagattgtggttcggctgaaccagatggttcggccgaacctgggctgggcccatctggcctggctcttggcccatcttctcccatggacctcctctatccatttctcggagttttgggtttatttactggtatttggatgaagttcacaacccctccttgtatggatagatgattctcctcattgtagtctgattttcctcccaacatcggggtttattgtctgcatacaaatatataccaacacttgtggaatatgtgagattaagcacctatctctatgttggatgttttattatctgatctttatgcagatgttggcggtatagaatcgacatttaacagccgccaacaaaaccccccacacttagccctttgctcgtccctgagtaaaggttagtgtagaatgaatttcttcaagatatgaatcaagcatataaatcattcacaaccatacctgtacctgtgaattttatctgtggctatcttaccatcttgagtaattgataaatggaatgatcttgattccagtccttcttgattctctgccagactcaagggatttttatgaattttcgcaaactagctcttttcctcatattgactttctctcttgtctctcgaagatgtatattttctttggatcctcaccaaggcaaaatgtgccagaacttatccctattctaaggctaatatgtggagtttggtagggataaatcgggacatacctgcattatatatattgcaaagccaaagatatggactcaagaggatcatcagtcatactcctagatcaagggtctttatttgtggtggaaaatggaaaagtaaaatattttgtggaatgatgaattgaagaaatgattctccctttttcctatactttctctccaattgattctcttggcatgattgtggaagggacatggctatattttatatttttttctgcttttctcaatgtttgagagcaagctttatttccgtcttctcttttttatatatatatagccatgcctttccctccttttctcattttcttttggccaagagcttttccaggagaagaaagcatagttcaacacaggagtttatttgaatggatatttttgtggaaagccaacttccagtgtagaagcttagcttaattttatatgtggaaatgaaagtggaattgaccccttgatcataagagtatgaaggatatctaacaccagtcgcacaaatttgacaaagctcaatataatgtcaagcagtcatatgcattataaggttgatcattaatgtacttgcatatggccttggtaggtataaggtaaagtcatttggaggattgagcctttagaaacaattttattttgaaaacaaattcccaagagtcatgacaagagttgcaagaattcctttcatcttaatcatctcacataaaagaatcacttagatgtataaggttccctaatcatggttggttgttcacaagcacaagttcaactgggaataatgaatatacaagatcaatcacatgaagaatttcgttagttggaaattttatctttcacttatgcttgaatcaattgtttctgaattttcagctctagtactataccatggtggagatatacagatacaagacgtgttcacctacttacctgtgaaaattgagagggattggggctagctttggttcggccgaaccactctggtgcccaatttccctgcaattttctgcagagttcagtgcttccaggtgttcagatatttcaacaattttcagggcgtatgcacgtcagaagctgggatatctcccccacacttattcaaaacctgaattttattaaacataaaacaaaaacaaactttggcaaacattggggttaacaccaatgagccacattatttatagctagtgcttacatgattggaaaagataaaaccaagcacctactactattttattcatgggaaaggaaacatctaattagcataatacttattttcctttcccatatctatgaatgcacgcttgatcttagcgcacaaaccgcgactaagggtatcaaaactattcctaagttcagcgagttctacccctagctccgcattatgatccctaagctctatgttctccttgcggagtttcttcacttgagcggcgagcttgtggatcgagggctccggcgatttcacctcatcctcttggaattggccgggagcccttacaattggagggggcgtcaaataacacttcaccttcataggtggagggctacgggattcctctgccccctccttctccaatgccgtcaaaggccggagtaaacccttaccatacccatcgccgggagttcgtactccctgaatgcggaaacgctccccctttggggtggatggagtaacggtgggtgtggtatacttgtggagcacctcatcccctgccttggtgaagagggtacccacatagcgctcggcgggaggcggtgcggccttcccgtcatcttggaaaaggcatcgtgccttcaacaaaccgagctctcccgtagtcggccgtcgtgcaggcgaatccccccggatttttgttcttgtaacatggcaaggggagagggatcacgctaccaaacggggggccgatcggggccgagaagggttcggccgaacccctggttcggccgaactagggagctcgtcgatcggctccaaaattgcaggggagcctggcacagctgcaaggggttgagcccatacagcgttcaccccttccatggtgtagtgttctaccgggatcaattgattcgccggtgtcggctctccggtgaggtcgtatgtggaattggataaagagccggtgaatggaatcaaggatttgctagccattggtgatttggagatgatggagcaagggaattgggttgagatggagagaaaggttgcaaaaatgtgagagagaggaggaagaacaggggctctggtgctagtacgactgatctacctctgaactcgcatctaaacagactcaggacgagcgggggagactaccattcaaatccggggccgaaccatgaggttcggccgaaccctagtgagtccggcaggcccccaattttctgcctagtcccactaaaacttattctaagcacaaaaatgacaactatatagggttttaagcatgcaatggatgagatcatcatggttcataatcaattaattcaataacgtccacttcttcatctaaagtttcatttagctcaaggaaaatctttaggcgttgaccgtttaccttaaatatgtttcctgattcattgtggagtgtgattgccccgtgcgaagaggtgtcgatgacgtcgaacggtccttcccatttgctgcgcagttttccgtggccgaagagcttaaccctagatttgaacatcagtactttgtctcttggcttgaatttcttgatctttattcttttgtcatgccagcgcttcgtcctttctttgtatatctttgcgttgtggtaagccttttctctccattcctcaagttcagcgatctgcatttttctccattctcctgctccctcaaaatccatgttccaattcctaatggcccagtatgctctgtgctcaagttctatagggagtcgacatggcttcccgtaaactatctgatatgggtacattccaatgggtgtcttgtatgctgtccagtatgcccacagtgcgtccggtaatctatccttccatcctgttcccattttgttgaccgtcttttgcagaatattcttgatttgtttgtttgatgtttctgcttgtccactggtctgtggatggtaaggagtggccacattgtgtttggctcccatttctcgtaggaggtctcggaaggttttgtcatgaaataagaacctccgtcacttatgaccattctgggggtaccaaatctagggaagatgatttatgtgaacatcttcttggcatgcctcacatccgcggcgctgcacggcatagcctcaacccacttggagacatagtcaactgccaccagaatgtactcacagccgcgagacttagggaaaggtcccatgaagtctataccccaaacatcgaatatctcgacttgcaaattgtatgtgaggggcattgcatcgcgagcagtgattcctccttgcctctggcagctggtgcatcttctaacgaattctcttgagtcttcgtacattgttggccagaagaaaccactttgccaaatcttggcctgggtgcggaatgcaccgtaatggccaccatagggtgaggcatggcatcgttctatgatcttgagtccttcagttggcacacatcttcgtagcaggccatcggagcagacccgatataggtatggctcatcccatatgtcacggcgactttcatactttagttttcgttgattttcccctggtggtatgtacttggatactatgtagttcactatgttggcataccatggattggagtcgctaaccgtcatcagcatgtcatctcttaagaaatcattgatcggctgttcctacatgttagtgatctgcagcctggacaaatgatctgctatagaattttctactccctttttatctttaatttctaagtcaaattcttggagcagcaaaatccatcttaagagacgaggtttagcatctttcttagtgagcaggtattttaaagcagtatgatgagtataaattatcaccttggctcctactaagtaagatctaaacttatcgatagcaagaacaaccgcgagcagctctttttcagtagttgcgttattcaactgggctccggttagagttttgctagcgtaacagattgcatgatgctttttatctttggtttggccgaagaccgcaccaacagcgaagtcacttgcatcacacatgatctcgaagggcagagtccaatcaggaggttgaatgattagagcagagacgagtgcctttttgagaatttcaaaagattttaggcacgcgtcatcaaactcaaagggcgcatccttggctagcagattggtcagaggtctggcgattgtagagaagtccttaatgaaccttctataaaagccggcatgacccaagaagctgcggattcctttgatgttcacaggaggaggaagttgatctataacatcgattttagcacgatcaacttcgattcctcgttcggacactcgatgcccaagaactattccttcatggaccataaaatgacacttttcccaattaagcaccaggtctttttcttggcatcgttgtaagactttgtctagattctgcagacaatgaccgaaagtctttccataaactgagaagtcatccatgaagacttccatgatatcttcgatcatgtccgagaaaatagacatcatgcacctttggaacgatgcaggagcactacacagtccgaaggacatcctacagtatgcataggtgccatacggacatgtgaacgtaatcttactctagtcctcctgatggataggaatttgatgatacccggaatacccatcaaggaaacataaaaaggaatgatttgccagccgttccaacatttcatcaatgaagggtagcgggaaatgatccttttttgtagccttgttaagtttcctgtaatcgatgcacatcctccatgcggaattagttcattttgagcatttgtaacgatcgtcattcctcccttcttcggcacaacctggagggagtactctcggggtcaataggaatatgatgggtgcaaagtgcgagattaatccccctaaggtcctggagcgagtagccaagaacagaatgatgcttttccaacacggtaagaaggcgttgagtctcgtcttcagagagcttgtcactgattatgacaggggcttctttgtcattgtgttggaaagcatatcgtaggcctgggggtagaggtttaagctcgagcggaggtcgaggtggtggttccataattggtaggtcgagagtctcaccgggatctgcttcttccttgatgaagtcggggacctcatcttccagaagggcctcgggagactcatgaggaggaactgcagtaacctcttctgctgactcaatttctaggagagtgtcggtcaaggtgatccttgcctgcgagaatggaattgagaattcattctctccccgtgttattttgaggttactaatcggggtgtgttgatgagaagttgctcaatgggcagcccgactaggatatcaaagtattggatttcaaagacgtggaaatccaagatcgcctccctgtcttcaaagcagacaggcacatcttgcacaatcccaaatccttcgatgatatttccgttcggatgcttgaagaatttggttgtcggggtcactaccttatcgcttaaataagcgaatgcaaaagattcagagacgaggttggccccgactgttggactgtagagaatacctacgtcgttcccttccagatggcaaggaatgattcggggagcggtatttatccgaattactttggatgaaagctctgcctcccttagccattcgtcgctcattatggatgtcaactcccggacagtttcttgcaggaacccaagttccataggatcaggaggtgacaaaggaacgggtggttttctcttgctaaaatagttcagggtattgccgtagtcttcgtcaaaaccttccctgaacataattgtggcacaatccggaatctgaatttcttcattctcgacggacggctgctcaggaaccttctcattaatcgagctagtagaagtagatggttcagcaagtggctcgatcgttagaggcacctctatcttggacacggatgcctccagctggggttcattggactgtgtcatgaaggaagtgttttctagaatgtgatccaaaatcgtttttccttctgacggcgttttatgcatgaacgatcctccagcggttatgtccagatagaatgcagactcatccaaacccgtatggaaatgttagagaagcacatactcgggtaaggacagggttggtccggactgcactaagttagtgaatctggaccaagctgcaccgattgattcgtttttgatttgcttgaaaccgagaatttctactcgaagggcagtaatacgagtaactgggaagaaggcaagacaaaatctgtctcgcatcttttcccagctaccgtttacacatccaacggtggaggtgtaccattgctttgctctctcttgaagagagaacggaaacaatttccaccgcacggtttcttgtctcatgccacgaatcttaaggcatgagcagacttgttcaaagtctcgcagatgatggtaaggattctctagatcaaaaccagaaaaaggattttccttaaccatactaattagttcgggacgaatttcatagccagttgtataaatgggctccgatgaaggaggtggctcatagaattcgccccgaggagcagacagctcaaaaagaggttgctccatggtcgagaagagttgacaggaatacttctctaggatagcgggggtgaaggtagaataaaaaaatgaaaaaggatatgaggatgaactgggttcggaaatgatcagcaaccgttccccggcaacggcgccagaaatgcttgttggtatttggtatggttacagatagaatccgtaagcgcacgaatataccaatgtagcacttcccctacggagtattccaacggtatcgaatccaagggaacgtgtgtgatcagagcttcctctggttcatctaaggacaccaagcaaatgataggccaggatagagaggatttactagtgagaaatagtgtccagggaatcctaacgcaatacttcaggcactgtcaacccgctgttcccagatgtcgctctactacgtacccggacagggaggacttcagtgatctcgagggctgtcaccacctttacacccacctcaaatgtattatgggatacgcaacaattactggataataattacctaaacaccacgtctaagcaattaatatctactttagtgtttataactcaccaaagcaatcactatattttagttgattatagtgaacaataatcccgtacgctaattaggaactaaccaagagataattctcacaaggtaaatctaaattgctcaagaagaatattatattgaattcagagtaataaacagaataaaagaaataggagaagattaccgacaactccggaattcttccgactccttctactctactctcttcctattctagtatacaatataatacaatagagcctcttataattcagctcaagcttggaagtgtgtgtgtgaagtgagggagtgatgtctttatataggggtatgtatgacggttggtgaaggggaaatggctgaaatgccccacaaccgccattaggagatgattaggaccgtccatgccaaaccccagcctggatggctgagattgtggttcggccgaacctgggctaggcccatctagcctggctcttggcccatcttctcccctggacctccactatccatttctcggagttttgggttgatttactggtatttggatgaagttcacaacccctccttgtatggatacatgattctcctcactgtagtctgattttcctcccaacatcggggtttattgtctgcatacaaatatataccaacacttgtggaatttgtgagattaatcacatatctctatgttggatgttttattatctgatctttatacagatgttggcggtataaaatcgacatttaacagctgcctacagccgccgaggagatgattgcagccatcagggcaaccaccgctgtcctcaaggctacatcacctacaacacccatggcatcacctcctctagcacctaccaagtgtttgacggaatgccccaacaacaacatcacttgggtggcggcgaattcaaatcacattggtgagatgcttgctccaacagctgcctgggagctaggagacaggaaggacatggaccaagctccctacattgccaccaaggacctccccaaggtcacgcccaccaagtgttcgacgctatgttctagcttcgacaacaagcccgatctcactgtggctgtggtggttacttgtgccacctctgtcaagtcattgatggagttggtagctactgacagcaccaccagcggcacccacatcgacacccctgatagtaccaaggcgatgcccaccaactgtttgatgtttggtatgatggtcaacactggtaccatccagactggggttgtgttcccactctttcttgacaagctggacatcgtcacagtgctaagttagcccacgctagtcagggcacaaaggttgggttttgttttcttccttaaaatgctggcgcccggtgggtgttcgatgaaatgtactagagatgacaagttgctgatggagtatttcaacaaaaatccatggccaccaccttggttaggtggagtgtttagagtatgtgggctgaggcctttaccatggccgggattcaatttttgtaggacagtggaacatctagtgccaccatggccacctcccactaagtaagtgtctttctatggtaatttccaatattgtggtgcttcccactgtgatgatgattttagcattacattgggctggattaaaaccttggcctccaccccatgaagatgacctcacatacattttggtgaatcaaagagaagtggagttatggaggacaattttggttgatcacaataaggaaggattattgatgatcattgagttgtatgtcctagacttaaatgactgctgcttaagttggagtcacttgattcttgcaagtgtgcttgttgtggagctgagcagtactaggcagtgtggttatgagatcatttccttcaaaagcaaccatgttgacaagctgaaattatttggcatgtcaattaatgttttggaacagtgtgaacaccttgaaggggacttgatcagattaatcatcaaagaaaagctgatgccatggaattctggtatggggatctgcttgtgttgtctattggtaatacaacttccagttggcaagctaaaatggaatgtctctgtcatttcattgttccatcttttgattactaaagtcaacgagtttccaagagggatcacaacaggaggtaaatcaacattatggacatcttctgaatgcacttgtgttgggctgcacagaagatacccagtgttattgcctttctggattagcagagcagaaaaatgggttatgagacatattggcatgacaatattagttcctgaatcatggcagcaagcaagttacaaggtcctatatggtgcagagaagttgttaaatttgaatgctgaagataaaagttacacgagggtgaagagctttgaggaaggtgctagttcagttcaatataaggtatgtccttttgggctagttcctgcatcggtggtacttgatgatgtggcgtatactacttcaggaaccacttggcattacaaatgcttgactgataaaatgagaatgccgagagctgaagtgaatcataaaccaatgtggactcgatatttgagcaagcaggggtgtcactctttgcagcataccaaaatgttgagccttaatgttggcaagaagatcaatacattgctcctgctatatgtcacacaagaaagatttaaagggattgagaagttatcagccaggggagccaggggatatatcttattggcttgggacaagccaaatttaaagaagaggggattgtcatgtattgttgggttgatcatgagcttcgtcgactattctccaatccagcccaacaaggcccaactagagaggcaacaaagcagcaccaacaaggtgctaggaagccatcgaacagaacaggcatcggcggcttcggccacggcggcggcggcgtcctagttccgggctggaaccttggcgatctctctctacctctcttcatacctccagctacctatgctagttctagaagcttccagaacttgtattccctagtttcttcttctctttttcaccccaaaacaatggttgcttgtatggtggatccttgctattgaattggaagaattgggttcctaacaatctgtcacatccatcttactttactttcagccttctctagctcttactttccaggagaagattattggtttgtgtgccttatgacagaaggcggagacatgtaaaccatttttattatctaaaaatgcttctaaaaatcgatggtagtgctgggatattgttgcctcttgccattgagaaggattatatctcagttgtacaactactcgctgaaaaggacatcagacctggtattcctggttagagaagcaaaacggctttgttcgatcattaggagaaaggatcccccactcctgacccctatttctcctgattccgacagttcactttcggcgaggtcccgcaggagggatcgccaattcgccatgagaagagagctgatggcccatcctctcgtacttatttcgtcgaacatctttcgtgcattccggtggccggggcatttcatcgagcaccaaagcccccgggactcgatccccacggcaagcgcagctcccgtcgagctgagcagcagccgcgcgctctgctcaatgccgccaccgcgtttccgtacatcttcccacccggccaccaccgctgccacatgatgtttgcgcctcgagatcataccgctaaatgacaacaacagtttgcagtttcgtgcgggttgtggccggccgcgtggcacaatggtgcaaaactggctggtattctatctatttctaattgggaaaatacttatcgtgttgtgctagagttatgagttaatgactacacctattagaggaaggtcaatagtagcgctagctaccggtgacaaaaataccatgtcagcatgttgcagctaataatcaaaactagcccatacagtaagtgagctacactccatctctacatagcttccaatcactatgccggaccatgctagctgtgacgggcctaaaccatcacctctgacggattcagcccctcgacagagattagtggtcagtgatgactctcttcacctttgacgggtaaagggccgtcagtggtgaccagcccctatgacgggccacgtatagaacccgtcacaggtaactattatctcaaacggcccattagtttgtgagccgtcagtgatgtctataatccagcaaaaaaaaagaaaaatagattgcaacccgtcacaggtgtaaaaaaaaccctagcaagaaaattggagcacattgtcaccgcatcaccatcgccaaaacctcaaattgacaatatagcaatcactgacagttcatcatcctccatcaccgcatcaccatctcatatagcaatcattcacaaaaggggatggcaagaatttatcatacaacaatatcatatcattcacaaaaggggcacactggccgacagttcgtcgtcctccatgacgaaccagcgacgtgagatgcaggtggaggcgccaaacaaaaatcaagaaacaagaaaccaccattagagcccacattctcaaaccaaacacctcaaatcaacaacaataacaacaacaacaacaacaacaataacaacaacaagatttaagtaaaaaaataacaacaagaagaaacctcaccagggtggccggtggatagggatggaggaggtggtacctagcattcagatctgcgcatccccggcctcgtggaggtcggatccggcgggtagcgcggttggtggtggaggtgagggaggcgtcagtggcgttggcggccgggaggcagggggaggcgtcggtggaggtggaggcctatgtggcggccggctagcgcgggcggaggcggaggcgtggttggag

SEQ ID NO: 10216 - DNA, 33690 bp, Oryza sativa
  unsure (1)..(33690): unsure at all n locations
tatggaattaactaaaaaaataataaaagtaatcaccttagagcattatgaatgtataggaagtattttaataaatctaaaaataacttatatatatatatacacgtatatatatatatacgtatatatatacgtatatacgtatatatacgatatatatatatacgtatacgtatatatacgtatatatatataccggtatatatatatatatatatatatatatatatatatatatatatatatatgataatttgctcaataaaaaattttttaattaaaggacttttgttttgatataaactacttctataatatatgtgaatgaattttaggctttacttaatttacttttatatgtctaagaagaaacttagtgaaatctaaaagtaagttagacgtatcataaaagtaatttgtgattttttatcaaaatataataatgtgagatcttgttgtaaagatttaattattacgaacacaacggtataatcggattgtaaatcggatgagtaatttaagagaaaattttatttgaagcatagatgatatgaatatttcccctacttgcttaatggattaatagcaatcaaaactcctaaaatactagcacgtgggtgtctctagttaagactaactggagaggcctctccaattagatttaccgatagggaaggttaccagtgcaagaagataaacttgcctgaaaacgaagtgttttaccagtgcaagaggatcaacagtagggatgaaaacggagtgaataatttccatctgctccggataaaaactgatacggatacctttcggatcggatagttcggatatggatagctatacaaatatggatattgtctcccagatacgaatactgatatgttattggggtttctgtcggatacggataataattcggatatccggtgaacagtactattcggatatccgcagaagccatgagtcataccctatttctttctaactctataacctttaatatacctttatagattttaatagtagtttatctcttaacactagtccatacttttagtattatttcaattttaaaaaatatttataaactatacttcatttttatataaaatgagctaattatatatgttgatatttgtttctattagaagttgagttggcatttgtgtcctgagaaaaaaatatttccgtattcgtgtccgatcatattcgattcttatttgcattcaagataatccgtatttgtttccgtattcaagctatccgtattcattttcgtatccggtaaaaaaaatgaaaacaaatatggtatgagcattatccatccgtatccactccgttttcatccctagtcaacagtggtagcgagcttgctactgcagagaagaagatgacttgtttgtttgctgctattagtttaatgatgtgagctagagtaacaaaatctgtgttaaacttgttgtaaccgtgaagcttgatgacacttattattttcctggatgatttttgaacatttggtggtttgccaaggtacctatggtagtataaaaacaattttagcataacttgatcaattaagatggcaactttaaactacacgtacatgtcataccgttgggccttatttgtactcgatctcttagctagctctaaaaagacaatggaaaaggtactaatttcaccatcaaatacacaactaccatgcttgtcaaatcggggccgagtaaccgcaacaagaaacatcaccttctctatgaagtatatgcttttaacccctctttccggtcttggttcaatgttgatgaaatagtatttctagtcctgcattgtcctatagaactatttctcatcaatgtacacaatgttacgcactagcttgaatttaaattaagttcagaaatcaatcatatattgttaaggacgaaactgttgtgatttgattagttctgtaacatggagtattacacatcttgttctcaaatctgaacatgtattgaacattgcctttaacaatataggattgattttagaaattaacttaaattcaatccaatgcacggcaatgtgtacacagataaaaaaaaatagttctacaggacaagacagaactagaaatactattcaccaataatgtcgaaccaagaacggaaagagaggttaagagcaaatacttgatgttcattgttgtggttactcgacccaaatttgacgagcaagtattgacgaaaaatccgtgctcggtcgatggtgccggaactgtgttagcacgaactaagtcgacaacagcaacggcctaggagatctgctttgctccagtgtaggtccaaaaattgataagatacgggtgtgccagccagtttgatcctacaactgacaagatatgtaaacaacagatcaaatagctgattggctgacaagccgacggagtagttccagtcaatgctgatactagccgatgccaatagggttttgagcaatcatttatatgtccaatgtagatacgatataaagacaatcggctgatggtaatgtaacaaaataacaatataatccggtagaaaccaatcagctaatagtgatatgatagaataagcgacctgatccaaaggttaaagcatacatcggctggaggtctgatgtcataaaatccacaagattagataaacattaaaacctttgttgcgattggctcaaaccgacttatatgtaatccttgtaagccgatgcaacgtccatataacttatcggctgaaaccccgatgaaaccgttactataattaaaaacaggttagcctttatgattctaagcacagctaggaatgatgcatcgcggagtatgcaaagaagcataaagtctaaacaatcaagcatttgactaatttttagggtggtgaatatcttagttaatttaatctagctagataatttagccaatactaacatagaccctaaaatgaatctcagctgatatgatcaaattaagattctaaactagattagctaagatatatgataaatatgtagggaaatatatcaaccgaaccgaagcgatccaagagatcgaagcgatgcagccttgaagcacaccaatgtagccgatacaattgtctgggccgatggaacataggacttaccccttcgccggagatcaaaagctaatgcagccccgcgtcaggtgccatcttccactggatgataagtaaaatcctcggaaaagagggtggcgatgcggcgaaagtagttgtattgatatgtaagatagtttacaatgactccatgtgtacatatttatacccatgggtagatacttattggacaagaaagaaactttcctaaaaataaaaggaaactactaaatcctacctaattaatagatagaattatgccgccatgccatagtcttcacgattctttcttaaactcggtctcttctagggaagtttcaatcggctaaatgtgctcttttcttagccgaatccgctaaagaatcttaccaatttttggtgttaacaacaaggtaaatatgtatttgatgggaaaattggtatgttgctctccgtttatgtagaaccagctaacagatcaagcataaacaggtgtcacatcctgatttttgtttcaggatttataaattatttaataaattattattataatttatattaaatgttcattaatttacaagtgaagctaaatgtgggaaataaaatttcctaaatataaagcatggatggatttaatttttattaaattcttcatggttaattatactctctggaattttcttggatttttttcggagctcaattcctaattttaatcttacaaagagcatttcagtaattacccacatattaaattaattattaaatggtctaattataattttttttaagtactttgagtgtccaagtattttcaggatttttcttgaaattatttgagcattggaagtatttttaacaattcaaagatcatttaagtgattattttaattggaaaagtaataaaattctcctcccttgtccttaggctgaatcggcccattcctttccttcctctctcttccgccggtccaacccgagcctgcatcctctcttcttctctcagccaaagtctggtttagctccctcttctaatcaggctgagaaaagaaaagcccggcaagaagtctacttttcctccctgatatactgttcatcttccagctcaggcagagcccgagccagccgtgccgtgcacagtgccgccgcctcctccttccaaatctcgcctccccgttgctcctttttccaatttagttgaggggaaatattcctcttatcctcctctatctttaccccaaaaatcggagctaatcgttgagtatcttatccgaatcgaactcgttttcgagtttatctccaaaaccgagtttttgatttcccggatcgatttcttgcgggaggagtccgatctcttcaatccaaggctataaataggaccccctagtcctcctctttcgtttgcccctctcccgtgatctcccgtgcctcgtagcgccgccgccacgtgctccaccccgccatcgtcgccggccgagctccatccgtgtcgcgccgccgcctccgccgttgccgccggtcgccgtcaccgccgtaaggtgcgccgaggtgtgggcaagctcggccgctccctccccgctgtcgccggtcaccgcagctccggcgccaccgccgaccgaagccgcccccgccgtccacctcgtcgccggccgtcgtcgttcgtcgtttggttcgagggtgagtaccgttgggttcgtctcgtcgtcttctacgtgtacatgtcctccaaagtcgcagccgaccatccaatctccggcgaggtcgccatcttggtttggccattgatgaggtcatcatgacgtcatcatcgtttttctttttcctgtttttctaatagattaaatattcggaaattcataactaaatcatcgtaactcggttttgagtggttcaagttgctaaattcatctaaaatcatgatctacatgtttgtttactttatatgtactgtttatgcttgtttttgtactgtttatttggtttttattagtctttttcttcgttttgcgtgttagcttgtcgtttccgtcgttgcgaaggttcgtgagtgcgtcgggagtgttcagaagattaattgaagaccgattattgcaaggcaagtcacacagatcctaaatacaatcctttgagcatgttgatcctatatttaaattccctatttatttcaagtgtgtatttattttcgaatgtcactgggtggtgtgaatctattcctttgttatggcctgtttgcattgattactctattccttgataccttgggatattataatttgactagttgagctttatatatattggttcaactagatgttagatataattgcttagccatgcttagaaacattagctcactaataggatgaatcatatatactacattattatttatggatatatttaatggtagctcacgatggttaatcgtgttatgataattaattggtaattaaaatatgattaatggtgggttgtgagcacatggttttgaaggtcgtgttcatggcaattaaggaccggttcacgagctactgttgttgtgaaacattaatcgtgccaaccacaagccagcgtgggcaacggctttaccttttgtatagcatggttcattgcggagcaccagactgagaagtggcggagataagcccatgggggtcgctggggagtccatgccttgttttataagggggtgattatgatccaggaatggtgcactgtggtgagttgtgttgtacagagggtattgtcacagcctctattcgggtaccttctagtatcgcgacacatggtagacatgatgttgaggctgtgtcttgtgggtacagtggtacacctctggccagagtaaaactattcgaatagccgtgtccgcggttatgggcgagttgagcaatgtttttcgtgattagtctcatgcctctcacaataattattgatgctataactggtaataatttgtttagctcctggtttagagttagatctgtacagccgggtatggttgttcagaatggttgggcctgagcagcatgggcgtgttgttcagtgttgattgaaattaatgattaaattactctactgttttattactcttaaatgtttgctaaatgctgcttttgcaaatgagcctatattatgccatcctttggtatccttgtgcacttgcatatttgctgtgtggcttgttgagtatgtcatatgctcattcttgcaataatcaatcaacctcagttgaagaaaaaggatccagaaggagaagacgtttggcttataccccagttgagttgcctgtgggagtggagctgaagccatcgctagaccgttaattccgctgctgtttttcttttgttttgtaagtatgtaacgttattattatgatggatttgtatattaaattgtcagtttatgtacctcggctgattcctggacgaggattttatgcacaaattagttcggaaattattagtgaatttccgggcgtgacaataggcctaaaagtatgacattcgtgtatattttaaatttgtgatcttaattgatcaagttatgctaaaattatttttgctaccagaggtagcttattaataacaaagacgatgatgtccgttactaaggaaactagccgataattccttgacaacaaggttttgcctgcaatccaggtaaagtggaaagccaaaggaagaggaatgtccaaattactccaacaagacaacaaaagacgcacattgacgtaaaacgatccaaaattgtagaaattcctcaaatagatgggtggaacatatgactaacatgccaacctccgaactcacctgatcttaatgcactatatctttttttacaacaatctaggcattgttttagaacagccctcctaacaatattgatcaaattgtaacaaaggttgatcaagcatatcgcaagtaccctttggaaagggccaaccagattttcccaacccagcagggttgcgtgatggagatcatgaagcataatggagggtaacgctataacatcatgcacatcaagaagaatacattgaaaatgcactgtaatcttcccataagcttgttgtgtcctatagacctatacaatcaagctgtgcaattcatcgattggatgaagtactgaattgccactgaaatactctctcgtagaaatctaatgtttccaaggtctgaaatcaacaagttccgatattgttaggttatgcaatctaatgttgtaagcatggagtgctgaattgtcactgaaatgtgctatacatctaaaatctgaagttgtcaagttctagaattgataacttctaaaattgtcaagttatgtcatatgaacttgtgaacatgaagtgttgaattgtcaccaaaatactctagtactgaaatcagaagttgtaaagttctaaaattgtcatgtcatataatgttgtcaagttctgaaattgttaagttctaatttttttaatttctcaaatctgaaatctgaaactgaatttaaaatgaataatgaatgaagattagatgtcaagttctggtttctccctacttgacagccgaacaaagtgcaaaaagtcggaccggccatcgaattggtcgagcccttggtttgaccgtctggtcatgcagttcgactacagaaccgagccttcatttggtgtgaatattgttcactaattaggtgcatgggtggtccctaattggcttagggtgagtttgtttgcttgcattcctttagcctggcccatctctctcatggaatcagagtttaaccttgatgaggagatactgtttggttgtttccatctgtttagtttggctgggatgagattttgtttgattacttgcatgatagatactgttgggaagagattttgttttgttggtcgtatggcattgagcatagacctcttcatttagttgggtgagcttacctctacaatatcatatgacaagtttatattacctctactatatagcaatagtgattctccatataattgatttttttttcaattttcatagtgaaattggtagtaaaaaatagacttcttcaaaaacaagtttataagacgaaccggtcaactaatctgtaatttattacctgagaaaaacaaataaaaaagaaaaaaaagaaaaagatgggaggtagaaataaaggggatcgtctatagatggccatatggcccgagggcacgcccaaggcccggtgatttggcctggcccaggcaccgcaagactcgggtcatgcccgtgccggtccggcctaacagccgtgccgtaccgtgcctggactgctatctcggcacgctgggccagcatggcccggcatgaagtttagggatgtgaaacaaacttattttcaaccatatgtaaggcacggtacaaagaatatagtggagaaatagatatattatatggcatggcccaaagagtagggacgtacaatagacttattttagctatatatatgtcaaagcccaaagatgagggacaggaaatagacttattttaaacaatgcacgataggccgcccgtgcctttgggccggcatggcacggccagactactggtgggctgtgcctgggcctgaggtgcagcctgtgggccggcacgacatggctcgaagtgccggctgtgccgtgctggcatgatcatctcgggccgggctgggccgagcgggccttacgaccatctatgggatcgaacgtggtgcctcgttgtcattgccgtcaactcgcctcgcatccggtctctctcctctgacctggcatctccgacagggcctcctacgctcaccgccgtcacggtagtaattggatcctgtggcctcctgctccagcctccaggccatccaatttggtgcctttggcttccaaggaggagagggtggtaggagtgaggaagaagaaaggtgaggaagagaggaatctgaggtagagaaagatggtgtaggcccaagcggtgatgaccacagccctacctccttgttcccttcgattgctgctcctccaagactccacccccaccactcacgaagcagccagatctgaggtggcacccgtagcacctgctgaagaaaacaacgatggaggcgtcgatgacttgggaggagtcaagcatgcaaatggggtgagggaggtaaggggatatgcgacccctcttgcctactgcacgcgcgcatcccgctctatacatgctcgtccctacgccaacatggcctcggcctagacgagaagtgaatctcaattcgagcgttcccctcgggcctggctagagaagcgattttgcacgcatagagtcagccgtggtggctttgcaaacacccatccactgcacgtgtggatgtgagccaaccctagtgtaggtaaccaaacacacccttagcccataggtggtgactggtgagctagtggggcctagtgggcaaccatggttcgacgcatgcatgacttggggcctagtgggcagcgtctctttctagccgggaccatctgctcgttgggaccacctgttcagaagcctctgattcactggcttttgaccaaaaattatccggttcatccgagatagcttggtggcggtggcggtgcctgggtctggacggcggcggcgctcctgctcggaaagatggacacagcaaaatctccccgaagggctggcatgcatgcatgtccacaacattagagaggtccctatgaagctacacatgcgaatgttgaatcgtggctcaccggagaagaagataacgacaacagcgacggtggccgaagttgagaaagaaatgttagattaatgggctaggcccaattaaatcctaataaattccattggcccaccttgaaaatctaagtgaagagatctcaacttaaatacggagctagtggagagtctatgttgattagttgagatggtacgctgacagccaggtagggcggggagaggcgaggcaagctgctactgctgttctctctctcgttttgtaacggacggtaataaacacggagaattgagatgttcttccgactcttgcacttcgagttcctgcttgagaacttgcacaggtagcgcttgcacgggagcaggaacttgcacgggtagcgcctgcgcttgcacgggagcagaaacttgcacgggtagtgcttcaagcgcgactgctcctgttcttcgttcttcgatgacaacgttgcatcttcctctgcttctgcttcaccatggcttctattggagagaacggaggagacaacatcaatgaaggcaatacgaatgcctcaacatcttctgcaccattctctggatataagattctaattttattcgattttcttctcgttatttacatgttcacaatgttatccataggatttcaatcctatgtgaatgtcaacgatgtctatgcttattttaccttaaacatgctcatgtttatgtttagccttatcactagatcgcttctcattgtgtatgtcatgtttatcgtcttaatattttagattaaaatatatcgaattataaccaaatttccaacaagaaagagaacgatctccccattctttgcatctcccgatggggctattgaggggtaacggaaaggaggtcgaggtgatgaagatggcgcggtggtttggcctgcaactgtccacggccgccagaaacggtgatggggatgcggtggagtgcgctccagagcgtccgagtgcgcggttgcattcctgtttaaccgctgcatggaatagcacaaaattagatggaacggacacggcatcgagagtagatagaggaacgcaaaagaagaggaaatgaccgcggctccatggtgttggcaaccttcgtcttctcggtggccgacgatggagatgagggcgacggagagactgagggcctcctccctcagtttggtcggctctggaatgaagtgtgagcagaagcaaccgagtagggggaagttggaggcgagatcagccacggccacatcctcggacacacgtcgagcaccttgttctcccggcttttctctctcgcgcgtgtcccctatgttgagcagtgatggaggaaagtggagtatgatgcacagagaaggggcaagtctacgtggctgctaggtgggtccagcgcatgataggctaggatagagtaaggggtatggggtgggggattgagtgaaaatcgattttcagttattgtcatgattaattctcccctttactttgtaaattcaatagtttaatttgtgggaggtgcctagggatcggtcgcccgatccaaatctccaaaaatcgggcgctgatattagcatgacaacaggtatatgcaaaaaccactttaaactaatttttctcttaaattatttatccaaatcatgatccgattacaccattaaattcgttgcaattaaatcttcaaaacaagaccacacatggatatattccgacgaaaaaaaattagattattactgaatttttttaaatgttgcacgatgttccaccaggtatatcggaattgtttcactaagtagatcgaaaatatttcaatcatttaaatcgggcgttgtttcaccttatataaaaacaatgtttcagcaaatagtgaaataatgtttcagttcactgcaacatttgatccatacatagtgaaacattataagtacactaggtgaaacacttttggtggaacaaaaaataaaccaaattcccttaataaagggtttccaaaatatttgggtgatttgttgcaatggagtatttcagttcactgcaacattagatctatacatagtgaaacattgcgagtgcactaaatgaaacttttttggtgtaacaaaaaataaaccaaattcccttaaatagagggtttccaaaatatatggatgatttgttgcaatggagtatatgctggagacacgtggcaggtgggggcagggactgtggtgaggcccaggtggcatgcacgcgcacttgaggtggggggcgggggcagcacccgatttttgctccccccgcccggtcgaccgatccctgtcattctcctaatttgtgggtgggataaattagagttttttagatagatgatggtacctagattccattttctttggtttcacacaaaaattatgtgtagtttgctctcagaaaaataaagaaaagggctcggtagaatctagtttaaatttttaggaggatcaaactaaagaaataaattctgcaaaaattatatttatttatgataattaacctagtatttgaataaattattttccttatacttatttatgcattttaattcacattttggtgaggtaagattttaaacatttaggccccctttgattcaaaggaaattcataggaattttaaaggatttcattcctatatgaatatttcctatatagctctttcaattaaaggaatgaatcctatgaaatcctataaattttctatggaatgcctaatgccatgcaagtttcggaagaaatctagcatgaggttctacctcatggaaactttcctatgggtcttcatctctcctgtaattcctgtatttttcctgcggtccaatcaaatagtcatttatgtgtttttcctgtattttgcaatcctctatttttacccttgtattcatatcaaaatcctgcgttttttctattcatatgttttttcaatcctgtgattcaaatggtcccttagggtttataattaatctagtattttactggtttgacttattaacttaagtgataatatttgaccaaaattacagcgaatacacactggatagtatttatgtgaattttgttctaaagatttttagaatttcatctagtcattcctttatatgtgttttcatttatagaaatgcatctgagcaattttataaaatttataattgaacacttcttgctctgagatggtgttatttaagcttagtttcatacccaacatgtacacaaggactcaaacctagccatgatatgcatatgcttgctcgcactaagtttgtaaaatttcattttgggttggagaggaaaaagtttatataatttgccctcaaattccttacattcaaaacttagattgacctcagctaggtttaaaatgaaaattttaagctctcaaaaatggaaaagttatcttccaactactttgtcaagaaattttaaacccctataattcgggtacgttacatcatttaacacaaaaatccgaaccaaacgcttgacatgactagtcattcaactcaacacaatgagtttacaataactaggttgccaacagcgtggtgaagcaatttaaaattttagggtcgttacacgttgcaacatgatcttaaatgggttaggttttacggtattttttgagacggttactctgagaaggggataaaacagtttttttagattgtttttctttgaagggaagaaaggacaacaacggcagattctctgcataagagcacctaatgtaatgtgagagataataaatagagtactgttcattccttttggagggggaagtgcaattcaactcaagttcctctacttcaaaactaaaaaaaaaaatccaaatccaaatcaattgatatatttcgaggaagaaatggggttacctggagcctgttggattcactcagttatgtgcaaattaaatgacctacttaagttacatggaatgataccatggctaataagcaaagttcagggcaggtgtggtgctgcattgctacatcacgcagcagacggtcacctgaaccgtaaatttgacaaattgacccctttagaaaacttatttcagaaaataggccatgcaaaaacttatttgcaaaaatgagccatgggtattttctgcgcgggtattttaattatgaatgaaaacggtcagaaaaaccctaccattttcattttcatatttttttcttctcgaaaacagaatcggaattgtagacttgaaaatggtaacgatatcggtaatatcggtacatcagaaacgggacgtcggaacggaatataccgatattggtaggaagtcgaaaagtcatgtcgaaataagtggagtgtggcatagcacacatttaattatgcacgaagatgacttttttaactttatttttgcatcatcacactctacataacactattatatgatgattaattatatgataataagtttaatgaacaatataaacaaagttcaacaatactacaacatcgattagttgaggagaccaaagttcaggaaaatccacatgccacgtcataggattaacaacattttccctggtcacttcccattttttgtgggctgcaagtctaccatgcttccttccttcacgagcttccaatgtgttgggctggctgagccgctgggaacttttggaattttgacagaaattaccgtacaaatacggttaccgacaaaacggacggaaaaacctccatcccatgtccactaccatttccgaaagatattaccatttccatttccaccaacgtcggctacatataccgactgaaacggtcggtacaaactgaaaacggcagccggaaatctcggaaatttacgtaccgttttcacccctagtatttttttgatatttttctttttcatttgccacctgaggttttgccatcccatgtcctaaccgtcggatcaagagttgatgtacgaaacattgctgacagatgattgatgactaagttttgctaacatataattagtttctgctcttaatatcgctgacatatattttgactaaaaatatatctaaaattgccaacatatagcatgtcttgttacctagtattgccgacatatagtttgccaataacttttactaacagagagtctatcagtaattgtttatttttattgaaagatgtctattggtaatattgtcatgatgtagtgtggttcgatgcggcatcagcacgagcacttctggatattgtcgccgcactcatgtgggattgccagtcagatactggagaaggcggggattacgtcaagtccgcatggcacttatgggttgggccacacacgtgcgacatatggcaatgacaatgggaagcaagactgtaaggcagagcaaatccggaaagattgcctcagttcgaattattctatgcaactggggaannnnnnnnnnnnnnnnnnnnnnnnnnnnnnnnnnnnnnnnnnnnnnnnnnnnnnnnnnnnnnnnnnnnnnnnnnnnnnnnnnnnnnnnnnnnnnnntcacccgaagcatcgaaccaacagtcacccatgacttctatgtaccactaacggaggagtaccctccccaggaatttgtcttaggaataattactaacgtggaggaatacccgtactgagctgtcaccatcagtgacccacctctactatcccgcagcatatattcccagataatgatacttaataatctagacaccacgtctacattattaaatactactctatatccctatgaatgacatagagcaaccgaataatcggacattaaacccacacattgcacctctctggtaggctagctacacaactataacgatacagatataaagtaaagccgatactcagataaactaaagtaccgagagtatataaagaataatattccattaattccgaaagtcttccaaaagaataaagaagagctactagagccatacccgaattccttcgaagactccgagagctgttctattctactccacttagcaatagaatactaaactaaagtataaagagaaatgttgagcttgcttgactgtaggggtgaaaacggtaatggtaattaccggccgaccggcgttcgtttctaactttgtaccggccgaaccatatggaaatggtaatagactgaaaaaatatggaaatggtaaaaaatatggaaatggaaacgtaaatggttttgttgttataccgatcgtctccgtatttaccatatttttgtggaaattaccgtttcttatcatatggtaattaccgtatttctaaatatgttgatatttataaggcatatctctacttgacccacagtttagacattgatcgactcttcaatcaaatccctaatttgagtgaatggctaaaatgaaattaacttataatttatatagtatgagcttgaatttatttatacatataacatacttatgtaaagttaaatatatgtttttatagtttattatttacatatttgttaccggtttccgatctgtaccgatatgtttccgtccatattattccgtttatggttttccgatatttccgatattgttttcgtttccgactttaccgttttcgattttgtttccgagaaaaatatggttatggaaatggttgaagctgttttctgattgtttccgaccgttttcatccctacttgagtgtgtgttgaagtgaatgaagcctccttcttttataggcaggtaatgacggttacactatgtgaattgtccaaattgccctgcaaccatcattgaggagcaatcaagagcatccacgtggaaggccgggatgagaggagctttccagggtttggccgaacccttggctcagccgaacctgggccggctcaacaggcctccgcactttccagggtcggtgacaggtggattcttagggcggttatggcagttatggcggtttccgggacggttacacctgacatgtgggcccgtcttacccttaagcttgcttcggagtgaagtgtccatttatgtattaatcgctgcaaaataataatactccaggtacaagtggaactacattattgtcaaataaatatgcattgcaagcatagctaattctcctttattttagttatattgacggtcgaaattggtctataacgaccatcaacaatacccataattaattggagccagatcaaactgaaaattgaccactttgatgaagattccatctaaatatatcatgctccattattaagttagcattcacatttgaaccacacaaattgtgcgatctaattaagttcaaaccaactaatgctctcctaaaagggacattaagtggaagataacgattggtatagaagataacgattggtatttgtcctttaaagatgaattacctaaccacttatcctcccagaatctaacttgttcaccattattaataatccagtaacccatatttagaaaagaacttttaaccttcatcaaacctgacaaaaaatggaaatccccttgtttcctgtcaacttgagttatagatttaataccaagatatttccttttcaaaagattttgccacacacattgctcatttattaatttaaactaccacttacttaataaacactggttttggatctctaaattatgaacaccaaggcccccttgatctttaggctgacaaataatatcccatcttgtcaatctatatttatttttatgttcatcatcttaccaaaagaaatgaggtctataataatcaattttttaaagaacccctttaggaatcttaaaaaacaaaatcataaacataactaaacttgataactcaaagttaatcaaaaccaatctcccacctacaaacatatgtttacccttccaactactaagttttctctcaattctttgttcaattgttagccaatctttattattaagctttctaaaatgcataggaatgacaagatacctaacaagaaaacctcctagtttgcatccagaaatatttgaatattgctcatgacatttctttgctcggccaaagcaagataattcactcttgtgaaaatttgtcttcaggccagataatttttcaaaagcaattaaaatcaatttcatatttttagctttctgtaaatcatgctctaaaaaaatgatagtatcatcagcatattataagatagacaaccatcatcaaccagatgtgggaccactctagaaatttaaccatcatcttttgctctattaatatagctaacatatcaacaactatattaaaaggaattggagataacgggtcccgttgcctaaatcccttataggtttgaaattttggttccacttgatcattcactttaatgccaacatgtccaccttggataaaaaaaagcaatacaatcacaccatttttgagagaaacccttcattttcaaagtttgttgaacaaaagaccattttactttatcataagctttctcaaaatcagtttttaaaagtacaccactcttttttttctgatgcaattcatgtatcgtttcatgaagaataacaatcacctccctaatattcctcccttgtataaaagctgtctgtgtgggactaataaccttctgagccactccagaaattctatttgtagcaactgtagtaaaaattttcaaactaacattaagacattaagtaaacaaataggcctatatgtttgaattttcaaggcctctttgcacttgggcagtaaccaaagttaagagactaaagaggtaaactaccactatgaaaatcattaaataaatcaaccaaatcggacttaataaaattccaaaaaacctgataaaactcagctaggaattcatccggactcagagctttattatgttccatttgaaaaatcgtatctttaatttccttctcaaaaaataaatcttgtactaaagcattattttctaattgagaaacttgtggaatatcagttatttggctttcatctaacgttaaagaagaaacttcaagacagccaaaaagacctttataataagtggtgatatgcgcctttaaattcgcatcaccataaattacccaatcacaatcctgtagcttataaatccttgttttcctatgcttaccatttgctaccaaatgaaaatatttagtatttgagtccctttccaaaatatctttagtattagctcgcagataccacttaatttactcttctattagcacacaagataacttattcctcaaataaagtcttgaatcaagctcctcttgagttaacaaagttgattatgtttttttatcaagaaaataagataacgagacctttttcttttttctatagaaaccactagtctatttggcccatcctcctaaaaattatcttagtctacgaatcttatcctgccaatgctttaaatgagtattaccatcaacaacagttaaccaaatttacttaaccatatccacaaaaccatctcttaacagccaattcctagtagacttaattataagagttaattatatatgaccaaatcaataatatgtcttaaaactattatcttttttcgttgttatttttaaagggtggtttgtgcattataatgtctttaccattaatggtcggactatatataattttggaggaaatatgactagttaacatgggcatatgtatctcatatagaagcagacaaggatcatcactatggataatgtaatctatattatactcatcaaatagtttgttcatgaaatctttagttatggcataaagtgcatctggaatgacattgtgcactcattttaccgcacagaacattatcaacctgtgtactagaaaagaaagcattaaaaaaattagatgcttagtttggagattaggatgagatatcagtcttcactatatatatactatcaattctatatatagtgagtatatttaatacaataccatctagatagattacatattctcgggatctgtttgttctgtacatttttttttcaccaatttcgagatgatatggtatctaaatctatattctcgggatccattcgtcatgttcatttttttgtcgctaatagtattctcggttctaaatagatatatatagatactccagatctattcgtcatgttcatattttttccccaatttcgagatgataggtagcgggcccgattatgaactctagagaaaggcccagaagtgtaagtattggtccacattccataatgtttttttttctagcccataaataatcctgggaaaaaataaaagaaaaaataagttagtttagtacttttaatataaatgtgtattttattttcttgacatactgtggacagagatatattataacccttacatacatatagactaaatgacaaattgctatatgtttagaagtgcacatgtgcaaacatacctatacattaacccttacatacaccagaaacccaatgtgttgacatcgttatgtaggttgaactatacattaacaatacaagggtagcccaaatgggactcaaatagaccgagcatggtcatgtacattgcaaaataccaaaagaagtagattagatagcggaagtgaagcagcggtggtccaacgtactccacaggaatcgacgggtgaacctaggtcccgactccaccgtcttagacatctcttcattagcatagttctcatatagttaactccaactcctttctaaaagatttagttaagtaaggtgagtaccaaccgtactcagcaagccaccactatagaatgcatttagtgcacacaggaattcaaggagttcgaggtgaagagagacgaacgtccttatacaggggatgccagggcatggcttcggtgcacggcggtgtgcctgcgaccagcgcggcacacggctggggtaactgtaatagatgtgttttgtatataactatagatggaaattgtaaagggaatttgtaaaggggattgcacaactgtaaatgatgtatatttggacttttgatttggctctgggtcgaaatttggaactggggtttggaactgcaaatatggacttttggtttagcccgcactcggatcgtttgggtggaatggtcagattcaattcggccgcttagtcgcctaagtgctcaacttaggggttttttgtgatcactcgagcgaatgaaaagacaacaatgccgagggttctagaagtgacgcttggcatacaaatccgttggatgcggtagggtttcaaggatagaagtataatcgataatgtatgaatcaacgtacggcaattaaatccgtcgaatgattttagagtttcaagcgaaaggccttactctgtaatttcgagtcaaagtgataggggggaaagaatccgtggagagccgagtcgaatagccgaagcaggttttgatccgatcgcaaggttccaagggttcggggaaagaaacgacattgcgaaaaaaggaaaggatcttgggatttcgattcgcttagcatcgaagcatttagcgaaaagggaagacgtcgatcggaggatgtcctttaggccgaacgatttaattgaggtaatccaacgattcaagggagggacggggaattgtaattgtataggagggttgagaggatagagaagggattttaccttgagaggcaattctgcaagaactactaagagttcgaataataccagacactagaacaattgtttcgagaggggttcgattgagagggagaatcgaactacaaaattcgaatcctgaggaattacggcaagagggtggattcacagggatggattaaatcgagatcttggcatgaaaatacaaatgcacacaattaacataaattccattatgcaggtcggctaggcctttcaatgaggaaaactagacttttctgtgagttctttagaaataaactcttttaagattttagtttataaatagagttttgctagtaaattccttctagtctttatttgtaaataattcccaaacacttataatttcaaaatagggttttcagaagttaactaatattagcccttatttgtaaaaatagttttctcgggaaaatatctctcaaagtatgttttcgaaatatttagtatttgtttttatttataaaacaaatatctcaaataggtttctaattcatagaaaagggttttcaaaaagacaaatggtattcgcaaatattttcttaattaatatatttcataatcatggttcttttaataaataagatttgaatccaaaatatattttgttcctagatttccgtcctcgtggtccaagcgcaaccgaaaaatgggagataaaatccaacatgacggattttgaaaaagatttttgattatcctgaatttttaatttcacaaatcaaaaccgaaattttcagggtgttacatagccagccccaggaccagccttgatcttgacattattagcaccgacccctccaaattaaagctggtggcaaagtgaggcgcggcctgcagaaatattaggcacagttgtatgtatattactagtatatatacagattaattatgttaatgagcatgtacgtacggtagtatgcatcgctgccgactcagatgccccggcggtttcttgaagcgtggagacttctcgggcgacggtatcaatgtaggcaagcgaggtgaatcgaatggaaccgaagtggaacggacatgggggcggttgaagcatatgatatttttattttattcattaaaatattttaattttttttatttttaaattattacagaatctttctctaatattttttgggagggcactttttataaaagaactatactatgagaagtgttttttatgatgcgggatataattattaatcaatgctaacgtttgtatgaagaagggttgactattttgcaagggggtcacctgcaaatggtataggtgacattttacaggttactccttgtcctcctctgggatggttgtaaggagtgttcactaaatggttagttttactctgtgcggcggttagtatacgctattatatgtcaaagtcataaaaaattgttcttaggagcgttggtggtttaaatatgtactactttgaaaataaaagttatttttaaaatattttaatagataaaatttaaaataaaaatccgagagagcacttatctaatggctaatagaaagatgtctactaatatgatggttggaaactcctgtgaaggctctgtttgactaggctgtaaagcttggcatattagcagtatgtaaaacaagataactcattagcatatgactaattgagtactaattactacaaacataaaacatggatttatttaattttcttaaagaaacttctataaggggtagaaaaaaaagctcatgtctcagatcagcttggagcaagctaggcctttagcttgcgagcttaatgagccaacttacaagctactcgtttagctcattagtattaagtataagagatcacttcatatgtatgctgtgcttcctatttagtgtttagtcatttaattacatccaaattatttatatttagtaggttatttattagtcaatgattattattatatttgtatatgataaaatggtaaagttgaaattataagaatgatataaatgcattaacgagcctaacgagcttagcagttctaagaaacatgctaatggaaaatgagaaaattaacatagccaaaatcacttccgaacgggccttgtaaatactctctgtggagcacctgtaagtcgtcgttctataaactatacttgggcgtacaaactataaactaatctcaaacatgacttaattgccctatatttatattgagttggagaaatggatcacttatttacaaggtaaccactatcgagatactatatagaatcgttttctatttgtagtatcatggaatcggtatactataagattttagaatgtacatattttatatcaaatatatattatattagataaattaaaccatataatattaatgttgataaatttaattggtttttatgaaaacttgagcatatttaatcacaatatttttcaatccattttatgttattaagcaggatcgcagtgatcgtaaaatcgggataataactaaaattttatagaatcatgtgaaaatgaatagtaatatcgatatactatgaaaattgatactaaataggaccgattttgtttcgtcattgcactatcgtaaaatactgaaatacagatcccaatactaattaataaccttgcttatttttaagagatgccccaactacaataaagatctcaaaacataaaaaatagctctatatatatatatcgaatgaggctctcttatgttatgtacgttagaaggacatgggccactgacatgtggggccatgatggtgggccccacccataagggacacatgtccctctgaatttacgtcatatgagctgcttccatagatatcagattagaacagagatgggagagtaaggccctgtttagattccacgcaaaaattttacatcctctcacattaaacgtttgaatacatgtataaagtattaaatatagtctaaaaaaataactaattgcacagattgcaactattttgcgaaacgaatcttttgagcctaatagctccatgatttgagcaccacattaaacatttgctaatgatggattaattaggcttaataaattcgtctcgtggtttattgacggattctgtaattagttttttattagtgtccaaacaccccatgtgacatcctatataatatccaatataatacgccaaaacgttacacccctttaacaccccctaaaaagacttgtatttgaaagcacgtgcacatgaccgttgcttgaccgttacccaaacaccccatgcggcatcctatataatatccaatatggcacgacaaaactttacacccctttatctaaacaccccacttgtatttgaaagcacgtgcacatgattgttgcttgaatgaatgacgtgaggccactcgcatatatgcatgcaacggaacacatgattttggctaattaattaatactcacagattagaacctactacttcggtttcaatcatgagtttccatgcccaattttaatgttcggcttatttattttttttataattacgctagttttacacctctgctcaatcagtcatcactcatcagagagctcaggcagaaacacccaacgagctagctatatagctatagctacatatgcagcgcgcgaggctagctaacgagctaactaaaccaatgaccaatcaaccatcgatctttgcctttggttgatcatcaggaggtggcggccggcgacgcagccgctggaagagggccctctggcggaggttctcccggaggcggacacggtcgtggacggcgtccggcacggcgcgggacacgcaccactgcagccggtggcagaggttgggcatgcacaccgcgccgtgcccgatccaccgcgccgccgccgccgcgtaggcgtccgcggtcggcacgaacagcggcgagagccaccgccgctgccgccgcttgctccccttggcggcggcgtcgtcgccgccgccgccggccttcgcgacgccggaggtcatgttggtcgccacgaacagcggagcctgcaagcatgcgcgtacatcgcgttcgtgtgtaccattagttaataggactatcacagttatgacataaaagagggtttatggacacaggtacttcaaccctcctcacgacttagaaagttgaaaaatttatcgataaattttcttctaaaaggttatcaaacgtaaatttagtacaattataatatactcatattataacttacatataactacaatataaatgatatataactttttatataaatttaaaactgttagatttactttaaatttgtgtaagtggagaagaaaaaaatcacaacgtgcacataaagagatttggtcccataacctcgcttcgtgaaaatagcatattactgcaagattttaatatacaagttgtattgtatttatatacaacttacaatataattattctatatttgtaactgtcaaatttttaaaataaaatttgtcaacatatgtataacaaaactgttcattaatagattatgttttatatacatattctgcaccttgaacgatcatcaagtgacaaaaagttatactatgatgatatggcttatctcggagtatcaggtatggcttaaatctgtcgttctttataacttcaaaactaagctcatgtttgagttcactgaagataaaaattaagtatgaacacgtgaaataagaaaactattagcgtctgatttatagatagttttacaataaattaataaaagtatacgtgattttataaaatttactcatataaatatataggatcggcgccttttgacttgaatcaagttccaacttccaaatcaacacatggttgtttgtttactttcgctgttacactgtcactcaccacgtgaatatactgcagtttcacatgcgtggatcagaggatggaccctactaattaatgacagttgggctggcaaggatttgacggtacggtgtgcatcaaattaattgttggaacttaaggctagttggtaaaataaaaaattttgggaatcacatcggatatttgaccggatattagaaggggtttttgacacgaatgaaaaaactaatttcataactcgcctgaaaaccgagagacgaatcttttgaacctaattaatccgtcattagcacatgtgggttactgtagcacttatggctaatcatggactaattatgctcaaaagattcatctcgcgatttacatgcaaactggcaattagtttttctttttatctaatatttaatgctccatacgtacgtttaaagattcgatgtgatgtttttggagctaaacatgcccttaaggaaaagtagaggaattctaaaggatttggatccattgaaaaatttccctacatggtttttagggaatataggaattgcttctccaaaatccaaatttttttagggaatataggaattgcttctctaaaattctttgaaattcctatgaaattgctcactttgaaggaattttagaaaaaaaaactaacataaggcttgaccacatgttttctcatccttatgactcaaagttcctttacttttcttatggtattatctagggctgggcacttagcacttagtttatatggttttctcggttcggtttcttaagtttgctgaaagttcggttttcaagaaatacgaaccgaatttgctaagaaaaaaaaggaactaaaaccgagcaaaacaaatcgaactacttcggtttggccttttcggtttacccaaggggcatttaaattttttccacttttaaatgtggcaattaggcatttgccacttgctgtctataacatgtgggtcctcatgtgttaatgacatatgattccagtgataaatctttaattaccatttataagagtgtctaataggtaattattcctaaattggggattgaattgattaatcctacatgaagatacagatgcgttcagtttttatgggcttatcggtttctagcaacatcaaaccgacaagggtgtgtttagttcacaccaaacttttccccaactcccaatttttcatcacattcaaaactttcctacacacataaactcctaacttttttccaaactaccaactttcctcaaatttctctccaatttcagaaactaaacacagccaagtttggaaaaaggaaaacgaaagaccgagaaaacccgactgttcgggttggatcggtgctcggttttcgagaagtaattgtacccacctctagtacttcctccatttcaaattgtaagtcattctatcatttcccacttaatgaatctagatagatatatatatctagatttattaacattaatatgaatatggaaaatgctaaaatgacttacattgtaaaacgaaaggagtattatcaaacaataattattcaaaatcctattaaatatatttcatgtaggatttattgacatgatatcctattcgtatgatttttctcgtgtgcttttaaatcatacgttttaaagtagccctaaatttgatcgaccggttatttctagtcatccccattttgagaagcgaacagatgaaagcgttcgtcaaaccaccagcaatacatgaaaaaattgttttctaaaaacttaaacaagagtacaatatatacctgacattgcacgtcgattcctttgctcttgtattccacgtaaaggctcctcgagaactcagcaacgtacctgcagcgtaagtgaaagtacaagaagaaaaaaaaaattaaaaccagctagcatatggaattgtggatacagaacattgaatccaattagagcagtatactggacactccaattatatcgagtagtactagctagtactatatttaatacatcattattaagcgagtgtactccatatatcaggatatgatgcattgctcgtcaaatgatttaaatccaacattaattagtctgatggcattgggcagatactgaagtcattaaccatcttcagatactgaagaacacaagaacaccgttcaattagtctgatggcaaaacaaatatatttgcccaaactgctagctattattcaaaattgccgagattaatatgcttttatatatactattagaatgcacaaaagtaatttttgtggggaatattagtaagacacaaacaaagataattagcattaattagtataccgtttagtggcggcgtagacggagtagagtgggaaggaagggatggcctccgtggagccggagccgatgttgacgacggcgcccctcccccgcgccaccatccccggcagcaccgccgccgtcacctccgtcaccggccacaggttcacccgtattattctacccacgcctccgccttcgnctcgtgcaggtacaccgggcacggtcgcgccacgcccgcgttgttaccaccaccccgacgttcagccccgtcaccgtcttccgcagccgtcgcaccgncttcgtcccctccgcggtggacgccagggccaggtcaaacaccacgctcctggtctccacgctttcgtcgcccagcttggagatgacctacgagacgtcgcggagcttgacggagtcgcgcccgacgagaacaaggttgagggccccgcgggcgagctcaagctccacggagcgcccgatgccggacgttggccccgtgatgacggcccaggcactgtatcgtcgacgtaggtcgcgcggtcggcgcagtcagagtcagaggtggtaggcaagtcgcaagtctgagtgccgcgccgtgaatggcgctgccgatgaccaacgcgacgaaggcccacgccggctgctgctgccggaggacggcgtcggcgccggcgacggcggcgctgccacccatcctcactctcgccgcggattgaattgagtagccgcctggatgttggatctgcctaagctggagtagttagcaacggcaatataaaggcaaagctggatatgctggagcgaacgagcgagattaatcagtacagtacgctacattatccagtgaatagtgaattagcacggtggtttttactgtttctatactgcggctacaatgaaaaactgcaaaaacactgttcttcactgtagcaccagactcattttgggtgtgtctagttcgcgttaaaattgaaaatttgattgaaattggaacaatgtgacaaaaaaaaattgaaagtttgtgtgtagaaaaattttaatgtgatggaaaagttggaagtttgaaaaaaagtttggaactaaacaagggctttactgtaattccctgccgttcgcttgcaaagttagaggagccggatccctttccaataattgggttagcgaatggtgacggctgagtttgtttaaggccctctttagttcccaaaagaaaaacttttcacccgtcacattaaatgtttgacatatgtatagagtactaatgtggaaaaaacaattatatagtttgcgtgtaaatcgtgagtcgaatcttttaagcctaattgcgtcatgattttataatgtggtgtaacagtaaatatttgctaatgacagattaattagccttaataaattcgtctcgcagtttcctgacggaatccgtaatttgttttattattacactacgtttaatacttcaaatgtatgtctgtatatccgatgtgacaatcaaactcaaaacttttccccaactaaacaaggcctaagtttgtaagataaaaatgatcatgctctattaatacatagtacaagacaaagatagtgtcctctttattaaaaaaacaaagagaaaaggaaaattttggtttttttagctgtttcggcatcaaactctatttttttaaaaaaatatgtatatatccaactgcaactatgtggatttatgtttgcctcttatccctctcttgctaataagtaatcttccgcacgaaaaacggagcggtccgttagtgcgtgattaattaagtattagttattttttaaaaaaaataggaaaatacgatttttttaagcaactttcgtatagaaatttttttaaaaagcgcactgtttagcagtttgaaaagtgtgcgcgcggaacatgagggagaggggttggaacactaagcaaataacacagcctaatttttttaacaccgagcaaataacacatctccacgcctcatatccacgctggattcaaagtttgtttgttagattatattggtttaattttttttatctcatccaaaatagggtcaaaatggttctccaaatgttattaatataatcgaggatccaaattcatagatccaagaagctacaaatatccagtttcaagtaatcttggatctaaatttgtgactaacagaaccttaaataatttcagctagattcgtggggtaaaaaaaattaaagaaaaaagtatgaatcatcccccacctccctgaataattacgacagtacaaattaccctcgaaccacaaaaacagacatttgataccctaaactattgaaactggacaaattacccccttgactcaatccggagtggttttgctcctacatggcatacacgtggcaccaaggtggcaatccaatcataaaaaataataaaaaactatgggcccacttgtcatgtactcctacctcacccccccccctctctctctcttttctctctctgccatagaggagcatggcgggcgcgcggggaaggcgggcggcgactgcgaacgtgaagcacgggtgtcggtgacggcatccgtggcggcgacacgcgagatggagctgcgcaggaggcggacgacaacgaggagggtcgtcaccgctgctcctcccttgcccctctccttctctttcgactccctcccatttcctgcagtgcgtcggtggtggttgtccgggtggagaaggcggtggcggcccaggcggagaaggcggcgatgtcaacagtggtccggaaagagaaggttgcggcagggaagggtgggcggcaggtgtgcgtgcaagcgatcgccgcctccgctgctgaccactcggtccgcctcctccccgcgcctccgccacggccgccgacgtgcacacgaccgccccttctgccactccccgcctggcctgccacagccccatcccatgcactccaccacgctgtgcgtgccaccatgagcgctagcgtctgcgccgaccgtctgcccccgtgccgccgctgcacgcaagagagagaggaagaggggaagagtagtgtgaccagtgtatcctaaatttttttaataaataaaatgctgactggattgccacgcgtatttcacgtagaataaaaccgctctagattagatcgggggggtaattcgtccggtattaaaagttaagggtgagcaatgtatggtttttgggttaagggggtaattcggtcgaccgcgatagttcagggggtaattcgtactttttttcaaaaataaaaaggcaataactatcatacctcatagcccctttgaaataaagaatttctggaggaacattggatcctattgaaaattttacgattttgcgttttaaataaaacgttagacaattggaaagactctatgtcgaaattattaagaaaaaggtgagcatatccagggtcaaacacgggttgcgtggagcacaacggctgcacctcgccatctccatggttcttcgccggtcactatggatttgttacttcaccctatgtttttcatttagttaaaaatattattagttgcaaaacatacgcgaaaaaattaggacgtacgctgctgcggtaatcagttggcctaaaacactatttttcagggaatcattagcctaaatactctattttcattgctttctagatccacaattaaaaaaagcaaagcccataagcccaatcagccactccctcccactccacacagctcacaaaccaagcagctcactcaccaggtagtctttcatctcctctacattatattttctttaaatctgttatccgctttccatggaccactgagattttgtttgaactggaatgtgaaatcaatgagattgaagtcatgtttgctaattgataaccaaaatataaaacaaataaattcaaaagttttaatcaatgtccaaacaattattcaataattggttggtcatatttaccgagcaagccattttgttgaaaaatgagcaacaataatgtaatcgcatgtttttatgctatgaaaatatctcatgagatattcttgctatctatttcactcgaattatttagagtattctttagaaatttagacctgctatgtatttatgtggatgtaggctgctagaatcagcctgcaaattctcgtaggcacactcaatatggaatttcttgtccgccactggcaagcggcgcagacaataggaatgtaaaccattttcattatcttaaatattcataaaacaagcaattgataattgtcaaaattgtgaatttatttatgctatagaattagttagttttgccaataattggctctatgctttttgcttaagttttcgttatatgaaattattatataagatcgacttctaatttctaacatgtgtattggcatgtgcccatgagcccatcgctatagactgcacacaattcacatttgttcgtgcgtgcactgaacctgccttgggaaggatgtagaggcaaaagaaaggctcatgtacctattttttaaaataatattattttaatgaaaatcacagaaatgatggctggccggaattttttcgccaaaatagaaccctgccgaatagcagttcgacatgatcctattgaacagcggaggagggatgggaggaagctttcgacaggccctgtcaatcagcagcagtttgacaaggtccacatctggtagtgtgcaagacctgtcgaattgtggttgctcgacaggcccaacaatcaaccctatcgaactggcatcttgacagggccctttatatgttccactcattttcattgaggccatgtaaacataaacatgcaatcgatatagtgactatctcacattatgtacaaatgtcatatggcaatgaacattatctattatctctgttctaaaatataagggatttcagtgatacaaatgcatagtaaacatctcttttatattttgagacagaggtagtaagacaatatttcttaactcccgtgactaacactttccgctctaccctttacttctctccgcacagtgacggattgatgtgaccgtgacaactgtgatcaaaattaacattttcctcttaaaaaagcaaaatatatactacatccgcc

SEQ ID NO: 10217 - DNA, 67005 bp, Oryza sativa
aattcgagctcggtacccttatgagagcacgagctttgtgtacgataccacaatgagagcacgagcgcaacactcgtcaccgtggacttaaccacaacaatcgcactcatgtgagacgtcatccgctttgtacttgagaatccggcacctgagttttgctggccaggaactccaccatagccaacattgtcgaaatcttccacgaccacattgaccccataacattcgctcctagttcacatcacgaagtagaccattggccatcccacacaggcgatggtagtaaatgaagttgagttgtagagaagaagggagaagccttacatgtgtaaaaaaggggagatgagcatccgtgatttatttattcagcctcctgacatgcgaactgaataacatcgacactttccacatcaatgcattaaccatgtatgctgaaccgaggttctacatacaaatctgcatgcaaatccctccttgttttagggcaccttataatgatcttttagatgagccaccattagccataaggactggctacgaggaataaaaaataaaaaaccattcttcatctctctccatcgcagatccctctcctacgagtgctatgctgctgcggcctcctcctcctgtgagccccgctgcttgctcagccgcccccgccgatgtagcctcctcccacgagctaccacacagccgtagagttcctcccaagggcgccatggtcactgcttccaccacctcttccttccacgaggcaacgtaactattgctggatatgagctcttcctggttgggatggtggggaagaaaatactctctccatcccaaaatatacggcacaaccacgtttctcttatgtctcataatataaggcgtgcatgcatgcatacattaactagcacctcttggtctaataaaattgatctgttttaaatcctataccatcaaacctcctaatcacattgcttacatgcataaaggtgatccagccaagaagatgattaaattaatgttttcttgatctttgtgttatgagtggttgagcaaatggagtaaagaggactagaggagtcattggttggatggtaaaaggtggggcacagctaacttaacactcccttactactatatacattgtaaaatactctagatggtatataatagtggggtccacctagaacccacggtaagatccacttgcacattgcgcatgcttgaatttttcattttgggttttatgctgaccatatcatatactccctcaatctcaaaatataagcattttgaccctgacacgatctccgagatgctactttgaccatcaatatctataaaattaagatgttttcaataaaaagagttgcatattataatagtttgtttaatgataaatctagtaacattaattttacatggttaatctttttttatttttttgctattaattattaaagttaaaaatgtttgacttgacactatgttaaaaatgcttatattttgggacaggggagtagaaatttcaatctacaaaatcccactgcattacctggtttattaaccggttaatgtaaagagaggttttacagtgtttgcgaggtacttagaggtattgagaggtggagtaatatggaccgttgatcaagagaggggcaaggtatggaataaaattatcataaccaatggcaatgaagtaattaactagtgaaatattgccattattgccgaattgaataccttacttcgttgatcgttacggtaagatagagaaaatataaatctacctaggcattgattagatcaacacagaaaaaaattaggttatgttttatttctcttctcccacatcgtttcgttcttactagggtttgaattggttcactagaaaaaaaaggagggagaactgtcaatatggttgaggattgaagcgagacaaggttagccggtcaatggcaaagcgaagcgcatccgcaagatttcatttacgcagttgatttgtgatttacatagctcacaatttcattcatatataagagattggaatgagttctcctcccctgttattcttccagattttgaattggtgcactcgcaaggagacacagtcgtcatggttgagcatctatgcaatctacaacgaatatatatcaatggatatttggcatgtggtgtagacgttgtggcattgcaggccttctaaagtggcatgcaatccatggatggcatgtatgcacatatatgtccaataaatggacatgcaggaggtagtttccattttatcagatgtgaagtaaatcaaggagatggttatttttaggtaatattaaaatctaagtgtgtgaatggtattataaaataagttatttaattccataagatatataatttttttaattagtgaattctacaaaacatataaataacgtaacgtatgattaccgtacgaatctgttattaagaaaaaaaacgtaaatctcaaaaagaacacgcaaacaacatcctgaagataatgactataccgatgtggtacctatgtacttataattataccattctctatctcttagaaaattatctttttacccttactatctaagtacatgtgctaatatttaaataccttttaagtggcactttttattatggagtgttggatcattatcttttttaaatgtaaacaccgtaaaacctctctaatgtaaatcatagcgaagccaaatgggctacggagagcaaagctactacagcggtacagataacgtttcactgtgccagcgcccagcttggcacgaggagtaccatgccgtgcctgaccaagttacttttttttttccgggtttctctgtctgttttttcctcagtttttttttttggtttttctgtttttcagttcagtttttatacctacatatacaaagtttttatacatgtatattttttatacatacatatacaaactttgtattcgtgttcttttttgtttttttatgttttgaatatgtacgcatacacatataaagtttgtatacgtgtatatatacttttatacaccaaaagtataaaaaaatataatatatattgtatatatcgatatgcatacatataaatattatactagaggaggtggggtccaagaaacccacagcgcggtgggcacgcgaccacccgcgtaatagcgtcctccctattatgtgcactaagacctgtttagttccaaagtttttgtccaaattaacttccaattttcaaccacaacttttctatcacatcgtatcaatttcaaccaaacttcagcgtgacctaaacacaacctcagatttaaactcgccttttttttaagttcaactgcgctgcatgcagcatgacctgtattattgactgcattcatttcgagcaggtacgttgctcaattctcccggggcctacatgtcgagtatgcaggtaaaggaatccatgtgcaatgccaggtaattgacgaccgaccaatctataaccttctcctcattactgacaggatcggatccgatgaaatttgcagccaaacacacacacacaaacttgaataacaataacaaatttacgccaattatcttttatacatgcgcaggcgccgttcttcgtggcgacgaggatggtggaaaacctggtggaggcgaggcgcctctcgccgttcacggcgaccccgggcgcctacgcgcgcgcggcggtggggtggatcggccgcggcggaccgctctgcacgccgagcgtccggcaccagctgctgtggtgcgccgccgccgccgccgcgccggacttcgttctcgactggatcctcctgcgcagccacctggagcagaggacgttgctttcggcggatcagagcatcgagggcgccatctccgtcttcgcagcacagagttgattccagtgcaaaagggcacgtagcctgatgggttacagtgacccgagtaatacttcaagatccaaaattcaaattaagttcccaattaaaaaaactatatttatcctgttggatataaatgttgagtaaaattaaaaaaacaaattgagatgagtgacgaccatcttacgctgtactacattaaggtgtgtttgaggaggaggggattgaggagattggggagattggaaagatacgtaaaacggagattggggagattggaaagatacgcaaaacgaggtgagctattagcttatgattagttgagtattaactattttaaattttaaaaatggattaatatgatttttttaaaacaactttcctatagagttttttttgcaaaaaacgtaccgtttaatagtttaggaagcgtgcacgcggaaaacgagatgttttctctctcaatctcctgtatcacccgggaacgaacgaagcctaagtctataaaagcgagtcagcactcagcagttgcattgtactatatatatacacagtactaagcgtacatatcacctatatttatatttactgtacttccttaatatcaaaatataatgatttttaagagttttacatgatgataaaaaaataggtgaaattaaatgaggaatgtttgtgatcggttaagattagctacgaggtggaaaaataaacacggaagatgattatgtatttgtgattggctataacaagagagtaaggtggtgtttagatcagagacttaactttagtccctgtctttagacactaatttagagtattaaatatagactacttacaaaactaattacataaataaaagctaattcacgagacaaattttttaagcctaattaatctataattagagaatgtttactgtagcatcacataggctaatcatggattaattaggctcattagattcgtctcgcaaattagttcaagattatggatgggttttattaatagtctacgtttaatatttataattaattttcaaacatccgatgtgatagggacttaaaagttttagtcccatctaaacagggcctaagtaaagagggggatagttttaccgtccttctgaagtacggcaattatttactacctccagcaagtactaggtaagttgaggtaccaaaatatttaatgtttggtatactttctccagtaaagaaattgatattttgggataaatttttaacactagaagttgctactcgctagcatttattttttcatggggtaattgcatccatgctcctactttcaaagccaattgttgttttatccctattttttagggtttacacttttaccctcattttttaatctgaagcagccatgtaccccctctaacagtcacaactaacaaacgacatatatatatacccttggtggttattgcagttttgcccccattttttcagtctttttgtgattttgccccattttttttcagcttgtgtgagtgttataatgtgaggctttgaccggccaaagctcgtgcattcactctgaacccctaaactacaggtcaacgcctgtcagttaatcgagactacgatgttagtatgcacaattgataccacatttagtagtacatagataatacaacagggttgttcttattaaaaaaatacaacacggttgtgaattgttccaaaataaaaaaggtagtagcctcaaccacgccggctggccctcgacgcgaccgcgcggccgccgccgcctcgaccacgcctgcggccgccattgcctcgcgcacagtagctggcacgcgcccgcccacggccggcgccgctgcctcgtgcccgccgcctccggctcgcgcgcgcccagggccgccgcctccgcaccgcgcgcacgccgccaccgccgccggtttgtacccgccgcctccgccccctcgatccgcagcctccgcgccgcgcgtacgctgccgccgccgccacctggtctcaatcggcgctacggttccaggaaaccgacgcacggtggtgggaggagactcactcatcctatccattcctttaggggtataaacgtaatatcatatttcctaaaacatttttttatttccttttgtattttttaacacaacatcgtgggacccaccaaacggctgttacaactgagggtagatggctgcttgaaattcaaaaagtgagggtaaaagtgcaaaccctaaaaagtaggggtaaaacagcaattggcttcgaaagtgggggcatatatgcaattgtccctttttttattagcatttttttaaaaatttgatgaagtttatagaaaaatttagcaacatgtactacaccaaatttgtttcattaaaactaacatttaatatattttgataatatatttattttgtattgagaatgtttttatattttagtacaaacttgataaacttgaaaaaaaagagttagtacaacttataatataacacgaagtataatttttaagccaacagagtaatatttttaatatgtgtattttaacagtttacttcggattttaccgggaaacaatgatagtaaattttgttaaacatgataaataatattttcaccctatgtattactaaattgaacattggaatcaaaacaaccatgtgcacggacgacacacactctgctatgtacctatctatcctcttctgcctaattatcccttaaatttactcgtgcaatttgcgggtagctgctgcgtgccaatcggcaggtaaccgttccatgtccatgtccatgccagacggctgatgcgctagcctgccagctcaacgacgaaccgaacggcctatgcgcccgggcgtcagcctagtgctcgttataagcatcaacaacagtccttttatactactcccttggttctattttaagtatagccatggttttccgcgaccaactttaatcatccgtcttatttaatctttttttaaaaaaaaattaaaaacataagtcacgagtaaagtgctattcatgttttataatctcataacaacaaaaatagtaattataaaaaattttcaaataagatggacgattaaagttggacacgtaaactcatggttgcagttaaaatgggaccgagggagtatcatcgatcctaattttttagaattttggtgaaaaaaaatcctatcttgatactatttttcttttttgaaaactccatctccatattcttcgctcttcatttgagggagagcgacccaaatccctattttccgtgaggtttttctctttgtacacggggagagaagatcgcgcacttggagaagcgatattttttttacacgggtcagtggaaaaacaaatatttggttggttgttcaataagagggtccatttttagtttttaaggattaaatttaggctttcacttatagaaagaagtttttctctttctattttcaatttagaaaacccaatgatataattttgggatagattatacacattccgttgatgatgctcttaattacattcagctcgacgctgtccattaatctccggaaaatcttcagcttccggcacgatccgtggtgacctcgcgatgacagcgtacagtaagtcgtacagaccaagcccgtggaccgtggtgtttggggtggctcaagcaggaggccttgcagctggctgggcgtcaagttttaactaaggactcattcggaacaaattaaggttttgggaggatttaaatacgatgggtggaattactacgaggtaggcctctcactagagagggtacgagtaacctatatctgtacctaattttactcataaccatttcataattagcttattcatatccaatgggtatgtaaaatccatgtggccccacattattagaaatggctcaaaaacttgcacaaagttgcttctctgtataatattttattcctacgaaattcaaccaaatttgataagcttttatagtgtaaacgcaagtcttaaaattttgagactgagttctacatatataaaatgggtatggataaagtgagtactactacctccgttttacaatgtaagtcattctagcatttttcacattcatatagatatatgtctagattcattaacatccatataaatgtgggaaatgctaaaatgacttacattgtgaaacgaaggaagtaatgggtattacccttccctacccaaaactaaaatcctttctacccataccctccctaaatatatagtgtggataagagatcttttacagtgcttgaaaggtaactgaggtgcctccttaatcaattaatatccaccgataattcataaagcgtcagtgctcggcaactacctcagcacgctactcatcagtcatcgtcaccgccatatccaccaggggcagcggcctcggatggatccccgacaacctcaaccgcggccatctcgactacttcttctggctgctcaccgttctcaatgctgtcaacttcgtcgtctacctctggattgccaactagtacaggtgcaagagaatcaccaccactgaaactgaaactcaagcagccgcccagacttgaggggagattacaatcagaatcaaccgggaacgtatcggggaggagcgctcaaaagcggcaacggcgggtgcggccgccgtgagctcgtggtcgtcgacgcctcagcctcagccacctccaccgatgcctggaagtggaacggatcgggagttcagaacggatcgtacataaatatacatatattgaaaaaaaagaaaatatgcatttgcccttaacctcataaatcaattatgaaactcaatcttttaaccttccacttttcatatctggcccacccttttaataccttttcccttgtaccttctcttttggtgcgttagatcattagagatcaaccctactatgaggctgttgggaagaaagtattctccttggacttcctttaaaagtgtaattttatcatcttaagaaaataccataagatatcatattttcgatattttcaaatacacttgtaagattttggtcttataagtgctttctccgtaacaataaaatttctccctttgaaaaccctaagccattcatttggaattttggggaaaaagaacaaacacgagatattacatatatactaaaatgaaagtaaaaaatgacgccttatatttttagcaaaacaaccatacaatatatttacagccagttgttgaccctctttacgaacgaatccaacgtatgagccagagagctcaatgctcaaacccttctatcccagtggaatcccatgaagagaaggagatatgaaaggtggaaaaggactagagggctggagtaggaagaagatgataagcctcctcctcactaatcctagatccggcctggcccctatttatgccatccacctgcccttgtgacagtgtaccagtgcgagtgatcgatcccaagtttcagtggtccgcgtcctgccggttttatttcatttcaattcactgtgacattaacacacactactgcttcctaccgtgcctaatcacaccgccaaattattactcgtgtgcattagtccgtgccgcatgcgttccgtcatatatttccacactatatatcgcatatatctggcctgtttggtgatatagttttggcgactcggcgagtaaccgttccaaatcgctctcaaccgcgccatggccggctagactgcatgctaatgctacacatttatattgtacaaccccgccggtggggaggaagagagagcgagagagcgaatcatcatggctagtcatgtcttcatgatccggcaagagacggcgccggcgcagtggtggttcctctcgctggctttcgtcggcgccgcctacgccgccaccgtcacgctccgtttcgtcgcctacctcgcgctctgccggtgtcaccggccgaaggacgacctccgccgccggtacggcgaatgggccgtcgtcaccgggccaacgtccggcatcggccgtgccatggcgctggagctcgcgcgccacggcctcaacctcgtgctcgtcggccgtgacccagccatcctccgggagatctccggcacggtcaggtctctccacaaagtgaagaccaagaccgtggtgtttgacctgtccctcgtctggacccccgatggtgatgagccgctgcggcggctgcgggaggcggtggaggggctggacgtcggggtggtggtgaacaacgccggcgtggcgaagcccggcgccgtctacctgcacgaggcggacgtggaggcgtgggtgaggatggtgcgggtgaacatgtcggcagtgacggaggtgacggcggtggtgctacctgggatggtgtcgcggggtaggggcgccatcgtcaacatcggctcggctgggtcggagtacatcccgaccttacctctctacaccatgtacgccgccaccaaacggttcgtacacacgtaaagtgacatgtgtcataacttaaaaacaccatactttagatcagtggtattatactcttgtgtacatatgaatagaccatgagagtgaccggcctgttcatttcgatggagcaggtacgtggctcagttctcccggagccttcacgtcgagtatgcaagtaaagggatccatgtgcagtgccaggtaagttaatttatcagaaatctgtaaagaggccctgtttagatcttactttaaaattttttatcatgttacatcgaacgtttgaacacctacatgaaatattaaatataggctaaaaaataattaattataaagattgcgactaattcgcgagacgaatcttttaaatctaattgctacatgatttgacaatgtggtactacagtaaacatttgctaataacggattaattagacttaataattcatctcgcggtttactgacggattctgtaattagtttttattagtgcccgaataccttatgcgacaccctatataattaatatctgatgtgacatatcaaaactttacagccttagatctaattaaacaccccccatgcataatttgtaacttccatttgagtttactcattgacagattatgatgaaatctggaaagcataagggaatcaaatagctaggagtatgtatgatgctatgtatgtgcatgcgcgcaggcgccgttcttcgtggatacgaggctgatgttcaggttcgaggaggcggcgggcggcgtatcgctgttcacggtgacccctgacgcgtacgcgcgcgcggcggtggcgtggatcggccgcggcggcgcgctgtgcacgccggccgtccggcaccagctgctacggcgcatggccgccgccgcgccggactccgtccacgactggatcctcctgcgcttagccacctggaacagaaaacgttgtttcagcggatctgagtgacagatgacagattatgtgatgctaaagaattgccaacaaataaataatgtgtcttcgaaaagtgcaattgccgagaaattgtttgttgcccattttatgcatatttgcatacacataatcggttccgagatctagtattttcccaattaacttctgttgacaaaattggaccatggtgtagcgctggcgattggcgtttggtattgatttagtagtatcaacgaacataacaacgagtacttgcagaggagtcttaattatcccaaatagtatatatggggagtgtttgagaggagaggaaaagagaagattaagaaacgaggtgagtcattaacgtatgattagttgagtattaactattttaaattttaaaaattgattaatatgattttttaaagcaactttcctatggaaaattattgcaaaaaaatacaccgttcagtagtttgaaaagcttgcgcacggaaaacgacgtgttttctctctcaatctcccaggatcggaaggtagtgatcaaggggatcgtttcacttatcgcgtgattatcgcgcttaccgcgcgggtacggtagggaaaccggcgatatggtttggaagaattttcaccaaattcaaaattccggaaaaaaaattaaaaaaaattgaaaaaaatcatggatgtacttcttaatttgtaattgccaatggtaaagaaattttttgaaatagagaaagctagattcaaatttgtggacaaaaccgaaaatagtttacaaattaaaaaaatgaagaaaatattgggcgttaagtatcctacgtattcttccaattattctcaatttctagttttctacacatattcaaccataattttgatttttttccctatttattttttatttacatgatttcagctacacagctcgtgataaccgtacggatatcgctgttatcgcggtaaaccgtgcaattatcgcggtgaaacagcgaaactgacgagttttgaattcgaatttttggatgtgatttttgtgtgattttaggcgattatcatggttatcgtcctaccgcggggtggtggtaaccctggtccaaacgataaggtaaaccctggggatcacacatcatgtccaagaattacggttcaatgttcgttgtgaaagatctacatataccaacatcggcataacttatcaatgaactattggtcgatttccagtgacaacaccgagttacgcgtgtgtgatcgacacacgaggtgtgtgtttaagaaaacaggcaccgtcacgttcgtggtgttttgtaccggtgcatcgttctttgaaattcatgcatacgacgatactcagtaatgtgatttgtcggagtgccgcatattcacatggtttgtgtatcttttttctgctacatactactacataattagtttttataggtggctgaatttcctttctaaaggcggttaataaaacgccagtgaaaaaatgaaaatacaaaagattcccgcatggagctgctatctgcatatcacagtccacacaccacattgtcccatttccatagagaattaggatgaaatcaccataaaaccgtggaggataggggtgaaaaatgagcggattcggacggataatagctataccatatcctaaaccatattttttaagcggatgcggagcgggtgcggatgacgtgcggatgcggatgcggagcggattatttcgaacgtcggattcagtgcggagtcggtgcggactcggttcggaaacggacaaaaagttatcggatgttaagtttgtattcaatccatacaacaagagggcggcaatacatttagccccaatacgatggcaaaacattattagttcattgcgttcagttcaatagtaatagtataacaataagtaataagtgttcggttcaatagttcactagtaaaaataatccaagatacatccatgatccatcaaaaacataatataagtgttcagttcaatagttcaccggtcactacgttaaaatgtaaaaataaaagtcatcggcatgaggcaagccatacaggcatacaacaacagcaagcatagagcagtagagcacccctatgcagtggtgctacacgcagcatactgcatacaggcatacagcagtagtagtacaggcgtacagcacaaaacacacagcagtgagcagctagcagcctcctgcagccggcggcggcgctagcagcctgcagccagcggcggcggcactagccgaggaggagtggttggcgcgtgttggggaggaagatcggcctggcgcgtgttggggaggagcggccaccgcgcagggtcgccgtcacgccgtgccaccgcgctactctctccgactcctcgactgacagctgagggacggcacagagagagagctagagacggatctgggggatgaggagaggattaggttaggccaggttgggctattgggctagctaggtgggcctgaaagttgttgtgtggcctgaaatttgcggattatccgccaaacagtacatcggataatccgattaaaatatcggataatccgcatccgtcggatatcgttcatgtcaaagatagcatagtatcttctatatttggtgattgagacacgtatagaaagtcctctatcaccttcctttttatgtaattacattccattcatgtaatcctggaatatatttaattgaagatagccagcacgattgtgcttgaactgtgccaaatcctctccctgtttgcttggtatcagagcaggtattctgcttcttccaccccaaacttcccgatcccttcttccgctgcctctccatggatcatcagctccgtcccaacaacgaggccgctgcagccgcgggcgctgccgccggtgcccctgctggtggtgccatcgtcattcccgctgcgggtgccgctgccggtgctgccgccggtggtgccgtcgtcgttccccacggacctgcagcagcagcactcaccatcgctagtgtcaggacgcatgtgcctgtaaccctagagatgaaaaaccacaactacaccaagtggcgtaccttcttcgtggcattcctcggcaagttcgctcttctcctacacatcgtcggcccgatcccccccattcacgatgccgcctgggcccaagacgacttcgccgtcctcaccgccctctactactccatcgccgacgacgtcctggacatcatcatggagcccgagcagagcgctcacgctctgtggcttgctgcggaggaccttttccgagacaacaaggagactcgcatcatctacctcgagaccgaatttcgcagtctcaatcaaggcgacatgacggtgacggagtactgccgtcgcctcaagactctcgccgactccctccgcgacctcggcgagcccgtcaccgaccgcgcactcgtcctcaacctcatccgtggtctcagtccccgcttctccacccaggcggacctccttcccctgcagacgtcgttccccaccttcgcccgtgcccgctcggcgctgctgctggcagaaatgcgccacaccgctgacagcatcaccaccaacaccactggcctcgtcgccacctccgactcctcgtccggcgggcgttctttctccaacaatgggggtggaggaggaaaagggcgcgggaacggcaaggggaagcgaaccggtggcggtggcggtgggagcggaggaagcagtggtggcaacggcggatccggaggccgcaactccaacggcagtggcggtgttcctgcctcgtctggcaaccgcgcaggggtggcggcggtgggggcgaccagaccgggtctggtaaccctcgcccacccactggaccgtgggttgtttacccacagtgggccgccgcttcgtggcccaccgcaccaccgcagccctggttcgcttcctggtgcccagttggtggaccgggcctcctcggacctcggcccaactatctgccatagcagcagcaggccttcgtcaccaacgactccatgggccagccggcctaggaccagtctggtttgatctctgcgattaataacatgtcgttgcagggaccttataacagtggctgggttgttgactccggtgcttcctcccacatggcctcctctgatggtatactccattcctctcaaaacccctcccaccccaccacagtcacagttggaaatggctcgtctgtacctgttactcgtgttgggcgcacctctctacactcctttaaactagataatattcttgttgttccttccattgttacaaatttactctctgttcgtcgctttactcgtgacaactttgtctccatcaagtttgacccttttggtttctctattaaggacctatggacggggaccgtgagacttcgcttcaatagctccggcgatctctacaccattcctcctgccgtcgccactcgattccatcccaacgtcgtccccaccagtccacgtgccctcctcgccaccgccccttcagtcgacctttggcatcgtcgcttgggccaccctggacgcgatgttcttcagcacctgcagaagcgttcttttatttcctacaataaaaatagtacacattcttgtcatgcgtgtcagctaggcaaacatgttcggcttccgtttggttgttctcgtactattacaactgctccctttcaaatactacattgtgatttgtggacatcacctttattaagtaattctggtttccgttactatcttattattgttgatgactactctcacttttactggacgtttcctttgaagcaaaagtctgacgtttttcccatttttcagtcttttgtctcgtatgtccatactcaatttcatctcccactgcagtgttttcagaccgacaacggccgtgagtttctcaactccgccattttgtccttcttcgacagccatggcatcattctccgcaccacctgtccctacacctcccaacagaatggtaaggctgaacgttctatccgttctaccaatgacatcattcgctgtcttctgtttcaggcccatatgcccggctcctattgggccgaggctctctccgctgcaacctaccttctcaatcgtcgtccatgtcaacccattcagttcgccacaccctttgagcgcctgttcggtatttcaccctccctagaccatcttagagtcttttgttgcttgtgttaccctaacttatccgccacagcaccacacaaacttgcccctcgctccacatcttgtgtttttctcgggtatcctcattcccaaaaggggtaccggtgtctcgacctcaccacaaaaagggttcttgtttcacgacatgtttatttcgatgaaacgatttttcctttctctactgctgcagcaccatcgaagtcttcttcactagacatggacttgtccttccaggatgatgcacctggacaaggtgttgggccagctgcagcccacggacagggtgcccctgctggagggccaccctccccacgcccgggtcctggtgcacgtgctcctgaccacgggccggcctcgccaccatcgactccacggcctgcttcaccatccgctgggctggcctcgccaccgactccacggcccgctgggccgacgctgcctggctcgcctccagatgggccattctcgtccactgggccggttggtgcgacctctccatcagctgggcggatcgctgccgccagtccaccaccagcgggcgatgacgcgccatcgtcgtccgcatctacgtgccatcctccaggggcgccgtccgagagcggcgctctcccacggcctgctcctggccctcatccgatggtgactcgtgcgaaggtgggggtggtcaaaccaattgactgcctcaatctctcgaccgtccacaaagacgccgctccgctcccgaagacgtaccgcaccgccttgcaagctccatgcaatgcgtgacgaatatgaggcgctggttcacaacaacacatggaccctggttcctcgtctccctggggtcaatatcgtcaccggtaaatgggtcttcaaacacaaatttcatgcagatggctccctcgctcagcacaaggcgcgttgggtggttcgcgggtactcgcagcagcccggcatcgactatgatgagacttttagtcctgtcgtcaagctggctacaatccgagtcgtcctcagcctcgccatctcccgcgggtggcccattcaccaactcgacgtgaagaatgccttcctccatggcaatttggaggagacggtctactgtcaacaaccgtctggcttcatcgaccccgtccaccccgactacgtctgccacctccacaagtcattgtacggcctcaagcaggcccctcgtgcgtggtatcaacgcttcgccagctacattcgcacacttggcttcactccatcggcctcggacacatccctattcatctacatgaacggggctgacatggcgtatctcctcctctacgtcgacgacatcatcctcactgcctcctcgacacggctacttcaccacctcactggtcgtctccatgacgagttcgccatgatggatcttggggatctctaccacttcctcggcatctccgtccagcgcacccccaacggccttcatctgtctcagcgacagtacgccgtcgaccttctccagcgggctggcatggccgagtgccatcccacggccaccccggtggatacccaaggccaagctctcggcttctgatggagaacctctccgtgatccaacggagtaccgaagcctcgccggggctttgcagtacctcactctcacccggcccgacctcgcctacgccgtccagcaagtgtgcctacacatgcactctccgcgtgacgctcacttggccttggtcaagcgcatcttgcgctatgtcaaggggtcactggatcaagggctctttctccatgctaccacggcatcgacgctcacagcctacagcgacgccgattgggctggttgccctgactcgcgccgctcaacatcaggttattgtgtcttcctcggtgataatcttgtctcttggtcctccaagcggcaagccatggtctcctgctccagtgccgaagcggagtatcgtgctgtcgctcatgctgtcgctgagtgttgttggcttcgcaagcttttggatgaactctgcacccctctccgctctgcgacagtggtcttctgcgacaacgtcagtgccgtctatctctccgccaaccctgttcaacataaacgtacgaagcacattgagatcgacatccactttgttcgtgagaaagttgctcttggccttgttcgtgtccttcatatgccgtcgtctcatcagttcgccgacatcatgacaaagggactaccagttcagctttttcaggattttcggtccagtctctgcgtacgggaacctcacgtctcgactgcggggggtgtcaaagatagcatagtatcttctatatttggtgattgagacacgtatagaaagtcctctatcaccttcctttttatgtaattacattccattcatgtaatcctggaatatatttaattgaagatagccagcatgattgtgcttgagttgtgccaaatcctctccctgtttgctgttcataccacatccgcatgacaaaatccgcatccgcatccggccggatatctaaaaacccttgccaaatcctcacatcggacggattcggagcggatcggatcggataacatccgctccgttttcacccctagtggaggaggataaattgtctagtttcatcagatgatgacacctctatatcggttagctcgtaactcctggttttggacagcctagcctagtaaggtagccaaccgtaatctaacacaccgacggatgcagatgcagcaccacgaagcaacacccagctcctcctctcgacatcgtcggctcaggcttcaaacccatgatacttgtcccctctcctctcgactttccaagggtacgccgcaggcccagcatcgccgcgtccacggcacgatgcaccggtggcgctccctttccctcttcaccgctgccatcctgtagctggccacctgctcggtgcacgcgatgtacgaccagcgtccaacaccttgtgcgatcacgctcagttcctcctcggctctcatttcacttgcttcttggctcctcgcctcgttggcttgatatatatttcccgagatattgagttgctgtatggtaccaatctgatgctgagtagacagtgagaggagggatgcagaccgccagggaaggaatgcgccggagtgaagttcgccagatcgcttggcagtggctgggtcaaagggattgatgtgtggcactgtggctatggaaggggagggatggattagccgtgaggatatggttggcttcaaaattacgtttttcaaaataaatctcacctcatataatacatatttgggcatataaactatcttaaatttaaatgttgtcagttttaaagttatagatctcatacattcatataggctatcttagattgtttaaaaatttcaaaaatttaaatttttccttatccgtggcggttcgtaacaacaatcattcacagataacattatttgtgatgggtggtaattaagacccatcacggatgagtgctctcattttttacgaatcatctcactacacccgttacggatgacttgttatacatgacggagcatggttgtgacccatcaaatgttatccgagacgtgttagactaggatccaacaaagttgacattctatcagtgatgggtcatctgctgtagtcattaatccgacatggatagttcatcaggaataatgtgtagatctgtactagggaggtaagttgttggccctgtttattccatcacgtgttgtgtgacagtgcaccagtgcgagtgccgactgcatccccaagtttcggtggtccgcgtcatgcgccgttccggccaaacaccgcagagcagcacgtttaatctaattaatttcactgtcacattaacgatctacagcagcttccttggtgcctaatcacgccgcgaaattattacttcctgtgcattatagattctcccatgctttaatttgcatcccgccagtttttgttggttagcaactcggcgagtaaccgttccaagtcgctctccacagtgctgcgccatttactgttacacacatatttatatcgtgcaaacgcggcgccctgtacagtggcgaagaagagcccggaatcatcatggctagtcacgtcttgttgatccggcaagacatcgcgacgccgtggtggttcatcttgcgggccttcgtcggcgccgcctacgtcggcttcgtcgcgctccgtctcctggcctacctctggctctgcctcccccgcatgcccaagggcgacctccgccgccggtacggcgagtgggccgtcgtcaccgggccaacgtccggtatcggccgtgccatggcgctggagctcgcgcgtcacggcctcaatctcgtgctcgtcggccgtgacccggccatcctccggcagatctccgacacgatcgcgtctctgtcggagttgatcgtggtgaacaatgcaggcgtggcggagcccggcgcggtgtacctgcacgaggcggacgtggaggcgtgggcgaggatggtgcgggtgaatgtgtcagcagtgacagaggtgacggcagcggtgttgccggggatggtggcgcggggcagggaaggcgctgtcgtcaacatcggctcagcggcgtcagagtccatcccgtccttacccctatacaccatgtactcctccaccaaacggtacgtacccacgacaacagcttctaaaataaacaacatagtacgagatataacaaattttatattatacaaatttattgttttattagtactatgttgagtaattttagaacaaagtgagtagtaaacaaagtgacatgaaacaacttacgacaccatatttatatcagtacacacaacgtcatacatatgcatgagaatgcaccactacaaaaatgttcataaggatcggccatataggtaaaaatcggcacctatactgtatttcccaccaacctctacaagaaccgatacctataaaactatatagacatcgaaccgatgtctataagatcgtatagatattctgtagaccggcttatttttttacagtattataggtgcccgttataatctaaaaaccgacaccttcgtaaattaaggtgtcggttataaacacaaaaccgacacctatgaagtattataggtgttggttttggtacagaatcggcacctatatgcttgcgagggcagcactttctctattataggtgccgattctttatcgaaaccggcacctacaatatcacataggcgccagtttggaaaccgataccaccgactttgatcattagtgttgactaataggtgccggcatcaaaaccattacctattaggtcttcccaaccgttacatatatggttttctgtactagtggtgaccggctggttcgtttctagcaggtacgtggctcagttctcccggagccttcacgtcgagtatgcaagtaaagggatccatgtgcaatgccaggtaacttaattcatcagaaatataattcgtaactttcagttgaatcatttactcattgacagattctgataaaatctggaaagtatgtgcatgcaaatagggaatcaaataggagtatgtatggctcttatgtatgtgcatgcatgcaggcaccgttcctcgtggacacgaggctgatgttcaggttcgaggaggcggcgggcggcgtgtcgctgttcacggtgaccccggacgcgtacgcgcgcgcggcggtggcgtggatcggccgcggcggcgcgctctgcacgccgggcgtccggcaccagctgctgcggcgcatggccgccgccgttccggactccgtccacgactggatcctcctgcacttaaccacctggaacagaaagcgtcgtttcagcggatcagagtgacaagttctatcgacagattatgcgatgctaaagaattgccaacaaataaatgtgtcttcgaaaagtacacttgccgatatattgtttgttgcccattttattcacactaggaaggtggcccgcgcgcatacgcgggcacttatattattgcaagctaagattattgtttgttcaaaattttcatctaatagattaagggcaaactaaagtttggataatgttatttcataataatttaagggttctattttgcttaagatatcttagaaaaccattcacaaaattttgagtaggagatacattaagtacttacgacttttgaatcatgttttttttcgagtaaataaaaaactattgtgacttttgaatcatgtttaactcaaaattcttgtgattaaatcgtctcatgaagacgcatgatatagttagaaagggagggaagcgtatgtatggaaaaaaaagaagaaagggaaaaatgaaaaaagggagggaaagcgcacgtacccacgtatgtaggtgcgtacctatgccgcgtatgtaggtgcgtacccacgtaggacctcgtagtatttagtttgttccaagatcaatttaatctaatagtttataatattgaacgtaccgatttaagtgaaaattaaataatagatactttgcttttttttttagaatttatagtactttctctaatttattagagcaccatgtggtagcttgagagcattttaagaaaatttaaaggacttaacacatgtaattagaatattaaccatgtaatatatatgtatggggcatatggtaatatttgtccagcttcgtccatgtttatataaataattaactatgtgtctaattaatagtaattaattttgacacctatttacaattgttcatagtagctcttacatattcatcttacgactttgattatcggttgatccccaatttactgatcaccatgactcgcatgaaaaaaaagtgctacttaggttttaggacagctgaaattgatgaattatcttatttgcgtggtagctatttgagggtataaacgaatgaattggcttctaaaaagttaaattgtcgtttaaaaagacaccatttataaacttggaaagtgtgcaaactaaaatccaaactatagaatcgggaaaaaagagaatcttaaactcccttataacacccttgtcttagtaagagttctattgttattcgttaatattgtgctcacatttataacataataatttctttcacctatacgaacaaatagtacaaaatccaaatacgacataacacaatacattataattattctataaccaactctcgtttttagcttaaacagagctaagtgttggaaaaaacataacccacggtgcttaattcttctctcgttgcatcacacctttaattttctttttatgttattaacaaaattaatcatctccatatatgatttgatatgtggcaaagcaatagcgttgcagcggtcgtgatcaccttagatgcctcacacacaacgcttgtcacgtgtgcgaaaggcaaaggtgcagacgtgcattgtgcagcgggccaaaaagagaacttcggacactttatttatttgcaaataatagatccgatgatttaaatgatgggtcatcggttctagtataagtgtaaattagttaatatagattttaaattactaatttaacaggtacacaatataatggtgtagactttattttgaaacagtgtattatttgagaataagagtccaatgtaataaaaaatagatacgatgttttaaataatgggtccatcggtttaagtgcacgtatatagattttaaattgtttatttgataggtgcacaatataattgtgtaaactttattttaaaatagtgtattattttaaaataatagtacaaagtaagtaatgagtacaccggtttaagtggaaatgttggcaaaagtgggtcatgatttagtggacgacgtctgcataggatcacaccaacaccagtctgccgccgtgaaccgtttgggccgagagctatactactatagaatggatttttctgtacaagagcgcctataggtttcagacggatggtaacttagtcttgcctgcaataatcactttttcaattgcagttaaaaacagcatgcgaaaatgcattttaactgatggaccccttaacatatctgcacgtgaaaattgataactctctattgtgcattaatttgctcagtacttttattatatctcattagtatatggcctataggtggttttagccatcgttgtcaaactaacgtaccgattaattaactagctttcagcttggttaatggtttgatactttgaagaaccgaaatctattttatggttagtattgttggcaattttttatgataagtcgacaagcacgatcgtagcacctaaacgccttgcggtgatatagagtcgccaaccaccttgatctagccaaaaggccaaatcaagatgggttttgtagaaaaaacaactaaaccggctagcggagccgatttagagtaggctgattttgatcgataagaggataactacccgtctcgtgggtaaaacggaaggttttcaggacaaacctacataaaggtgtcgcactctcgcagcagcggcggacgatttacggtgcaaatcgacaaagatgggctaaaactatggtaaaatagaaaacattgctgaaaagtaaagataaaagaaaaatagaaaactgcggtcagaccggccctactagtcggccagaccgcccacatacctgtggtctgaccggccctgtgaaggaaacccggcactttccaaactttgacaattttcccctatttcgtccatagatgccaaatttgggtgtaaacaagtatttccaagaaaactaacgaaatgaactgataatcaccattggctactccatccagttcaaaatataagacatatttatgtttagttatgacactcttgataattgctacactggaatattattagttatgtaatataaagtgagtatataagaaattatcgcaagtttttttagtgcaaaactattagatataactatagtataattacattgtaactgtattgtaaatacattttaattatgatataacttatataaaacttatatttaagtatggtttggttggctcgcatcgggattttacgcgtgttatgtgtgaaaatttctttctagtaatcttttccctttatgcacaaatctcaaggcgatcctatgaccacaaatctaaaacttttagagaaaaaacttgcgaaatttttttaagcaattccgaatataaaagcatattcataaggaagtagttttgaatatgaatctaataaatgaaactttaaaactatacttttctgtgatcaaagcctctgttcttgctaacaacttagtttttgagccctccgcgactgttagctagttgttgccacattattgttgcaacttggaactaattagttggcgggtaaccattccaaatcaacacatttacacatatatcgcccatatacgtccacgtcaacacatttacacattaacgaacaaaacctagctctacccacagatacgcgcgcacaactatgtgcaaatgacgccgaagagagctgtgcattgcggtcggatcaaatgatggctagccatttctacggcatgttccggcaagacgacccagcgccggcgccggcgtggtggttccagtcgctggccttcctcggcgccgcctacgtcgccggcgtcacgctgcgcctcctcgcctacgtcgcgatctgcctcggcgggcccaaggacctccgccggtacggcgcgtgggccgtcatcaccgggccgacgtccggcatcggctgcgccatggcgctggagctcgcgcgccgcggcctcaacctcgtgctcgtcggccgtgaccccgccaggctccgggagatctccggcacgatccgctcccgccacggccgggtgcagaccaaggccgtggtgttcgacctgtccctcgcctcgaccccggacggcgaccagccgctgcggcggctgcgggaggccgtggcggggctggacgtcggggtggtggtgaacaacgccagcgaggggaggcccggcgcggtgtacctccacgaggcggacgtggaggagtgggtgaggatggcgcgggtgaacgtgtcggcggtgacagaggtgacggcggcggtgctgcccgggatggtggagcggggcaggggcggcgccgtcgtcaacctcggctcagcggcgtcggaggccatcccgtccttccccctctacaccatgtacgcctccaccaaacggtaaatacatgtcgtacattcaccaaacacaaaatgacatattacaacatgtacaattcatgttatatatacatgtgcgtgagatgcaggtacgtggctcagttctcccggagccttcacgtcgagtatgcgaacaaagggatccatgtgcaatgccaggtaaccaattaagtttgagtttagtgatcattgtacacacagattctgatgaaatctgaagagagaaaaaacaaatgttacggcctgctcgcggcgacgtgtgtgcgatgtgctttaattgtagacgccgttcttcgtggagacgacgatgttggcgaagttggaggaggaggtggggcttagcgtgtcgccgttgaaggtgagcacggacacctacgcgcgcgcggcggtggcgtggatcggacgcggcgggccgctctgcacgccgggtggactgctgcaccagctgatgtggtgcatcaccgccgccgtgccggagtccgtcctcgactggatcgtcctgcgcttcaccacctggaacagaggacggtagctgttgcagccagcggagcagagtgtcaaggacgaggggcatgcaagttcagagagctgtggtggctcgctaagttaccatcctggccgctgtcgttcgattaccctaacggcgatcagccgtacgtcgtgaccacaagtcgcgcccgatgtgtgtatctcgagcgagtcaggggtggagattaggtttgtaaaaactatgtcaaaatgtaattttactttcaagtattgatatggagttatggacagtatgtaatcaacaacttaattagcactatttaatctatcgtgatagatatggaattcaatgcaagatacgcactttcatcagtagaataggaaggggcgatttggtagcatcacggtcgggatgaggaggattaagcagtgacgattggaagagataggaagaggcagtgaggtctcttcttccttagggcaagttttatagtagatgtgactattacatctaattttatgtataacatacataattattgagaggtgatatgtataataggtcacatctaccacacaatccccaatatctttaacactctcatatgtttattgaagtttatgtaggggttgccccttgcatgagaggtgactatttctctctcatccttcttctctcctccacctcactatttagtcctatgtgacatcttgggatttgtgcttggatgcccatagtacttgccactactagaaaacttattttcggcgtcgtaggggatcgattttcgcaggcaggcatgtaattcggagccaaaaccccgccggcaaaaaagatacccggggtggagggggcggtccgcctgcgaagatcaatcttcgcaggcgccgcttatatggcccgcctgaaaagatgcccctatatagtcttcttcctcctcgagctctgttcattctccccgaagtttctctctcctaaagtgacttaaatataggagggaggttttgaacttcaaatcttcgggggatttttctacggtacttagatctacttatttccacactaggtatgcaattttttaagcttttagaccttaatttgtgatggatttatgcatgcaaaattgtgaaggaagagttccatgttttttaattttatttcttttgatatgttgatattagatgtatgtctaatacatgatgcctcttgttgtagtggtttaatgtggtaacataaattctcaattttttttatttttgctatcacatctacctccttgttctagatctagatttagatcttgtcatatatagagagaataaaatttttaatgtctatttattcggtgcaatcaaaaaatagttatagtattttgtaatatgccaatgatatgattttgttagattttcctaatgtactaatttgtcatgtctgtgtaaaaaaaattgaaataaactttgattttttattaatttacacttaacctttagttaattagttttgaatagcgataagttttttcaataaaccctacaaatttggtattaattgtgcaaatattttacgtgtatttttttagagatatggaaagtcgggaatggatgtatcattggccgaggtttttgtctccatatagaaacgaagtgtctaaatttattggtattaccaaggcacacgctgagaagaacaatatgaggaagataatttgtccatgtgctgactgtaagaatgaaatagcctgggactttgacgatgcttttaaagtgaaggagcacttggtaactcgtggatttatggacaagtacgaaatatggacacgtcatggcgaagaacaagtggacgggccttaaaatgtagttctgacacaagttgaagacatggtgcatgacgatggttctgttgaggacaaaatcgacctagaggaaatgttacgtcatgcagaacccgaggtgctgatggggtcggctaaagggttaaataactttgaagctttacaaaaggcagcaaaggaagttttgtacgatgagtcgaagggttgtgacagtgagttcacaacactccggtcagttcttgaacttatgaggttaaaagtgagacatggatggtctgataccagtttcgacagtctgttagaacttctgcagaaaatgctcccgaggcctaactcactaccatcgagcacatatcaagcaaagaaactcatatgccccctttcacttggtgtggaaaagattcatgcgtgcgtaaatcactgcatactgtacaggaaagagtacgcttctttagatgaatgtccaacatgcagtgcaagccggtacaagtcgaatagcaatactggcctagaaccctctgaagcaactgagggacgacagagaaaaatcccgcagcttgtgatgtggtaccttcctgtcaaagaccgcattaaacagatatactcaaacccgcgagatgtagaactaatgtgctggcatgaagaagggcacaagaaggatgggatgatttgacacccggcagatgctcgttagtggataaattttgatgctcagtatagagagtttgctaaagacccatggaacattagatttgccctgagtaccgatggagttaatccttttagagacgtgagcagctcacatagtacttggccagtgcttctcaccatgtataatcttcctacctggctttgtagaaagagaaaatacgtactactctgtatcctcatacagggaccccgtcagcctggtattgatattgacgtatttcttgaaccattgttggaagatatggctgatttatggaaagagggattgaaagtgtgggacgagtacttaagggaatacttcacagtgaaggccatcatcttcgtgaccattaacgattatccagcaatgttttcagtttcaggtcaaattaaaggtaaaacaggatgtgtgatctgcttgaatggaacgtactataggtatctcccgggttccaacaagcttgtgtacatgtggcaccggcggttcctacgcataaatcacaagtaccgcaagatgaaggcggagttcgatggtactgaagagactgatcctgcaccaaaacctacatcgggagaaaaggtgtgtgcaataacagagaaaattgtttgcgagtttggaaaaatgactaagaaaccatcaaaggggacaaagcgcaagaaacccgagaagaatacaaaacaaggggatagtaagaagcaagatgatagttcgaagccagatgataaactccctcccccattcaagaagcattccatattttttaagtacctcccgtactggaaagatctgaaggttcggcatgccatagacgtcatgcatctagagaagaatgtgtttgacaacatagttggaacattgttggacatgccgaaaaagactaaagatggtctgcaatcaaggatagacctagtcaagatgggaatcagggaagagttacaccctcaagaaggagaaaagaatggcgaagtatatcttccaccagcctgtttcacactgacacctgaggagaagaagtcattttgcaactcactccgtgatgtcagagtgcccataggtttctcatcaaacatcagtcgactagtttcaatgaaaaatttgtcggtatctggttataattcacacgactgccatgtcttgctcatcgtgtttcttgcaattgcaataagggccataaaaccggagcttttaaaggttgctatcacaaggttgtgctactttttcaacgcagtgtcacagaaggtcattagtctcgaagagttaggaaatctacgtacattcgcacatgagacacaataccaacttgagatgtgtttctctccgtcattttttgatatgatggagcacctcattgttcacatagtgccgcagatggttgcgcttggcccattgtacctccatcaaatgtggtcatacgagcgttacatggcggttctaaagggttacgtccgaaatcgtgcacatccagagggatcaatggttgagggttatagtactgaagaggttgtcgagtgttgtatcgattacctcaaagatggatatgcaattggagtacctgtgccccaacacgagggcaggttgagtggcaggggaacgataggaaagaagagattcgtcacccatgatcacaaatcattccaagaagctcacttcagcgtgcttcatcagtttgctatcgttgagccgtacatcaatcaacatatcgaactaatacaagctaacaataagggtcgcaccaccgagtggataatgaaagaacacaagcgtctcttcatagattggttgcgagacctagacttacctgagggacaaactaccgatgaaataactatgaagcggttggcttgtgatccatcaactacagtaaattcttggcagggatatgacattaatggatactcgtttagcacaagagcccaagataataagacctgtacgcaaaacagcggtgtccgtgttttcgcaattgatgaagccggggaaaaacaatcatacttcgggtttattgaagaaatatgggaaatcgactatgggcacacaatgcaaatccctatatttaagtgccagtgggtaaaatacccgaacggggtcaatgttgataagttcggtcttactgttgttgacctggcgagtgtgggtcacaaggatgacccttgggtactcgccaatcgcgtggaacaagtgtttaatgtgaaggacccttcaaatttgaagaaagatatagtgctaccagggaaacaaaagatattgggagtggatggggttgaagatgtcgaagattacaaccaatacgatagtatgccactttatagtcagtttgtacagaagattaagaatgtcgagacatctactcaaaagaccgtgaagccttacatacgcacggacggtgtgggcaaaaatgttaaagggtaatgattgttgagtggcatgtaagcatctaagaagttagtagttatataatggtggtatgtaaggtgatgtgtgatcatatcgcaaattgacgaataattgtactcaacattttggtggtatgtaattagtttgtactaatttttatgtgtaattaccatttgtagtgtaaaaaatttgttaaaaaatttaaattagtaatatttgaaaagtgtaattatttttatgtgcaattacaatttttaccatttgtagtgtaaaaaatttgttaaaaaatttaaattagtaatatttttatgtgcaataaccatttatacatttgaaaagtaataatactaaggtttgtatattttgtaataatattaaggtttgtatattttggaataaatatattcaactctgtaccaattttcgcaggcgggcggtccgcctgcgaaaattgttgtacaaagtagggtttacatcttcgcagtcggacggcacgcttgcgaagatagtaaaaacgatcttcgcaggcggaccgcccgcttgcgaagatcgttgccctatataagggcaagcccgcggcgccaaaatttctaagtctaaaagggagaaagatgtgctaagtacggcgctgggtactactaagcatgggggaagggttcgaggtgtgtcgagcaagatgagttggaaggaagggttcaaaaatgacccaaacaagaagcgtgaagtgtacaaggataaacttagagacgaaggggctgcggagtttgaaaggcaaatgatggatttctgcgtcaagcacatgcttttgcctcgccccgaaaccaaagaacctgagccagattaccccttcgatgacctcaaggagaatacaccctgcagattgcacgttcccattggacgctccgggaaaactcttgaggccgctacagccattactatccctaggagaacatacaatgaagagttcatacctgatgcgtatgccaaggtgcagccgcaagtggtccacgaagggtttgagtcctacgacattgacttcccgactgcagatggtgtatccgtacttggggatgcggtcgatcttgtaattctctggcacaagaatgacatatcctttggattgggcaccgacgccacgcaaaaacctgtggtgcctaaaccggggttgggaaaacctccgagaccttctaagaggaaggtgactgataaggcagaggaacccgagatgcaaagggaaaatccagtgccggaagtgccaccggagattgcattgccagaggcagccatggagattgcaccgccggaggcagccatggagattccagtgccggatgtgcccatagagattacagtggcagaaccagaggtgcaatttgtggcatcagtcgggtcagaaatagaagaagtaccaggattggaatgggacggtacagagccagaaatatttgaagacccttctcctgcgaaagaccccgaggttcaagagaccacggtccctgagaaggccactaccagttctgaggtgccacgagtgcttaggagccacgactccaagtccaaagatgagaacaaggagaagttcatggtaaccgtctttagagggggtaaggaacgtgccaagctcaaagatgacgacccccagaaggctgctgaactagccgggccaacatatttcgcaaccgatgattgcccggaaaagtacgaacatgggaaagcattcttgccggaatgggcactgaaagaaggaccatgagagatgagaaggttacataccttctacatggaggccagcaagaaaggcttgggcaatataacagctcgatccccggctaattgttttggcgaagagggttacgtatggctagatttctcagatctccacgccatatatcgtcgggataagatggacgtcaactacgtcggtgtttggtgcatgtgagtatgagttttaattaattagatgaaaaatatgtacaatacaaatccatgtgattgttactaacaaacttcttctgtaggatgcaatacatggatgctaagaagaaaaaagaacccatcggcttcttggatctaactcagatctgccaaacacagcatacggtgaggctagcaccagggtctgaccagctgaagggcaagaatccaaaagagatagcagaatacaagaagggcttgcacaaggataaattgattactgtcgcacagtacattggacgagccttcttgcactttcaaaataagagagtcgtcatggccgcttataattttaagtaagtctggtacatttatcttgtacacatatgtcttattttagctggtactaactaactatactgttgttaatatgtagcgatcattatatctgtttactcatccaccctaaagacggaatcgtggtagtcttggaccctctcgattacagtcacaagcaatacaaagaatttctaacaatcttacagtagtaagtgagtatgactcttgcatttgtatatgaatgtattataaataaatatcctccttattgtgaaacggtacgacatccatacagtgcataccaatactacaagttcaagggtggagaatagacccgaacacgggagaagctgctagtacgtacctattggccggtaatactccactcacttaatgtattccaattgtttcactaattgcaaattttaactaattttttctatgatatgtactgaagtgtcacaagcaaccgcgaggaacggtcctttgcgggtattatgcgtgcgaattccttagggttaatggacggtacaggactaacgcagaggatgtaagtctctatactatgtactagacagcttcacatatttatgatactaatatatggattaacttcaatgcatgcagttgccaagattacaatgtcgaacaagctttaacgatacaggtaccacaaatgtccagcgtgatctgtgccacttcatccaccatgagtgttgtcatgtgaaaggagatttcttcgacccagagggtgccctagcggcaagtgatgaatttaaggatcttcgggagtggaacactgctatgccataatgtaactagatgacgttatttgaagtgacaaggtaaaaaaatattgtaatatatatattttggcaacacttttgagttatgcaatatatgtagatttctcagtaccaaatgtttgataatcttccaatatatgtatataataatctacctgcaataatttctattaaataatttaaaagtaatttacgggcaaattattattaaatttcaatattttctacctatcttcgcaggcggaagtttttttttttgcaggcggccgattcctattttcgcaggcggaccggactagccaacgtccacctgcgaaaattatcttcgcaggtggacggccgccccgcctgcgaagatcggcgattttcatagtcgttggcatacaggcggacggtcgccccgcctgcaaagacccttttcggccgcttgcgataatgcttttcctagtagtgtgcccttatccacctctttttccgatggcagcatcaccccatgcccgacgacgtgggtggctcccttatgccattcctaacccaatgactagaatgatatccatagcattaaataagcggtcacctagaattaaaaatgatatggcaaagaaataaataaggaaagagaggagaccatgtcttgcatgagacatggtttctatacaacattcaagacatcatatgaaataagtagcattaaatttaagtatggaatagtggtgtttgcattggaagagtagtgtctagtactagtgttagactattctcaacccaatgattagaatggtgtccatagcattaaataagctaccacctaggatgaaagatgatgtagcaagtgaataaattaggaaagagaaggaaaccaggtcttgtatgaaacatggtttatacacaacttccaatacatcatgtgagataagtagcattaaatttaagtatggaaaaatggtgtttgcattgaaagagtagtgctagtactagtttcttgatgatgaggacaaaacggcagggtggtgaaaaggagatcggcggtggcggtggggagggcagaggaggcagcaacggacaagccatgcatttgcatcgtttgttgcatacgtttgaaccaaattgtttcatctagcgatctgaccatgttatactttttttttagaattaaaacattctttcgctatttgttgaaacattgtttttatataggtgaaataacgtctgattttttggaaaccgttgtttcatacgttgtagcaaaatgtttcatgaggtgatttggttgtgttttagtttttttaagcgattgaaacattttcaatctacttagtgaaacattttcgatctacttggtggaacagcgcccgattttgtaaaaaaaaaaaagaaaaatcaggcgcccgatttgtaggagccttggtttctctaggcagggacgtggaaggatgttttttaaaaaaagtttctcgaaggtttcggaagaggtttttcgtatttgagttgcgaggtatggatgaaaaatcagacgaaccatgtttacgtgacatggcgttataattttggaagaaaggattcttctttcatgtatttaaattaaatacgctacatgtgtttatataagtttatacgtgctgaatatttcttacccggaggtactcatggtgttttctgtagtaagtccatctctcttcatcaggatgcttagttatttcaagcatgggatgatgtcccacgctttgctgtggaatatatgttagatattaatgaaatgatttggattgaaatattataaaaatgatttaaaaataatgatttagcatgtgtatgtatagttttataataaaataaattgtagatatagttactatatacttgcacgttaagctttgtatgaatgcgttgacgtggcatgcttgcatatagattttagaagtgctaataaatattatacttgcatgataacctttagatgtttagtacacattagctcaataaaaagaagaaatttgcgacctatatatagctctcacccttggttagaaaacggaaatttaatttagattgagtatgggtgaaatttaaggcactgcaagaatctcaaagtacaattaacggttttgatatgggtgaagtttacaacggttaccttaaaatcgtgactcataagttgttggaaattaattgctgcagtgcgcgagcatatacagtactacatccattccaaaacaagtgcagtcatatatatcggtgtccaacgtttaaccgtccatcttatttaaaaaatttattaaaacttttttaaaaaactattcacatataaagtactatttatattttatcatctaataataataaaattactaatcataaaattctttcaaataagacgagcggtcaaatgttggacttgaacagtgtgaggaagtacaaccaacagtgcaaggttctcagtatcctaatccgtatcctaatatcttacaatattacgatcctaccaagcgaaacgatcacgataccgatcatagtcttacctagtatcctaaatgtcataatatctcgattctactattcattaccatacattttacgaaatcttaggtagtatcccgattatataataagatggtttgaaaatatgtaaataatatgctgaagtttatataaaaatcggttaaatatatcaaaactaatgtggtttctcttgataaatatccctatttgcatggtatatattattactatattttttatatagaatagctatatgtaattaatacaaatattaattaaacttaaaaaaatctcatagtattcgatcatacgatacgatactactttgaacaaaacgatactacttagcatcccgatattgataaccttcctatagggtcgcaccatttctctaagcaactatgtgtccgtgtgcacacgcggccacgcgctgcgcacctaatgctactgttttgttagtatttatttaatttagtactgattttttttctcatcaatacaatcactacttattttaagttatctttaaccaagtaaatctatttaatttagtactgatttttttctcatcaacacaatcactacttattttaagttatctttaaccaagtaaatctagaacgtacgaattatctctttttaaaaaagatcaatagtgtacgtgaaactattgcaattacatcgatcaaaggtgtggcccattgcatattttcattggtggcagctggcagctaggccaccacagtccacccgtttcactgtgtgtgtgtgtgtgacgttaacacgctactattcccttctgcctaatcaccccactaattttattattgtgcatatataatataatatatgcactaattttattattgtgcatatataatataatatatgcgcgtgctgcgtgtcgtacagcgcatatataatactccctccgtccctaaaaatttgacatcgtttattttttaaaacatgtttaaccgtcatcttattaaatttttttgtgaatattattcaaaaacttaagtagtagtatatttaacaatgaatcaaatgatatgaaaagaattaataattacttaataaaatgaacaattaaatatgtttaaaaaagtcaacagtattaaatattcagggtacaattttcccattttattgcatctgtttcactgtgttgctcggccaaacgtacacacagttcgttatatatcgtgcaacaccggtgcatggcgaggaaaccatacatatagagagagagagagagcccgtgaggtgtggctggaatcgtcatggctggtcatgtcttcatgattcggcaagaatcggcgccgccggcgccaccgtggtggttcctctctctggtcttcctcggcgctgcctatgtcgccaccgtcaccctccgcctcctcgcctacctcgcgttctccctgcaccgtcagcccaaggacctccgcagccggtacggtgcgtgggcggtcattactgggccgacatccggcatgggccgggctatggcgctagagctcgctcgccgcggcctcaacctcgtgctcgtcggccgtgaccccgccaacctcgaggagatctccaacacggtcaggtctctccacggggtggagaccaagaccgtggtgttcgacctctcactcgtggcgactccccacggcgacgagccgctgcggcagctcagggagacggtggaggggctggatgtcggggtgttaatgaacaacgccggtgtgggggagccggctatggcgtacctacacgaggcggacgtggaggcgtgggtgagaatgatgcgggtgaacctgtgggcagtgacggaggtgacggcggcggtgctgccagggatggtggagcggggcaggggcgctgttgttaacatcggctcggcatcatcgcaggccatcccttccttccccctctgcaccatttactccgccaccaaacggcacgtacatgcaacaaacacacgtaacatgttactacacttttttatagtaaaggttacttactctcactgtctctctctctctctctcttcgtaagtattttaatatttaatttttgtttataaggatttatgtaatgcttgttccatcaatcacctttcttcccgtgttgctcttaaccaccatcacactcccaaccatccgtgacaaatccaaaatgtaaattgacggagtgctaccgtgctagtgtaaaaacatagtagtatgactgaagcagagatatattaattaatatgcgcatatgatcgaaaaaaaaaactttctccattttaatttatggctgtgttaaatatccacaaatatctgttatagtatacctagagtaagttctgtattctgcaagttcaggccctgaaaaaaagaagtagaaacagcgagacagctgcatcggtgccgtccgaacagtttctttactggtggctaattagacttattaatgattaattaggggtagggattatggctgttcgtttgtaccggttagaagtctatccctccagcacagaaaaagaaacagcttattgttgcataattaattaagtgttagctaaaactaacttgaaaaatggattaatatgatatttttaagtaatttttttatatattttttaaaaaatacaccgtttagtagtttgaaaagtgtacgcgtggaaaacgatatagattagttgggaacaagcacaaaagaacagtgatcggccactgccaaccatccaccattcaatgagcgttatcaaagtcattttttcctcaaccttcttcttacaaacctaaaaattgtttatatttgtcgtcttaattacacatggttgtatatatgtgggcatagagatttataatcctttcatatgagttgtatatatgtgtgattgtcagcacaacctgatataattagtgactacgttcattaatttcaagatgcaggtacgtggctcatttctcccggagccttcacctcgagtacgcaagtgaagggatccatgtgcaatgccaggtaaccctgatctgacgagagcaatctgacgaaattttgcaaccaaaaaaaccaagtgaagaaacacacaacaaatttacgcgatgcatccatccgatcatcttatctgcatgcaggcgccgttcttcgtggcgacgaggatggtggagaacctggcggaggcgaggcgcctctcgccgttcacggtcaccccgggcgcctacgcgcgcgcgcggcggtggggtggatcggccgcggcggcccgctttgcacgccgaacgtccggcaccggctgctgtggtgcgccgccgccgccgcgccggactccgtgctcgactggttcctcctgcgcagccacctggagcagaggacgacgttgtctcagcaaatcagagcgtcgggggcgccggcgccgtcgtgacagcaggaagttcattcttggcgcttcgtcttgcgttcatgaacaataatagtgggcagtagcattgtgatatactgctacatccccgttttatatactataagttgttttaatttttttatctaagttgaacttctttatattatttgatcaaatttatagaaaatataataatatattttcaacacaaagtaaagaaaaactatcaaaatatgttcaatgttagatgtaataaaactaattaatttcgtgctataagtgttgttatatttttctataagtttgattaaaatttcaaataaaaaataaaaaaatcaattcgatttataatatatacggaaagattgcgtgcgtatgtccggatgctggtccatagggaaaaacctggttacatgactattctcgtagtgtaaaaacgtgcatatatacaacataacgatcacacacttgtggactgcccgtttgctagattattttggatctcattgaatgaagcgtttggatccgggcctagccttgcctagcaagaccagtcatttggaatcgtaacaaaatcctagctcctcagggcgagctaccccataggggtgagaaaaggctagctcacgaggaagagccaaataggtacgcctccaacggtaaaatgcacgtaagaaaaaattgttgataaggccgaagcgatttactccaaaacctactaccttcttcaacaactagtcccccaatttcattgttctcttcctccactcttggccaaagaattggcctcgcaaatctctagttctctttgtccacccttggctggactatcgggctcacatatccggtcaattggcaatcatcctcctcttcgccttgtcgaactctcaggtatgctcatcatctccggcgcacatatataaatgcagtagagcccatacgtagtaaatcagagggcttcggcaaggccaactttatttgaggataaaagataagaatcaagttggttgggtatgttgctaggaggagcatatctaatactaattatgcatacacctagtagtattgatcatgttaatcgtattataacctagaagtacagatgttgggtacggaggattcataccaccgtttcaccaaacccgataccatttgcatgaatggataggctataaacccaagacagcaaacgaatgactattcaacttaagacactcttctctccgcactactgttgagagagcgtctgtcttacttaaactcttatactatacttacttaaactcttatactatcactacatgacgtgtcatgttgtgaatatataaactctataactttcaactacttacattaaacggctaagatcattgtttgtaatagttttgtaaaggaaaattagtacgtggagcggtgctcatctcaaattaaaagaagaaaaggaatcccaggcatgaggcatcagtgttcagtcagtcaggcacctcgacggcgagacggcgcggcgcttggcgtggtgatgatggtgtgatcgccggttaattcgtccacccgaatataatgccgccgtagtggagtactggaggaggcacgtccaaacgaacgaaccattattattcctttaaccgctcacgtgcgcgcgcaaccccttcgtttccccacgcgtggcgctgatacgtaaccggcctcggcgccactatatatctgacgacgtcatcctccattctccaagcggcgctcgatcgccactcgccttcgatctgcttcggttttccactccaccactcgatcgccaccatggagccggttgtctcggtctcgcgcgtgcggcgccggtcgccgtcgtggttcacggtggacggcggcgtggcggaggagccgctgctcctgctcggggcaccggcggacggcgacgacggcggcgaccaggcgcgggcggcgctcctgcgcgtggaggagctcgagcacctcctcggcgacgtggcgcggaggctgtcgcggctggacgccaagcgcggcaggctcgagggccagatcgccgcggcgtcccgcggccgcaggggtggcggcgctcatcatcgccgtcacgggagcgctggaggaatatcggagtcggagggcgagggctacacgcggaagggcgcgggcgccgtccgcaagattctcagggcggcggccggcgacgtgaagaaggcgcgggagtggctggaggcggtggcggggaggctggaggcggcgctcgtcgacgcccgcgagcgcctcgcgctgcagcagatgctggcagccggagcgtagttccagcaaccgcggctatatattagtacttacttatcgaatgatactgcattagcgtatgtgtaatcccagctctgtgcttcttttaattagttttctgtttcatagactcttcgtcgtgcatgcatattcatcgacattgttgcattgtcactgtgacctctatggctctatgtaattaatgttattggttcctcgttttttaacttgttctgctcccgttccgagagttacttgttgtagtattatgcaatgtcaaattggtatattgtatatgtcaatataggaaggtgtttggttcaagagaaaaccaaggagaaaacaaaggaaaattttctattggaaaatctactgtttatgcgcttggaagaaaggaatatatgtcaatataggatgttttgtgggtataaaaaaattggtcttcgattgtgcgaccggagagcaagctattgtctgtaatggagttacatgcttgaaatggtagccaaaaatctcttgtttctcttcggatggcatagtttcgcttaggcttattgatgaatttaggtaaaattggttctataacatcaaaagttttcatttgttggttttgcaaaaccatagtttcgcttaggcttgttgatgataaaattggttctataacatcaaaagttttcattttggttttacaatacgaaatgtactgagcaatttaatagcaccaaagttgcatcccgatcatgattttagtttctctttctagagaaaggtatttttacccgggctttacatccaacaggatatatacaacctttttaaaattagaaacttagtatttcaaacaggaacttagccctcaaattaataacccaatctgaaattcgctcctacgaagatttgaactaaggatcttagggtgctactcaggtcgctgtaacttagtcctgattttagttttgtggccggtgccgatgaaaaaagtatacttcttactactactattactattctagcgtgtatgacagactagttcctctaaggctggatggattcagtatgttgtttgtctcagtttttgcatgttgggattgtccaacacctatttttattcctactgtactcttggctagatgtgctacaacacagacagacaggagaagtattactcatcttccattgtctaagaaaaaggaacggagggatgcaaaatatagtgggattattcctataaagtacttttgcgcacaaaaacatccgttagaagccagtgttttctcttcttacgctaaagagtgagatgagagagaaaattcctacactatagatcttttggaaaacatgattttgaaaatgtaggaacaagaaaaacattttccacgaatatgatggaagtgaatccatgggatagattttgaaaaaaaaaaactcgtcgttcggtagcactataggaaaaacatatgaagtttgagagacggagagaaaacattataggtcttgtctcttcgtaatttttcttcaagattcatatgaaatgagcaattccataggaatttcaaaagatcgtgtgaaggtattagtccactttacacccttcaactattacatttgtctaaaatacaccatcaaacttcaaaattaaaccgggtatctaatacccctcaattattaaaaccattagacttacccccccccccctcgttccaaaccaggcaattttggtttacgtggcatctgacgtggcagtccagttagcgaaaaaatataaaaaaactataggggcccatctgtcagttgctaaaatatctctctttctcctcttcctctctctctctcaatctcatatttcccctcttgatcccgtttctcgagtgacgacacacaacggcacagaagcgccgagcgccaccgccgctgccagagtcctccctctggaccaccgccaccgagatcctccgcgagactgccgccaccgatcgatgtcctcctgagtcccgaggtacaccacccgatttcgaccagcaacagagaccaacgagaagaggacggatgccgctggattttgtcctgctcctccctgcatcaagtatgagacccgccacccctgagaacctccaccgatccatcgcctctaggtgccgctgctccacccctacactgccgcggtgctacctcacgaatctactcgaggcttggctggcaacgattcctcatccttgagtaaacggcgatggcaggggagtggcttggccctctccgtctcaacctcctccttcgagctcgcggtgaaaggggattttggactttatgccatcttcccaacgcctcattcccaaatgccatcctcctgaacgtcctcgctaatttgccactaggccccataaaattgttgattctatgccattttcttcccattttgatgccacatcagcagcggacgtggaatctcgatggcgaattggccgtcttgcccctggtgtgtgtggacaaaaaaaaaagcgagcagcagccgtctccaaataagccacagcaaacaaataagattctcagcgaagaaataaagcagggattttggatcttgccacgatgggcactcagacagaaccatggcttcaacaaaccctagaccatcagatctaaaaaaaacaagtgaatccggagaaaaaagtgagggaaacagatgccaaactaaaccaaaagaggggaagatggtggatctatcgatctcatgtatgtgattggtgtcacggtttggccgccgtcgccagtcggtggattcatcagctgctactcgcgtttttttagggtggcggaatgagacgacgagaaacgacacgtttttctgttcacgcgtgccaaggggtaccggtgaggtggagtcaaaattagaggataatggcatagaatcaacaattttgtggggcctagtggcatattagcgaggacgttcaggagggtggcatttgggaatgaggcgttggggaagatggcataaagtccaaaatccccagtgaaagtagctcggctaactgcgagcccgccaaggaagtggcgtaggtggcatcaacctagcggtggaggcggtataggcgacgtcaagatggcggtggaggaggcgcaagtgacagcaagctggctgtggaagcatgcgagcgacagcaaagattgcgctggagacccaaggtagcacgtgcaaagtatatagggagggttgaagatggcaaactaggggatagctgacatgtaaaaaaaaatgttgccatgaaaacctcctggttttgataattgaggggtgttcgatacctggttttgaagtttgaggtttgaagggtatttagataaatgtaatagttgagaggtgtaaaatggacttgtacgttttgtgaacctcattattttgttccaagggattctaattttccttctaattgctatgttatcttccaagccttctaaacaaggtcctaggaatgttgtatgggcctaaaaataggcccacggatactaaacatcatgctcccctaaaaagcccaccaaatgagtagtctcccattctgacccttcctcccgtcgccgacgccctaaaccccgcaagaaacaccacacctcgccgccggcgacccaccggagagcgggcaagccagcctcccgcgccgcccaccccatggcgtcccgccggtcgctccatctcctcactgcctcccgcggcatcttctccaccccgcacctcgcctccctcggctggttcgacaagatcaagagcaccttcaccggcaagaagcccgacgaggccaccgacccctccgccaacttcaccctactccgtgagtgagctctccggacgcatatgccctgttctcttctcttctcttctcttggtggcggcgtgggtgatggccctcctgattcggcttcttgtttggttttttggggggagattcttgcagagttcgcggattcgatggagaaggcgaggaagctggggacgttcaagaacttcgtgatggggcggtgcagcgaggccaccgtcgtcaacgccttcgagaagcactccgccgtcctccgctacctcggcaccatcgaccccaccggcgaggtaggcaaggatcgattgcattcgattttttgcgttgcgttgcgtggtggttgtgttgattgtgttgctttgcagaaactcaagaacagcgacaagatcggtgccaccaagcactgcaactgcacgattgcggatgtggagcacatactggccaagtacacatgggctaaggaggctcagaagaagatagtaaagctcaaagaagaagggaagccgttgccgaagaacttcaatgaggtaattcctggtcttgaaagaccaaaggtgttattaatctagttgttcactacacattttagagatgcctgttatgaccgttgaaaggaacataattgggaacagataggaattgggaagaaatataatagattgagaaaatttgatgtatttgtctatttgagaaatataaacctaaaagcataaggtattaaagtcaatatcatggcccacatatgatggtactactgcgctctgtgatttttttcaatggcactaagcaaattggccccctaggatttctgtatgccaaaatatgaatgaggtcagtgcagagatatcattttctctagtgtttaccatgtatctgtgtagaatcctaatttgtgatcaaagtggcaaaagctactttcaattgttgtaaatgattttctgaacaatatttaaggagagagtaaaaaatgtggtatgtgtttcgattaaaagacatgatagaagttagtgattcatattacttcttacatatattagatatcggtattacaggatgctcgattttgaatgttggatttcagcttgtccaaattattgtcatcttgaatgcgacattatgccatataatctttcagtcatattgaatcattttaatcatatcatgcgtgtaggtgaaaaacctaatgggttctacaccactggacgttggcagatctaatctggaaaagagtggacagataagtagaaatgctatgtgcccctgtggttctaagaaacgatataaaaagtaagatgcttctgagcttgattctgttggtaacagtgtttgcattgtggtgctgctattctttgattggctatatttccccggttccttgattggctatatttcctcattgctctgactgcaatagtatcttttacaattataatgaggacaattgttctatttagtatacacatggctcttgctatttggagtatttagcaaaagatagatcaagattaatggatttaaactttccaatatgtgcattgtcctgtaaattttaacctattgccaatcttgaatagaaagatacatgtctcaatcctatatgctacaaaattggaagctaccacaatgtttgtgcatttcatctaaatgggttgttgcactatttatctattaaggaaataaaaactaagaatgtaataactctaatggtgcaaaccagatttagttttatatatttatagtgtatagtgtatttctcgcccatattgttttgacatttcccttttgctgccttgaatttgaaggtgctgtggagcttcttgaagtgaagaccatgttttcctttgtgctgaccacatgaaatattttgattagccatgatcaagaagagcattcctctctttttttttcacttcagcagcaatgcagatcatcctgccacaaacctgacattgaaatatgtaaagcaccataactgaggtttgcatgactgagttttttttttgccaaaattgcattacatctaagccggctttgttgttaaatttgcttgtttatataagaagtcatggaaatatccatcacattctgcgtagaaagcctgaactttgttcaagcaacgcccgtagatcaattttttttttggtttatgggtacattactaagtcgagagatgcactatacatgatgtatcctgaagctggtcattccgtttgtttgggaaagtagcatgtgaatactgatgcaattcaggacccttcattgacattcctaagtcctatagaatatggaaaaattttgaaaatatattttttttcattggtgttacatcaatatacacgtttaaaagaaatttatgaaagtataccgttgttgcaaggcggtgccacgagatcgcaagattcgccatggtctcgcagattgagggcatcagaccgcgcgaccgctcgaccttgcgcggtaagtgcgctagaccgcgatagagaattcaaactagcgcgattaatacattactcattagcaattaattaattaatatcatttctataattagcattattagttataaataattgctaattaggataattagttactaatcattctaaagcggtgtcgctgtttgccccttcgagacttgggtggtggttggatccaggtactcacatacgatgacggtatatttgtgctagaaaaattacatcccggatattctgaaaaaataaatgaacagtatattttcaaatttaatttctatagaatattgcagctctacgatagcagacagaaaagacaatgccccacagaaattttaatcatgcaaaacttttctttgctccaaggtaattttaaacatacaaaacttatcttctctcaaaatatgccagctacagtgtcattcgctccttaggggggagaggatatctagttatctagataggggaatcactgaattggcagttgacccaaccagaaaccgcaaaacatgttctagacttcctagtcctatcttcacttggtaggccgatcccatgtcgtctctgatgtgaggctgttcccgtagtacacctgctttgtagattcatccaggtatgcctgccaacaatggaaaagtcagcacttccattttaacgaacgtaaatgttaaataagcaaggctatcatggcacgatactggagcagagaatacgtgaacttggtcctcaagactttcttttagtgtgtatttgaattgtcatcagaaaatcaagttgcatgctggattttattctagacgtatctctagtcattggaaggacactgggatctgaaggaaggttgttaccacgaatatgctccagaggttggagctcggtgctttacccatgctactaacaagccagtctttgtgcaactgaacttcaactgtaatcacatctctggtgaagagattgatgaggtgaaggatgttctgagtggtaaaaactcgaattagcttgttagattaactagctcctatcttgttctcgaattagcttcaaaatgtttcgcttgccaggttgaattttcttcaatttactccatttaatataggttgagctcaactagtcacaatagaaacagcagtaaaaattgtactaacctgccatccagaaggaagacccttgcagagctctgcaagatcaggttgtcctttatgcagatcggtgacactcactggtgcagaaatagtctcgctatttgcctccttttttgcttccgctctcctgcgtttcacacgatcacgcctgcacaaaatatttgctcaaactgaaaaacccgcaatatatgcaacggaaaaacccacgtactccctcaaaacattggtagttgggttcccaattcccagttagtcaacagttttccattgcatacctaaatctatagcattttgttgtagaaaacttaaaacttgccatattataaactaaacagttcaccaaaaaaaaagcataaaggacatgtaatcttaatttgtacaatggtggcatgattcaaggtctacccacaacttatgtcaaggcaaatcaacaactatttttagacatcccatctaaatagttgaaaagatatcggaatccaaaaagcttttaaagttcgaattgagacatgtccaatcatttctccaataccagagtataagatatataggcatatggccaagttccagaaaccagctggaggtctaattgggcatctccgagatggtttccagctgtttcaacaaaacactccatattgaatccaacaaactccaaaggaaactaactagcccaaagcagaagttcagttttttggcagtcatcaaaccagctatcactggtagcaaccacagaacattgctcaactggcagaggtttggccgcacgaatcagacattacctatacctatttcaagttggaataaaatccttatttgttgtgtttggttcaggaggtgagttgggttgcactcatccatgtttttggaatgggatgcccccatccatccatccatcccaaacagaggcaaagcatgtgttttgattgaagtgatgggatgggtcgggtcgtgaatccacttgtcagggtgtttggtttggggacaggtgagatgggatgattcctgaaagggaatattccctctagatctaggtcagcttcatacctcgaaaactgctacaccgtccaatagtccaatttctcaaaaaaataggatcattccatcccttgtgccaaacacatggatgggaccatcccatcccataaaaacagggatgggtctaatccatgccacctcatccccaaaccaaaacattaagcatgtgtttggttccagggatggagtgggttgggttgggttgggtcgaacccatttttcaaggtgtttggtttgaggataggtgggataggatgatccctaaaaagaaatattctcctaagatccgggttggattggtccctcaaaaattggcggaccaatccatcccacttttctgtctcattgacatgtgggtcatccccgaaaactaggatcattttccatccctcatgccaaacgaatagatggaatgatcccgtcctaaaaagaaggatgagtccaacccatgacccatcccacctcatccccaaaccaaacacatcccaagggatggcctatcaatgagaaaaatgggttggattggtctgccctttttaagggacaagggcaacccggatctcaagggaatattctcttttagggatcatcccatcccacctgtcctcaaaccaaacaccctgaaaaatgggttcaacccaacctgacccatcccatcacttcaaccaattatttgcccctaactgtcacatgacatggatggatccaatgaaacatcaagggcaaataagagatcacatgaagttgacaggggcaaataaggtcatcctttacatcatctatttactaatctaattacattagtttgctatacctccaaaaaatgttcatacataactttttttgtagtcatacacatgcaaccaaagtgaagtaccaaaccctcaaaagcaggcagctaaaacatattaagctagtgtacattacaaagaacaaatgattatcatatgaaaaatacaaacagatatcagatatggtaatactgcaaacacaagataaaacaaaatagccatgacagcagtcagaagtaatatgtggtaggtcttaactagtattctggtaagttaatgaaggtattaaaatcaaactatcatatagtaaggaaacaataccagtcaccaccaaggggaacaaaattggcattttcctgagcttctccgctggctatctgttgcttgcgccactcctgaaacaaatggaaggaacataaatgaattggcaacttcaaagatatttcatgtatgtgatgtcaggcgaaagagaagtttacatcaatatccttttgacgctttctttctaatgcgtccaaagcactttctggctcttcatcctcctcatcacgaagctcctccttagcagctttccactattataagaaaatacacaagcagttgtgttagcaaagtgaaattggtggaggaataagtatatgcacatcaatactcacctcattttatgccttaccatgtaaacagattgatctgcctttaaactaagaaatggtgaaatgagaaaaataaatcaggtagcacatagttaatatgttttcagaatctttttcagcataacctctatttgacagaaggaaataaacaagtttaagctgctctagttctttgttggaagaggcagttgaggacttcacaatctccatacacttcatcaggtatatatacataaacaattagcaattacacatgttgtgaacagatatgatgcttggaaacagttataggaggctcatcgtagagagctaccttatccaccagacttgaaaccttcttattagacctcagtgatgttgcaacagaaacagctcgcttcttgctacgaacaactgcaaaacacagcaaaaggttaaacaatgttttccatgtaggaaccataaacaagatagtatattagtttttttatgaggaataacagaattacctttgctctgacttgtggtacttgtagaagcctgtgcagaacttccctgtatggatgctgatgctgatgttgctcccacaggttggctcaaagatgcaagttttgcctccttggatatgatgttgtcagactccctggaatgcaaactactattcgcaggagcaagattggaagagcttgttgtgttatctaatacactgctagaagtggcagagactgatgccgcgtagtatccagaaggctcagctgcttctccagtggcagccatagtgactgaaggatagctatagtaagaaacaggtactggagcaatagatgtggcatcaacaggaatagatatgccacttgcagatactggtgcatagtaaccattctggtgtgcttgaacgacatgaggctcactcgtttgcatataatagctggcatgtgtaccttctgtacctgcagcagcatagtactccattccaggaactgtatagaccaagtttgcttgatcgacataggactgtggaattgtttcagtagaaacagatgacacagcaggttcttcaggaggaggtggaggagctggttcattctcaggtggtggaggtggaatccattcatcttctggtggtggtggaggaatgtcgctatcctctaggggtgcagctgaaccgtccaacaataacaaagccggtgactgaacttgctctgatggaggatattccttaataggcgtggaattcgagtgcttatgctcttcaacattgtcatcgtcaacctccatatccacatccatatcttcatcattgtcggattcaatttttgatgggactgttgtggtatcattttcttctgatttctgaatggatgatgttgaaaatggctcctcatttttaacatttccatccatcataacgtcagtgctcacctcagatttcaaaccctcaccattggagggtggcatcatcacttcagcttcattaggtgttttgtgttctgtgtctgctttctctggatgtctaggttcagtggtagagtaactagtttccaatttggaaactgagaattctagttgcttaaggtgtacctcagcatgcaaccacaatggaagcaaagaagatccatacgatgaaagtgcattgcagtctgatattcgtatctcaatttctctttttagcaattcaacattgtaaatggaaccatgcaacctacaacagaagcatgacaaaagtttagttatacagttcaaggtgtggaaaaatgcttgaaagaggaagtaaatggcagaaaaataataacaagcacctttctagcggcttcaatctttgcagcaattcctcgccatatcttgcaagctgcaaaggatcaatgtccatcgattcatgactagtgacagctccagcataagcataagcatcatgagtaggctgtcccattcccaaagtagcataagccactgagccatttagcacagatatatcacttggataagcttccacggcattgtgggtaagggcatgtgcttgggcctccatagagtagtctacatgagtaggagcagatgcagaagtgacactgtcagctgcaatttcagaagctaatacattaggaatctcccaagaggtttctccagtaactgtgttccaatagtaacactggttgctctgctcatgcattatagtcttccaattcccaccaatgtcaccaacaatttgcatcccagatgagtcaggaatagcttcagttgctgttgcagtcccatcttccagagttggctttatggcaacaacattttcttcagcaatatttccagtgcacttcttatcatcagcttcagttaactcttgttggacattagcagaaccagccagatcactttgtgcatcaccttcattcctagtcaagtccccacgttcatgagtaatctgaaacaagcaaagtagtgttaccatgaggccaggtgtgttcaaactcttcaataataaaatcaattctcaagccaaagagatatagttgacaacattgcttcctatagtggctagtgtacaggaaaacaatattgctaagaataggccaagggcctgtttggcatggcttctcctggattcttgcggaaaatagagtttgcaaactgaacaatgtaatttaatcatccaacggtagactcaaatgtgtgaacaaaatgtctcgccctaacagcatttgggcccagctccaactccaagatttgttggagctagagatatcgaactccaagtctccaacaatactagagagtagctgtaccaaacagggcggcttgttggccaagcaagccccccccccccccaacaacacacacacacaacaaaagctagcttattataagccatttcataggctccagcttatttgttgctttatatagtacaaaactagcataagcttaagttcaagagcccataagataaaccaaagctgtagatcgacccaaagaaatggataaagagaagccaaaatgaaaggtagaattaccttatcacctgcatctgcaggattagcctctgtttcatcattgggttgatctgctgcttcctcttcctcttcatcatcactatattgcccaagcaacgctagaggattctccttcttatctggaaataagaatggatcagtaaaattgcaatagcttgcatgtggcaatctgcattgcactttattctgaagtatatatgaagatacacagtattcgagtataatagaagtcaaacaagtggtatatataggttaaaactatgttacatgcagtatatcagcctggcaataatataacaaccaggttaggagatgaattatagagaaagagacatacgaaccgaggaggcaacaatcacattctgatccgcacgcttagaggctgccaaaagagaaattacccataggcatttactcaattttgacagtagcagcccggtttgaagaatttactcaatgttccttgcaggccggaaccctacatgtgcctcaaccatatatgtggagcatatatatgcttgtacaaaaattccaaatttccaccaaatttaggttccacaggcatgtcttctttacaaatcccttggaaggaaactgatgaaacccacctgaagaagatggtgaagtgggaaccccagtttgttggtcatggttttcccctcgctctccctctttcgaaggtgttccccctgcaaaataccgtagcagcagtcagcttttcatcaaaaatatctatcccaaaatatatcagaatgcctctggaggcatgctaatttaatatctcttacatattaggtcgctatactgttactacttacaagcacgtattgctaccctaattacccctttcatcgttaaaaaactaggaagagtatccaagaactacacctctactatataaacgttgatttaatttgtttatcgaccttccttcccttaaccaaacctaaacttttatttgctctgactgctatatgaggtttctgccccctcccatttcacatgttcaaaatttggttagttcaatataaattcacctctgccttcaccaccgaaccttttcattgcccaagctatcgccgcaacccaaccctatttattcttttttaaggcaaaaacatcagaagcaccatttaagttatatttatgtgtttatgtgcagcttttatacatgattttgtgttatctaggttcagtgcagtttcacttgtccccgtccaacgtatttattgtcgttccttggatgttgacacttatcttctcttctcttcctagtgtttaaacatgatgataatccatatttttgtttcagatttggccagttcagaagatgtgctggatatatttatttccaaatgtggcgaacaattgtgccctttggtattattaaaccttattagtcaacactttggataactgcttagatactgctgactcaaagcctaacaggctgaccatttgtcagttaggcacttcatcctcctttcaaatccatatcgtgtgctacctccagatcatacatactagaaacaaccaaacaacatattccaaacccatccgcacggatcagacagccctcaggttgagttcaggattagcttcgagcagtgggggatggaccgatccacgcaccaaacgataataagtaaccacaagacaaaaaacaatctcgtgctgcccgaatcaatcaagctcgatcgaaaagcgtagcccgcctacaaatctagcactagtcacgaatcaaccgctctcaaccatcagctattccctaaaatcaatcaggcgagcgagagactaatcacgaacgcacgccgcgatcgatcagaaagcgaacgagatcgcccccccccccccccagatttttcgagaggccgtaggacgactcaccgggggagggatcgaggaagaggtcgagcttcaccctgcggccgcccgcggccgccttggccgcaaggcggcgctccttcctcctccccatcgcgcggcgcagcgggcgggcgagcgagttttctctctcctgttttctttttcctcctcccctagggttagggtttcggaggccgtgagatggggaggaggcgaagacgaagaacgaaagggaggggtctcgtgctctctcgtgtttggaaaggagaggaaagcgaagcggggtagggcggcgaggcggtttcgatgtgcgcgaatcgtaaagcatggggtatatatatgggcttcagagtccagaagaactcgcttatcgttgggcctagtagtagggaataagttcacttgacgtccctcgacttcatgtcgagtctgtctaaagtccctaatcgcaataccagaaatttctacccctcaattattacaaactgtgcaaaaaaaaaaaaagtcccaaggcagtattgacccaatttttccaggtttcgctgacatggcatacagtgggcaccacatgtctgtgtcatctcttctcttctctttcttttctttttcttttttcttcttctcttttctatcatctttcctttcgtctcctctattctcttcttcagcgagactgagaggctagcagacgaagcaggcaggggtcggcgcaggcaatgactacgagtgcaaaagaaacatcagtaactttaataatcctcaagtttctaaatgataatcaaattcatagttaagccgttgttgtgttgctcttctctctcgcgcatttcatcgagcatctctctggccaacggcaagatcttggccttccactcccggaagtccgcctcgaagcccaaccgctccattcccatcaccatcaccatgtacatgtacttgtccaccttgcagcctcccatcctcaccgccacctcgtacacactccgccccgcgcgcgtcttcgccctcaccaccagcgtgcgcaccagttgtacatgtcctcctcccccctccacgaccccgttgccttgctccttctcctctaggaacgcctccacaagcgcatccacggcagcggtggtgccgtcctcggtgaccggcgaggaggacacaaacgtggcatagagggtcaggttggggcgttaccaaggctcggcgcgggcaacgtggagcgtggagagggcgaaggaccagtagccctgacattggagctcggccatggcggtgaggaggtctctcttgaggaggaggccgtgagaggttgaggcggcggcgacggccggggagcggttagagtaggtgagtcacttgagggattgcacggcgaggatggcctccatagatagggagcagtcgcgctgaagcgggccacagttgatgcgccccgcccctgtctacttcgcctcccacccgctctcgcgctcgcccaccatcgtcctgcccgccggctcctagtctcgctgaagaagagaagagaggagacgaaaggaaagaggagagaaaagagaagaagaaaagcgaaaaagaagataagagaagggagaacgctgacatgtggggcccaccatatgctacgtcaacaaaaccaggaaaattgggtcaatattgcctcagtgtctttttttgcatggtttgtgatagttgaggggtagagatttctggtattgcggattgaggacctcaaatggtagcaattactattctagcccatttaaaatcccacgcaagcatgtcacatcttcactcactagcaattacgcatcatttacaatattatattatagagatcaataaaattattagaagttaaagctcacatgcaagtataccacatcatcacccactagcaattattattctcgtccatttaaaatcccatgcaagcatgtcacatcttcactcactagcaattacaaatcatttacaatattattgtcaacgtttaatgtcgcggcgattccggtatttgcatagtatggggatcgttggtaccagatatatgcgagacttaggtaaaagagatggggacgaggatttttatacaagttcgggcccctgaattgttaggtaatagccctacatcctgttggccgaagccggtcattgctcttattcaccataatcacaccagtacaatatttggggtagcttatctaaccgtcatcgacttggcggccggatcaccaacactagtcgacgacggggtagtcttcctcctcgaatcagcattcagcgaggtcagagatagcgctagattcctctctttggttcctgtaggtaccatatggggttttcctaggcttatctctgatgtcgatatctggcagcttgtcttggcgtatgttggcttgtatgttgatcttgtgtcttgatctattgttccgtgtcccctctcctcctagggggccttgtatttatacacataggtgtccacttgtccaagtagaactaggaaaaccaatatagatacgatccgagtagtacttgtcgtttccatgtagaactctattcatccttccttatgcggaactcctcctatatccgaaagttgtttccgtataagacatggtatgtggtgggtcctaccgagatttagtcaactactattaggtatgtggtatccataaccctgacaattatattatagagatcgacaagtatgtgtcaaatcatcttcctcacattattttctcaatatttcaactttcactatttcgataatatttaacctatacttattcatgaattccgcagcaaagcacggggtatcacctagttctatatgtgaacacaacaaaacattagagacaattagctattttatttattgctgactaaaaacaatagttcagccacctaggagaataggagaacaaccaccaaagcacaacggttgcgtaccaaacaagttatgaagctcacatctatactatctatatagttgatgcccactaacttctaaaacataatatgtaagtgtgacacatcattactcactagcaacacttagagtattttaaatatcatgcaaacatgacatattgtttacaattttgttatatttttagaactcaatatgcaaacaatgttaaacgattaactccacatcattttttattatttaaacatgaacatttaccatttttataatgtataacatgtatttaccacatatcccgcaacaaagcgtggggtatcacctattcctctaatgatgggattcttcttagagcatgaacaatgcaccgacacggtgagtggttttagctcgccaaaaacggagcgactgctccacgttgtcctctggcgtgcactctggagctacacgtgtcctcgacaaaggattttagtcattctcagtttgttgatttcacaaattaattaaatgtcatgttggagggctgagaatatagcattttatccctagccccaattcccgcataaattaaacttttttaatgttcactccataatgttagagcaagtttaaggccattcccaacgcaataactaggatggtgtttatagcattaaataagatgccaactaggatgaaaaatgatgtggcaagtgaataaataaggaaagagaaggaaatcatgtcttgcatgagacatagtttctacacgacatccaagatatcatgtgagataagtagcattaaaattaagtatggaatagtggtatttgcattggaagagtagtttcttgatgatgtggagtttatggaaactatatctagtatcttgggttgggaatggcctaatagtataaccaactactagctgcaaaataactatagccaacttaatagccaattcatacaaaaattacctataaacatacacttacatggtcccacccatcatacacgtattctgtcttggagtccgtgttgcagctgcctacaaatctgtaacctgctgctcttctctctcctcttttatcttctcggtatgtggttatagttggcttatattctgctattgtacctgctcttacaacgactaccggttgtgctatttccccttcttttctaactcaccactctttttccgcatgcacccttttttaaaattgttaaatggtgttttttttaaaaagttttctacatgaaagttgctttaaaaaataatattaacctattttttaaaacaaatattcaatacttaattagtcattttttcagttcaatgtgcgtgggagatgagttcccaactcattgagaataacacagcctccggaattaataagttttggcacgtggtactgttgcacgctgcagttttagcaaggaatcaaatctttcaccaaatcatgttgttgaacaaccatggtgaatggtccaatcactttctagtgttgtactaccattttagtcacgtgttgcgtgtgataaaatggaatgcataaatgtttttcaactaaaaggactattcaagctagtccgtcaattttagtttacgacttttcctagcacccttgtaaatagccacccttttatgcagggacatattcttagggaatttgtttcgccttaagctttcattgtctgcttagggtgtgtttagttctttgggtgtaaagtttttaaaatatacggacacacatttgaaatattaaacgtatagtaataacaaaaacaaattacagattctgcctgtaaactgcgagacaaatttattaagcctaattaaacagtcattagcaaatgtttactgtatcatcacattatcaaatcatgacgtaattaggcttaaaagattcgtctcgcaatttacatgcaaactgtgcaattaattttttttcccacatttaatgctcaatgcatatgttcaaacatttgatgtgacgttttttgccaaaaatttttgggatctaaacaaggccttagttacctattagctataagcaaaacttgaattctagttacctattagctataagcaaaacttgaattcgaatcttagttttgtagttgattttagggttttttatagtttattttttacatggggttttaaatcgtaaaacgtatagatagatataacctttttatccatacataatatggttgatttttttcaaggcttctcaatcttaactctacggataagtcataatttgccgcatacggcaacacattgaggcggacttctacctaattaaaaaccatcgctctcaagatggtaaaattcgagacaatttctcccaaagcgggaagatgcttggacctaaaccaaaccctctccataaattcgtcaaacagatagacaagcaagatcccggcggggcccaccaggttaggaagcgggagccaatcagagaagaatggtctaccgaggttggtgggcccaccagtcatacacagcagcagcagatgaaagtgatgcttggccctgtttagttcccaaatttttttttctcaaaaacataaatgaatctttaaatatatacatggagcattaaatataaataaaaataaaaacaaattacacagttatggaagaaatcgcgagacgaatcttttgagcctaattagtccatgattagccataagtgctacagtaacccacatgtgctaatgacggctaaattaggctcaaaagattcatctcgcggttttcagacgagttatgaaattattttttttattcgtgccaaaaaccttttctgacatctggtcaaacatccgatgtgacacctaaaaatttttatttcgcgaaataaacagagcccgtgtgtcgcgcgtttgagggcatgtacaacggtgtttattagtggtctctctattgccatgcaagtaaatttgatgacatggaagaaagagaaagaactatggttgttatgcatgacaacagctcagagtcgactcttagcatttattagagcaaattttgttgcatggttgtgaaacaaaggaaagaaaagtaagaaaaagtattttgatacattaatgattagagaccatattgtctctaactattataagatgctaatctttagataacgtagagcttatatctgactctacctttgtatatgccctgatgatgatctccaactggatccggggttccagaagggacaccgtaccaaacaaatccagcaagagcccttttctcacttgaaaacttgaaatgacggctttcccgttttcgatttatcaaaaccgattcataaattatttgttaagatataggagtataataaactcctaatgaggtgtttttttagcttaatttttttgttaaatgccaatagacgttcgattttgaacagattttttatttggcgacatgttattgctcgtcctctgtgtgtttcgtcaaaaggggttgacacacaaggaacatccggtgcacaatattttcccatttgagatcatgacctaaatgattttcaaagttaacgtaatcaaagattaaactagcttttaaaaaacattacttaaaataaaagaacaaagtaccagacacctttttgatgtccacatctacaatgatggccattttaactctctggaaagagactttcatgtgttcatcccgtaatctctccgtcaaaaaaaaacaaaccctgcgtttccgtgtctaattttaactatctgtcttatatgaaactttttataatttatattttcattgttgttagatgataagacataattaatattttatgcgtgacttgtctttttaatttttttcataatttttttaaataagacggacggtcaaatattggacacggaaattaaggtttgtctttttttttttgacggagggaggacagctcatgacacgatcggatcgacggatgctacagctacatacttcttatctactcaagcgggtagcagtgcaatatttgatgcctcagttttcccattgctccaatggataaatatgtgtggtgcctaaattgcgcatcaaattctccttttagtccctgcaattcggtgagctcgatttttttaatccatttttctttatattaattgtccttttgttttttcttttgaaaacaaaccttttcccaattgacaaggaaatgttgtaccctcacaaaagttttatttctcaggtattacaggtggatgatcagatctttgattaaaagtaagattatttgagagttttattttgttatattacaaaagtatatagaataaaaccattgtcattgctcggacgtaccgtgcaaacaaatttatactttttgaattgtaaattttcttttcgctacccatatacatatacgcaggatgagctcttttccgtaactcaaataaattcttttctaaaatttataataaatcatactctaatgatccgtaccattttcctggtcacgaatagctctagcccaactacacattcgaactgggcctttaagtcgagtcataatagtttggtttatttcagttttgatattttttatatcttaacaaacttatacatatcaaataattagttttgagcccttagactaagaatcagcacgacacaaatttacaggtatttcggtggtgtttaaatctcctaaagatgaagataaagattaagtgtttcatgtaaaataaggtggtaataatgtgtgattaattgagttttaattattacacacttgaaaaatagattaatatgatattttagaacaactttcatataagttttcgtacgaaacacgccgtttagccgtttgaaaagcgtgccacgagtatctaaaagtttatctaaaacttttaatagagaaaagaacatggcattcatgtaccaaagatggagttatttttccacagagagggtaacaaacaaacattctccatcaaaccaacgctctactcaaacttcggcaatatccatatacaaaggctgcttttagttcatgccaaaattgaaaatttgattgaaattgaaatgatgtgaccgaaaagttggaagtttatgtgagtaggaaaatttgatgtgatggaaaaagtcggaagaaaaaattggatctgaacacggtgaaagtcttctcttttctgccatgaaagtttgtacgcaccataattttttttgataggatcgcaatacaaaccaacccatcttaacgttatgcttattttcactatattattttctaaaaaaggaattatatagttaatctattactttaaaccatcaaaatcagataatctataatccgcttaaagcaattagatgggcttacatattttatctttttatcgtcttggtctttggtttctaaaattcacacaaatactacttctttatataataagttcatcttttcctttttgattgtctcaaaataaatttatttttaatcaacatttgtatcagagtatataaaagtacaaaataaaataagaaacaattatttaaaacgaacggattacttcactgcactcaagcttcaactaagcctcatcagcaaatggcatatttataaacgaaaaataatttgtaaataaaattttatatatatatgtttttagctatttaaaagtaaagactaaaaataaactttgataaaaagtaccttaaaatcaactttaaatataaagttaaaaatatttgtattttggttgataaaaagtataatcgaaaagatgacgtgtggacgtggcaggctgagggcggaaggaaatatgccgttggcggggccagctagtgcggcggtggccacgccaaccggaaacgggcgatccacaaccaccacctaaaattaccaaaataggcagagcgcggatgatgtcgctgtctgtcggttccctctgggccccacccgtcagcgactccacggcacgcgcggacaaaagtcagattgggccagtcgcggggcacctccaacttttcgcgcagcagtgccgccagcagcagtagcagcagcaaacccacgtctacccagcctcactctacccaacacccacagacacgtgggacccacgcgtat

SEQ ID NO: 10218 - DNA, 2985 bp, Oryza sativa
gagcatttctatatcctccttatttgcttccgattcataattgttgcctttctgactatttttgtaatttcccaccaaaccttttcttatggttcatcatgaactttttgtagttaccatgcaccagttccacatagttacacggtccagttcttttagacattgtacaagataaggagaatttataccaaattttcataaataataatgctactgatcatcatacattatttgatctgagctctctctatcctccttgatggttatctaaatttatatcagatatattgagttattgactaactgcaaaaagtatcttctagaagagacatggtctaatgaagttacctctttcataaacttttgtttatttaccatgcaccagttctgcatagttcccatgttgcagttctgctaatcattatctaagataaagagaggctgctacctggacgatttatatataatcgttccacagatcattacacactgtttgagcatctctctattcctcctttaattgttttctgaatttcatactataaggcatattgaaaactgaaaagtttatcttctactagaagagacatggcataaagcataattgatgttacctctttctcttctgtgaccggtgaatccaggccatgacaggagggaggatcccaaaaaggaagcagtttgcataaaccccagcaaaatccagtgccttggagaaggccgctgagaagaacgacgcaataacgataggaataatcagcacaatccatgtgagaatagccccatttcttccatggccaccgctagattcagagagctgcccaattcctcgcttcggagaaaacctctgcccaatcaactccactgtatcagccagctgcttcggaaagctcaccgcgtatcctatcaagctcgtcgccaatgcggcaaacgcaaagcctcgaacggcaggcaatgctgctggattcaccgagagcagcagcttaattggatcatcgaatctcgcaccgccactggaacttgccaacccgagaatgacggcattccaggacaacaccatggccaatgggacggcaccgccgatcagtattgcgcgccgcgcatcgtacactgaatcccccacaatcttgcagatgaacggcgtgatgacatggaacccaagcgtcaggacggtcaccggaattgcaggcaggatggtagcagggcgccagcaggcgtagccgagcgatctcagcatgctgctccggccgacggaaacgccggtgacaacaagcgcggtgatggaggcgagcatcaggccgcagagcgcgcggttggcgccgtcgacggccttgaaggggaagaacgcgatgagcgtcccggcgaagcacgggaagatggcgttggccaaggccggatccaccgccgggaagagctgggacaccagcgagccgatgccggcgacgcaggcgacgagcagggagaagctgagggcggcgtagacgacggccacgaccgccccgagcgtcgcccccaaggtgctcgacgcaagtcccgtgaagctgacctcgtcgacgccgccgtcctccatcgcggcgaagctgagctccgcgacgaggacgatggaggacaccacgtagacccacgagagcacgatcgccgccgtggacgggaccggcccggagcggatggtggcggacggcagccccagcatccccggccccaccgccgttccgacgatgaggctcaccgccgcccagaagctcttcttctcccctccaccggataccccgtcctcgacgagcggcgccggtgattcttcttcggcggcgtcggcgtcgccgtagtcgctccgccaccgccattgccgcctcggcgacagccaggacagcggcaacggctgcggctgcggcggcgcggggttcttggaagctagtggcggagggcgacgcgttcgtggctccgggaggccgaggcggcggcggcggcggagcggagaggggcaggttgccggcgaggagggcgtggcgaggtggaggcggctggagagtaacatggtcaacggtaaattttggtagggtcaaaggaggcgggtgaattctgggcctcttttaccattcgaggcccagtttttcaacatacgagtttctaaaacattttggattgggaatttgaagaatgaataataatacgtagtacaaactgagcggattcatgtaaaaaaatactgtaaaatttctgcgtcctaatggagcctcagcaaggccttggaagatttgggattagagaaattaatatggctgaatttacgtttccattgaaacggaagaattttagtgaattttcattatcattagtaagtagttcaagtgttcaacccatgcaagaatccttgaaaacaatcctacggttaacgcgctccacttgtgatggaggaattttgcaaaaatgaagtaataaagcctcgtagtgatcgattgaggctaccagtttggtgtgttaaggccattcgcactagtttgaggagctgagactaccacataggacgaagacacggaaaaaataatacttaccacaagtttcacagttctttgtgaaagtcattctctcctccatctccgaccgccgctcttccccccttctcccctcctctggtggctgccgctcccccttcctcctccaaccacgcctcctctttcttcttccggccgccggccaccgcgctaccccactgggtatgcgcctcacctcctccatctccggccgccgcggctcccccacttcctccgaccgtgctcctctggggtcgccgtcaccatccgcaccgcgcccggagacggagacgaaaggaaggacgacatggcggtcgcggaggaggaggtgacgtcgtcggcgaagatggtagagcatgtactcgccgtcgacgacttcactcgccaagaattgatctctggcgaaaggcagcgaatgggtgctaccaaaccttagggatggcagtgggtcggg

SEQ ID NO: 10219 - DNA, 3033 bp, Oryza sativa
ttattattggaagttgaattttaaccaagcaatttcattcacggtacaagaactcgtcaggcgggtgtgttataggcttctagtaatatgaaaaatgagcataaagtgaatcgtctctgtcgacgtttgatgtcgcgattccagtatttgcatggtatagggatcgttggtactatgatatacgcgagactgaggtaaaagagacagagacgaggatttttatacaggttcgggcccctgaattatcaggtaataaccctacatcctgttggccgaagccggagttattttttattcaccataatcacaccagtacaatatgtgaggtagcctatctaagtattgtcgacatggcggtctgaagttctgactcgtagtcgacaacagggtagtcttcctcctcgaatccgtgcacggcgagatcagagatagcgctttcgtctctcctgacagtatccggagacaccgtaggggactagccatgctaatccctgaagttgatatccggtatcttgtcttagcgtatgttggcttgtatgttgtggcttctgttgttccgtagactgtggtgtgtgttgattgaggtggtcgtgtcccctctcctcgtaaggggccttgtatttatacccataagtgtccccttatccaagtagaactagggaaaccaatatggatacaatccgagtagtccttgtcgtttccatgtagaactctggttgtctttccttatccgaaactccctccatatccgatgtcagtttccgtataagacatggtatgtggtgggtcctgccgagatgtagtcgactactattaggtatgtggtatccataaccctgacagtctcattgtcatgactatatgaacacctctcttttcccatgatgaatacaagttcaaatttggagttcttaaattatttgctaagaagcatgataaaaaaataaagcatggcaaaaacaatcctagaagagatggagtacaagaaaagataagagaaaatcaatcctataagaaatgaagtacaagaaaagaaaagataagtgcagaacaaccctagtagaagaaaagatatagaagagctgaaaaatagcagaagtaaaagaaaagatgtataagagctgaaaaatagaaataagtgcagaacaaccctagtagaagaaaagatatacaagagctgaaaaatataaacggagtgaaaattatgtcagaagtgggatttgaacccacgccctcgttagaggaccagaacttgagtctggcgccttagaccactcggccatcctgacttgatgtaattacttgaaataatttcatacaaatttcgtatattttacgtgattcgattctgctttcatgtcgatgactcattcaagatcgagcagccctactcacctgtaaggctgtaaacaaagagagttgacagaaacttaacctgaaaaaagaacatataaataagtagtatctgaactctgaagtatccatattctcctatgaaacattggagtcaccccgagacagagtgtggttgtgaatttatggactactctatattatgttcgtcaaaggtgaaaaatatgtgctgaatagattgatcttcatctagctgaatatacgccaaagacataatactaatttggaaatgggaggcttcaggtcattgagatttgcattgctggatcaacctaccgtgccctcttccttggctgttggccgtcttcagatcccatagaaaatgagacgctagctagtttatagcatgtgtattttcttaagaaataatacactcaaaataattatttaaaggttttcttaattttaaatttgtaaaattaagctagactagtaaaatcatcctaattagtggtcttatcatgctgatcggactatttaatttggataaatgactaaacctgacatatattggtgaaaaaacgtgttttattaatattcaacacaattgtcataatcctgcaagtgatagagtttgtataattagttggaaatacatatctaaaataaatgtgtctacaattacctatttctttatgctggtttcatttaaaaataagggacattgacatggtaaagatactgaatgcaacacagctggttaatttccgttgtttcaatggtagacaatctaccaatcttcatcaatccaaatatactcttgacgacctagtttttggaggggctcatatagatttacgtaagtaagtgtacgcaggtgtatatgagcgtctatatttattttgtgcttcacacataaaatttatagcaaaattattattattacttacccatgttccaaaataaatgaattcctagcacacagaaaatataatgtgaggagagaaaaacaaaaatgttccgaacaaataggaaagtagtggtgaacttatcggttaacatggaataaacctatatgtccatctaatttcatattttattctttctattatatagaaatttagatattttctcgtctgaagtaaacttattgtagattgtatttatctgaagactttcgattgttctaccatctaatttcacattttattctttccattatatagaaatttagatattttctcgtctgaagtaaacttattgtagattgtatttatctgaagactttcgattgttctaacacaatcattgctgctactctattattttttatttattttcactattttttttaattttctagaaacgcatgatgctaacgtgaagtgacgactttccctcgttccgactctgtagtggattaattgtaatcctattgttttagggccggtttggattggattcaagccaaaacgtgccctaccaagattttgggtaacataaatagtaaatgtgctagtttggattgaagctaaatagttggtagtgctcatgctcaatttagctatattctaaaatcttcttcacaaccctactaaaatttgattttatattggtatcaaaccaaatatagattagctaattttgccctacctaaaaattggtagtgccaaaatctac

SEQ ID NO: 10220 - DNA, 7423 bp, Oryza sativa
gcaggggagatgggccgagagaaattcggcccatcgaccccgggggaggcaaattagacttttgcggaggaatttgatttggagggatttggatttggaattgaactcgacgatagatcggggattgagatcttgagatggcacggacactagacaacaagcgaagaaacaaatttcgcaattagggtttttaagagataattttcccgctaggcgccacgacggaacgggcgctacagaccaacccccctaacaagaatctcgaccccgagattcagcacctaagggagcagctccgggaactcggcgcggagaagatcttctcgctcccaggttgttttcactggcacgaaatgagccaatttcgtgagtcgatccacgattacccaaatggagtcgtacccgctaggggttcttggcaaaccggtgatgaaatccattccgatttcttcccatttccactcgggaattggtaggggctgtagcagaccagctggcctctggtgctctgccttgactctttggcaaatgtcacacaaggctacgtattctgcgacatctcgcttcattccagcccaccagaagtatgccttgatatcttggtacatcttcgtacttcctggatgaatggagtaggcggactcatgagcttcctttaggatgagatctcttaattccttcttggccggtacacagatacgtggaccgcaccaaactgtgccttgatcgtctatggagaaattggtgtctttcttctcctgtattctttttattaactcttttatcccttcgtcgtctttctgagcttcccggatttgcgactctagggtaggctgtactgtcaagctggcagggacacctgactgtaccacggtcagcctcaacttctccaattctctgcacaggcgatcttggtcaggccgtatttgagctacattgcaataggccttgcgacttagcgcatcagcgaccacgttggctttaccggggtggtaatgaattccaagatcgtaatccttgattagttccaaccatcttctctgcctcatatttaactccgtctgtgtgaagatgtacttaagacttttgtgatcggtgtatacttcacatctgttcccgattaaatagtgcctccagatcttaagagcatgaaccacggctgccaattcgagatcatgggtgggataattgacttcatgaggcctgagctgcctggatgcataggccacaacctttcgttcttgcattaggacacatcctaagccttgtcttgatgcatcacagaagatctcgaaatcttttcggatatctggcaaggtgagaactggggcagtggtcaaccttttcttcatttcttgaaagctgtcttcacaggctgcagaccattgaaatttcttttccttctttaacagctcggtcataggtctggctagcttagagaattcttcaatgaatcttcgataatatccaactaagccaaggaagctgcgaatctctgacacattcttgggcgggttccaagcaagtacagcttcaaccttgctgggatctacctcgacaccgttggaggagatcacgtgtccaaggaatgctactcggtctaaccagaattcgcatttcgagaatttagcgaatagttgatgatccctgagcttttccattattagcctcaggtgttcagcatgttcttcctcattcttggagtatatcaggatgtcatcgatgaacaccacgacaaactggtccaggtattccataaagattttgttcattaagttcatgaagaacgctggagcattggtgagtccgaaggacatttctgtgaactcatatagaccataacgcgttgagaaagcggtcttcgggatatcttcagatctgattttcaattggtggtaacctgatctcaagtcaatttttgagaaaactcttgctcctttaagttgatcgaacaaatcgtcaatccgtggcaacgggtacttgttctttatagttacttcatttagggctctatagtcgattaccattctctcagagccatcctttttcttaaccagaagcactggggctccccaaggggatgagctaggtcgcacataacctttactctccaattcttcgatttgtcttttaacttctactaactcattagctgccattcggtagggtctttttgcaattggtgcggtgcctggtgccagttctatggcgaactcaatctcccggtctggtggcatactcgttaattcttctggaaatacgtcgggatattcacagactatgggcaccgactccaaggaggtgacttgtaaacaggttaagatagaccgacttgcggtaggagtgttaggggtaaagcggacttgctttcctccaggtccttgcaaggtgatggacttttcggcacaatctatctgtcctttgtgctttgccaaccaatccatccctaggatgatgtccaagctttgcgagtctaggactatcggtttggctaggaagtcaacttcctcaattctaaggttaacttccaggcatatttgagttgcccttatatccctcccaggggaatgtactatcattggtacacgtaaattttgggttttccaaccatttcttttcacaaaagcttgtgatatgaaagagtgggaagctcctgaatcaaacagaactattgcgggtatggagttgacagagaacatacccatcacaacgtctggagcatcctgagcggtctcggcttgaatgtgattcacccggcctcgaccaaggttgttggacacacgagaaccttgtccacttgcctgagagctaggacgagactgagctgccgctggagtaggagttctggcagtgctgccattagcatgccctgagctggtgttggtaggattctgagggcactgtctggcatagtggcccatctggttgcaccggaaacactgaactgctgacggtccctgtggtgacttgaaagaggtaacactgttgggcgcagtattgccactaggggcacgctgctgtggctgaggtgccggacagttcatctgaggacgaggggcgtagcctggctggcggttagcctgagtgaccgactggtggtattgcatgggttgaccgtagtgagggcgaggtgcgcctcgggaagaatttccctgatggttagagttgcgtttcttgtattcttcggtagcctcttttctggcatcttcaagtagaagcgccttgttgatcatatgctgaaaagtggggaagtcatgagcaagcaactggagtctcattccaactgcgattcctttcacgaatttcctgatcttcttcttatctgtgtccacttcctcaggggcgtatcgagccaagttgttgaacatacttaggtactcattgacactgctgttgccttgcttaagtctgttgaattccactttcttcatgtcaatggtgctttcaggcacatgagctgcacggaaagacgtagcaaactcatcccaagcaatgttagtgggttcagggtgtgcattgcagtaattttcccaccaatctgcagcaggtcctcttagctggtgagaggcatagagcgtcttctcaaccggagtacactgcaccaagttgagttttctatccacatctttcagccaatcgtcagcctcgacgggctcgacggtctgagagaactctggcggacgagacctcagaaagtctgtcagcttggatctattgttgctcatgtgacggtggccatttccatgcgcagtatgctgaaaaccggctacggctgcggctaatccttgcaagatttgtgtctaaactgccattaagtgctgcatgttgttttccacatgaggtggggaagggaggcgttcttctccagaattgtgactggcagtgcggtgagagcggtgagactgttccatctctacatcacaggaagccgtgcgatgcgagcggttgctgcggcggggttgctcaacttctgcattgcgggaagcagtacggtgcgaacggttgctgtggtgagactgctcatgatttgcttctggctcggctctaccatcttcaaaaccaaagcgggctggtgcacgagctgcacggcgggggcggctagccatctaaactcccagaagagggcggggtaagaatcaaataagcacttaggagggcaaggagcaacgtaaatagcaactcagatagcacacactaggcataaactggatttttcaaatcataaaaacacctgatacaacgggtgtggacaagtcacagagctacgccgagcttgactgtgcgcacaccacctaggagaaccagactaccgaacaacacccacaacaaacacacgcacgcactaccttgccacgactccgaaagagttggcggcggaacaaaagggcctaacacacgggcggctgctgtagactgcctcctctactcctcgtcggcctggctgcctcctgtagtcggctcctcagtcgaagaaatgtcgatcggctgacgcgaagggaccggcggaacctgtcgagggccgacagcagcacgggccgctggcggtgggggagctgggtagtggaaacggaacacggtggaagaaccaacaacacgcttccgcgcggtgcggataaagcgtgggccacggcgggaggaagcaactggggtgtgtccgggggtgtaggaggggctaactgggtgtgggtagggggagtacactggtgagtacggcgcacgcgagctgggggagcgcgggccactgggagtgcgggcagagccgcgggagctgtgggaggacaggtggctgccgtgacagaggcggcggcgtagcggcgggcaagggagcggtaagcctcaaggagtaggtcgtgctgagtggcctgagcctccgaaagctcaaccatgcgagtcagcactggctgagactcgctgtacggacaagggtacctggcgtctgagtggccagaaggaaggcgtggtagctgccggaaggcgaagcccccgagatggtggctgtagtcgtgggccaggtgacgaagcgcagtccaggagaggtcctggtacgcgatctggagagtgggcctggccacggtgaagtggtgtgggcgaaggccagctccgtgtatacctccacgagggtaaaggtacacagagagctcacagtgagggggaacacggtccacggagtaccccgtgtactcgggacacgagaagccaaggaaacgagcgaggtcacgaagctgagcgacgtggtgaccctcaccaaaaccgtgggagctgaagctggcgttcactgccatctacaattttgaaggagggagaaaagatcagtaaccattttagaaacaaactattgaaaataaggaaaccaaagaagccttagcttttcgcaagtagttttgaacttagtatccttagggtcgtcctaaacgtcgggtttcgccctagggccaagcctgtgctctgataccatttgtaacgtcccgcctcccccaggccgggcccacttacatctgatagctttcataggtcatagactgccctcacagaccaacacatgtcttttctgcacactttgtcctcactcgtgtgcacccgggaagaatttcccaatcggtcacccatcccaaattgctccaggccaagcacgcttaaccctggagttctttggagattggcttccgaaaaagaagttgcaacttgttgatatgagtattctattaatcctattaagccctaggccgggatgttacaccctcacccccttaagagagatcgacgcccccgtcgatcaacctaggccaggaacgtcatctcttggccacgtccatgtgtccagtgccagcgcatgtgccatgctgtgtaaccactcccggtctacatcagccatgcgcaccatgcctgcgcaactacgacacacgcgcccgtgaaaccgcgagagtcggctctgataccatctcttgtcacgccccgaactagtcccgactggaactagcccgtgacgctccaaattaacctgttaatcgataccagtcccaggaaacagtgctggtatcacaggaagacagaatatcacagcaacagaggtctctttattatagagtaggagtacagtcatgttgggctgcggacagatcccgagctcacaactgcattacaaaagggaaacggaagccaggactcgggccaaacaacacaggcgcgacttgggaactaggccgaaaccctaaaactcattgtagccggcttgctcctggaagaactcctcatcagcaggatccgcttcatcttcttcagcatctgggggggattatttatatagagcaagggtgagtacgagagtactcagcaagccaggggaaataagtgtttaatgcaggcttcaaggagaggcgggtgtttttgcaattgattttatttgaactcttttctgaaacaactaagtgagtgcttcttaaacgacacggatgagacagtgcgtctcgtccggtcggagtatgtgcaatgtattagtctttagattttgaaacaaggttggcacccggccaacagcttttcaaacggccacccgggccaacaacttccaaacggccacccgggcgtagctgatcccatcagctgcagattttccaaacatcgaacccctttccacaacagcaatttcacaagcagtagtcaaataaaactacgctaggaatcacctcacatccgcccatgaccgtgggcacggcttatcgaacagtttgttaacctctgcagagggggtacactttacccacacgacattactaacccggatcacccagcccgtggggatcagccacgttgggagacctccaagctttcattacaaggcatttctaaagccgacacaggtttaccatatgccgacgagaggggtcccagaccaacaacaggttaggtcccagaccatactgtgccaggaagcccaggggtcctccccaacaccaccccggcgaatccacatgtctctcggcatcaaggctcccctgataagctagttactcagccaggggtgtcccattccacccatgtggtcgtacttgtcttatgtttggatgaaattccaaggaaacggtctttaagtgcaagagcggaaaaccgtacacccggtacgttccccggtccgcggttttggaaattcatttaattcgcaagcaccgacccaggtgtcgggttttccaagtcttttgtaaaatccaagttttacccaagttgcttttcagattttaagtttgaaggcgtccgccgatactcgcactaggtgcgcgaatatcgagacgcaactagatggttgcaaggggacatggtatcacaattaacaaaggaaggatcaaaaaccaccaaattaggtaggtctaccaatctgccttgcagacgggacaacagattaagtgtgatcctatcaagggctgcagga

SEQ ID NO: 10221 - DNA, 4004 bp, Oryza sativa
accggcgtgtatcgcgcggtcagaccggcgcagcccgcggtctgactggccgacgttgtgtcagtttcggtttcgggttgtttgtttggatatccgtgattgtttcatgaatatgacttctagatggatactatacgtatgtaatattgttgtttgctactaatgagtcaagttggggatagtttggtctcggaatatggtttctttgtttgttccatgtgtaggtgacatgagatgccgggagagtatttgcggtgatggaccgagagtcggcttggggataagacgatgtccgtggtggtcagagatcatgcaggatactaaggctagagttcaatgcacatggttggtgaagtttccatatggcatacgatggaggtattgtgtgcgtatgggatgcggagttgaatttgaaaggagtccaaatttggtagaattggttatgtaaagtttgtttcttgtacgagaaggtttcctatggggattaggacttctagtatgagtttggttcgtggctttaggttgcctacctcgggtataaatagagagggagcgtgaggcttctcggtattgcttttcagagcaattgagttgatagtttacttatggtttcgagtttactcgagatttttgtaaggagtgctgttggtgcactttgtaaacacagagataatcaataaagtcatcatcaactttaagagttcttcgatttgtattttctcgagtgcggcggtctaaccagcaactcactggcggtcagatcggcggcaaggcggcggtcggtagcacgcaggcggtcagaccagcagcagcgacaggcagcggcaggcgatttcggcggttcgaccaatcgatctacatcggtcagaccgacgttcttctggcggttagaccggtgcatacacttcggtcagaccgcgattagtcgaatttgagggtaacttttatttccgctaaaagttttggtttttgggtataccaaccattcactccccccctctggttggcttagtttttgtattcgatcctacagatggaagtggtccttcaggtcccttccaaatgtattctaatgaccgcgctaggtttatggctttggagagtagccttgctgttgcgagaagtcaatattgtccatctcgcacgggccttccactagtacagaatcgatttttccgtgcggtcaaaattgatctttccgtgcggaggtagcgcctgtctacagctaggtgtctgtgaaaatcaactttatcgcatgcaggcggcccaaccgtacggggtaatctattatcccatgcggtcgagtcaagtggactgcacgagataatctaccaaaaaacatctttcatgagtcgaattgtactacatttaacatatgaaaaaaagatacaacttaaacgaatattatattactattcatggtctagtggttccaataacattaaattaataacttaaaaattatttagaattactagatttgtaaacctaatatattcgtcgaattccattgaaaaagtttgaaataaacggagggaactaaacaaaaatttaattaaagatttacggagaatttaaacatgcatataatatttttaatcattaataaaaaattttccatttccaaaaatgaaaattttcttagcttttatctgatgacaaattaaattaatggaggcaaacctaaaaaggaatcggactactaaatactttgaaaatcatgtgatacaaataatatatattatctcaaaagttataaaaaaacataaaaagtgcctacactattccatttataaaagtgcaaatttcttcgcattgcacccgtaaaaactgacaaaaatagaagcaaatgaaagacgagaacaagcattacaccttttatatgaatcaaaatcaaagatttaaggtcgaaaacctcccctcttaatgtttgtaagtctaggagagagaaaacgtcggaataaatagggcatggttgggctggggtgtatatagaccaacatcatcacgtgcggttggattaaacagcccgcacgggaagatgcattatcctgtgcgggcatcttaacccaaccgcgctggataatcgcattatctcgtgcggttcggttaagacgcccacacgggataatgcatcttaccgtgcgggtgctggccctgcgtcggtcctccggtttccaggaaaatgttttgtgtagtagtgttcttttcttttattggacagtgatgggacaagaggccaacccaaaatataaggaaacacctctgatgttggcatggcattgttaggaaatcgcatggtctagaaactcatgcaaatggacacttcatcctcgcaaaattctcgtagacatggtgaaccgaaagtatctgttgctagtgttaccaatgttacactggtttaaaattaccgataaatatgctaatatctcgctctttcagaagtaccagacattctcctaccaatataataattaacatacacttcagagagtgcacagataataggatggactcaattcaggaggttgtatttctgcaaacagatattaagctccttttcaatatattgaaaaacacaagcttcagatgcatcaactgtaacatgagtatgtgtagctagcctctccagtgcccaagaaccagttcaatgattgtaagctgccgctgcaaaatgtgacagaccaaatgcatcgtacgtatcatcgttcatcatccctagacactgcttctctagagaaatcgatttcctagattcgtcccaagcctaatttggctgctgttttctttgagtcatagtggccaatcgccagtaagaatatataggcagcattgcatgcatgaggagcttatcacttgaattatatatttcgtatatacgtgaaccgagaatggaacctacaagctcccttctgtatcttctgacgctagctagggtcttcagtttataaatagaacaattttaccatcttacactcgggcctgtttagttggtgaaatgaaaatttttgggtgtcacttcgaacgtttgaccggatgtcgaaagtggttttcggacacaaatgaaaaaactaatttcataactcgcctggaaaccgcgacacgaatcttttgagcctaattacactgctggagaatcgctttttagtcctggttgggaacccccctatagtcctggtttcctaaccgggactacgaatccgggactaaaaatatctacttttagtcccggttgaaataaccggggctaaaaatagatctttagtcccggttcgtaataccaatcgggactaaagatactaaatctttagtcccagttggtattaccaactggtacaaaagtttttttcttttttttcttttcttgcgccaaatatcacagatttgtgttcacacatcactcatcacatatcgttcacacatctcaacatcccaaatcatccacagcaacaacccaatatctcaaacatcccaaatcatccaaaacaacaaatcacagatcaaatcaacaaacaattattcacattattcacacaacgaaaagaaaaaaaaagaaaaaaccagaaaaaaaaaatccatggaccctgccgccgcgcggccttccgcgccgggctgccgtcgctccggcacgggcccggccgccatcgctccgcacgggcccggtcgctgccgcccctccccggcacaggcccgaccgccgccacccccgcccggcatggccccgccgccgctgcccctcctcggcaccggtccggccgccgccgcccccgcccagcacgggcccggccgctgcctcggctgcttctcccgcagatctgaggaagagaagagaggaaaactcgatcagatgtggaagaggaaggggagaggaagagatgagagtgaaagaggaaggtgaggaagagataaggaagagataagggtgacgactgagggctctgcgcgtggagagaatgatggaagagagagatacgtgggaaacagatttgtagtcccggttggta

SEQ ID NO: 10222 - DNA, 6932 bp, Oryza sativa
tgggggtggtatagtcatagaacttgttaagttaacctaaaataaattgatgatgtgcactcatcttctccaggcgggtttggatcccgtggagttggcttcaactctaccgggtagatttagctaaatctctgccatctatttttttctacggctgataagaagccacatctcctgattaattttattaatcacatggatgtaaaggaaaattattttcttgacatttagcaatgataacgttgcaaccaacaaattaagttaacagagtacatgttctcttcctcaaattaacaataatatgccaacaaaatgtttcctcgtatacatataataacaaaagagaaccttgttaatcatattcaatatttcttttttatataatagagatgaagccattcttatgaaaaaaaaaagtcggccagccagaactggaatcactatgtcaaaaagcacggcatatcttctttctttgaacaactagttgttataaagattacatggaattatttatcaaaagaaaaaaatagttgaaattaaggtggtttgatctcagccgtagagaacagtacatgacagagatttgggtaaatctacccgctgaagttggagttaactctagcggatctggacccctccaggcatatggtcaatgggaaaaaaatgactcttccaacaatatatggacaaaaatccaactgacgttcaaccgaacttttcttagacaacattaggcacaagtcccggaggctcggtcagggttttttttttggataatctgatgtaattttacatttcaatcatcgttcatgaggtaaagtgagctacaactgagtttaaaatttggatcaactagaagtgaagttccaggcaaataagaatcatcattcatttattttctctactacacagcacacctaccaaaaagatatattgattaattaggtttggaattcacttcagtgttcatttctgccattacttttctgcatagctatatattgttgtcacacatattggatgacactaccaactgtctaatttgacatgctctagccatatgtacaaaatgagttgagttggtattaccaggcctagatattttaagtacttttatgtctgtactatatatgtcaagcatttgcataaacaatttagtagtcttaggagacgtcaggaatataaggtgaacttgtatgtacaaactcataggttggttgaatgttttgatcttctgcatatagatgcacagccacaccttaggttgagattcccgactcactcgagcctataggcagattcatatcgagaatgcaggatcagcacgagtgactcatactgatgatgacccaaggctctcttttgtcaagatgcgttgacctgtttctattttcagtcatctaatttgattactagctgtgaatatcggcatattgtgggagatgtagggcttatttggaagaacttaaaattctgaaaacagttggtagctagcttttaagattttataactacagcttctcagaatctggatgaaaagctgacctatttgggggagcttcttctaagagaagctgcaactcctagaaactccctaaacaggtccataatattcatggcccaacatttttttttgttaaaatgtgttgatgtgatatttctatctagtgtcagtcattcaacaaatgagatatcttgcatatgaggtctgttttttattttcttttttttttaatttgaatgaggtctggtttgagagaatagttaagtggcatggtcattttgtgggatatataaactgctggcatgaacttagaaaggaggtgcagaagtgggattagaacctaggtgggcaggtgggattataacccaggtgggccgtatgccttgctaatcgatcaagtgcttattcacttggaataaccagaaaatgtatctgttttaatccacttcagttgactcactagtcaccacatagatcaatatggaagaaaatgctctggcattagtccaacctacaacaataacataactgacctgccacacatacacatcagcatacgtgtttgctcacaggatatatatatttctatttgaatttttatggttcagtgcatcgcattttctgatcttactatacacctactctaggacagtaaagaaattgatctcatatttagttaatccgaggcacgcatggttttaaatagcattatcgatcatgtcaggactccttcaggtgagatctgtctcttgccagtaggtatatatcatcaatctcagtggtgaattccccctatttcaacatatatatttgtgcaactttgatatgtagtttgctggccactggtgtttacggtttacattcattggtgcattttaatcttttcatttacatggatgtgtacatgggtctttgagaaggcttacgcttaggaggtatcaggattgcacaattcagagttgagtcatttgacctcctccacgtcgtgcctccatgcttccggggatcgcgcacagttgctgctgggttagcgaacaactcctaggttggtgacatacgtggcgccctcactgtcccggtcatctctcagttcctgttagtctaggacgcggtggttcctacccagctctcgccgggtgttgaggatcacctcgtctggcgttggacgggtgaccagtgctactcagcgcgatcggcgtatcaggcgttcttccttggccagcactcttttgcctgtgccgacttactctggcacgcgaagggccctgctaaatgcaagttcttcctttggtttgcatttcagcagcgctgctggactgccgatcttctccaaaagcgtggtattgatagccactctgcttgccccttttgcgctcaggagcttgagacagcgaaccacatcctcatcgattgcgtgttcgctcggcaggtctggctccgtgtgttgtcccctcctggctgggctgccctctctccccctcgtggcagctggctccaggattggtggtcatcctccagggtatgtttacctgagcaccttcgcagcggcttcgacttcttggtactcctagtctcttggcagctgtggaaggaacgaaactccagggttttcgactctgtgctcgcttcggtcacagtggttctagagtccttccgctcggagggccagctgtggtctttagccggtgttacttgttttggggatttcttgggagtgtagcgtggctctgccccctcccgctgtttggagttgcgtttttaaccgtcgtagtagttcctagcttcatgtccccccctttaggcataagccagtctaactgattgctttgtgtaacaaaaactcttttcctgctaatatattgacgtgcaatccttttgcgcgttcgcaaaagaaaaaaagagttgagtcattgaacatattggtccaagatggcctcctaactctggttagtacaaaacagcgtgagaaggtagacatttgagagggtttatttgatcttctggaccacagaaatgttcatggcccatatatatatatgatgtataaagtccacaatagtttggctttcttattaacatttttgcagaaggacataggccatgaaattgtgtatgcatgtgttactatgctagctcctgttaactccgcaatgatttttattttcattttaagattcgtgaatacaatgtccaggttaaaacacacccgactgatgaatgtacatagataagcatatgggcgtcagtcgtcagtcgtcagttagagttatctatgtgtaaaatcaaggagttgatttagattttgtgatgaaaatattggtggtttgctaatgttaatttgaagattttataagacggttgattttgtgaagtgtgcagtttcggttgaccctggcagttagaccggtcgtgtgtagccagtcagaccgcaggtgttgcggtggtcagaccggccggcccaacggtttgaccggcaggttcctgatcgtattcggtttcgggttgttttgttggatttggatgtttcttttggggatttggcttctagatggtttctatgcgtatggatactgttgttatactaatgtgagttaaggtgggacgaacttaggctcggaatatggtttcttggttgttgcatgtgcaggtgttgcttgaggccacgggagagtgttgccagtgatagatcggagtcaacttggaaaaagttgatgtccagggatcaagagatcatgcggaatactaaaggctagaggacaatgcacgtggtgatgaagaaatctatatggtatacaagagggattgtttacatatggaaagaggagtcgaatttggaagggagtccgaattcgggaagattgattgagatcaggaaagagataagttggatacttgcaagagagagttacctacgtggattaggagtcctaagttgtattagattcgtgggctttgcacagcctacctcatgtataaatagagagggagggtgaggcctcccggtatcggttttagagagactagagttgagagaaagttagggtttcgaatttagttcgaaattttggtgaggagtgttgttggtgcactttgtaaacactagttgatacaataaagtcgaaaagtttcaatctacatctttgagtttgtcatttaccggtatttctggatcccgacggtctaaccgcaggtatgcgcacggtctgaccagtgggatagtggcggtctgaccgtaggtgtctaggcggtctggccggcggtaggagggtggtttgaccggcagcgataggacttcgtcatcaacttcattcgagggtaatctttaattctgcaaaagatttttgggtttttggttttccctaccattcacctccctctggtaggtttgtttggtcttgtgcgatccttcactacgtacagtcgtcagtcgttagttagataagcatatgcatactttcgactgatataaagtcgacatgacttcgtctactccaattgctagtaatactcttaagacaacgagcatggatgaatcttccatccaacgctgttagagttgttccttaggggaatgcataaagtctactaggattaggaggcagtgggaattcagcattgagaggatgaatcctttcgagttttgaattgtcatatactctctggaaatcattgatcaggtggagcagtgattggcaagacgtgtctgaggtgtcatctatcacactcacacatgcatatgaggaagctgtcgaggatgaggggaaaagatagcagaaaggcattgtaaatttgttattcaaagtcgaacatgggcaactcctatgaaaaatggctcaaaataggcagcacaattcctggcagaaagtgtactctacattagacaagcgttgcccaatggaaacaagagaagcatgacaaattttgtataaactatctttgagttctaatttaatagccgtatatatcgatcatttaaataaattgtacaatttgtaactagctaatctgatgacaaaactttatcgagttttacacatgatgtatagaaaatgctcgatttgtttgcttctttttatagcttgaagtttgtagtatttctgttatttcatcatccacgtacaaagaaatgcattatgaaatattgacatttacatagattttgcagtggaaaatatatcagcctcacatatgcacattcatattgtttcatgctattatatggcactaatgtaggataatatgtgcatagacatgtgttctatcgagaattcgagatatttatggttttaaggttgggttgacctctcgagtgaagagtttgaggcttagtgctcggtgaatgtctttgttggcaagaacctttgtatgtaagtctaaatagtcttgtacagttgttgttaactatgtacatctgatttaaatatagatgtcgggttttaatcctttttcttataaaaatggttttgacgatcaggttgaagtcagctgtgataagcacttgctttggttctgcaaatatgtttgcaatttcctcagtcttttctttcaattcgagtcctaagttcattcatttacttacctaggtgcataagattttgcaaattaatgcatttcctctcgggtataaataattttaggcttaggaaatatccaaaatcaatgtaggatacaatgtctgaaaagactgaaagttgcatcgaattaggttactgtacaagtccacagtggcctgaccatgctcttttcgacaccaaaattatttggcttgagtttctaaattcgtgcatacaaaatccaagataaatttttaattgatcctcataatgtaattcctactaaagcacacctgactgtgcataaatagttcacactatttgctagctctaagactacgagcatgcatatatatgttccatactccctgttagagttgttccttagctaagtataattgcataaagtatagcaggcttaggaggcaatgggaattcagccttcagatcatggacacttttgagtttcgaattgtctccaaagatcatcaaccatgtgaggagtgatctttggacacgctcacgcaggccagtcttcttgtcaagtgtacgagggaaaggataggagaaaagtattgcaaatttgtaattaaaagtcaaacatacgcaactcctatgaaaaaagggtcaaaatagtcaggccaatctgtagaagaaaggtggtctatagtagacaaagtgttgcccaatgggaacaagaccaaagcatgacaatttatttataaattaacttctagttctaatttaatatccatatgcatcattaaggcagaattttatagtttctaacgagcccaagtccaaccataaactttatcgagaattacacacgatacacgaaaaaaactgctcttgtttggatttggtcgttttgt

SEQ ID NO: 10223 - DNA, 5308 bp, Oryza sativa
gggctgcgccggtctgaccgcgcgatacacgccggtctgaccggcaaccactgcacggtctgaccggaccacatatccagcagtacctatagatcacctgtgaaatccaatcatctccaaaaccacttcgcaaataaattccaaatatcaaaaccaataatctctccaatgccaattgttcatcacagaataataaccaaaaacacctttgattttacaccatctctacaggacaacctttgaagggagatgacgatcgccggtgattagcatatggcggaagctgtgctccagctgtttgatccagtacaagaaagatataagagagcaattcatttcccctttagattagaattgaaggtctaatgtaattcaccacaacaaattcatagatacatacagagcataaaacatcatatataatcttagaaagcaagtaatttttaaatagatagagatcccaccatatgtaaaaacacaaaaaatcaagtgagcattggttttttttttttgcgaagggtattatttgttgttgatttgtctgctacattgatttatcctaatactttcaagtaggctagctgtccaacgagaagttatcaagaacagagtttcaaattttagagtgcccactctcagaaaacaaaaaagagagccaaagcatttcaggtggaactgatatagtgggaatttcggtcgaaaattgtgaaccgtggaagaacactgtcaaggatgatttgtatggtgaatggtcaaacaattatcttaactgaagaccctaacacaccatcatttcggtgacttgtaggatcattcctgttttctgataggaaataatcagatggttagacaagataaatgtagagaagctactcatcacctcatgtgtactccccgtttcacaatgtatgtcattctagcatttcccacattcatattaatgctaatgaatctagacatatatacatatttatgttcattagcatcaatataaatgtggaaaatgctattgtgaaacgaaggaagtatgtaagaagcacattctttgttggaacttcgccggtatgactcgagtaaaagagagtcagataggattgggaggaatctaggaattcaaattctcaataaaccatgattgtggtagttctgctattcatgtttgtgtggtagctaagtctctttttacttacttggtccaatatagcctatagctagaacccccatggcatgcgctcacgttgtgtcgtacgagttgagcatgatcatcaaagtttcacagaagtgatatttgttgccatgatttgttctgtagaagtcaagctgattcagtttgagttactcagtttagaaatcaattactgtgtctgtgctacccatatatgaacatataaagccattgggttggttgcaaatatctgttgttgggctacttttcttggctcttatgcattatactcgaagattttcttttctttggtctttattttgtgccatgaatcagctgcttatattggccaggtaaaccctctatgccattaacatgtcaattgtttttccaagtaattcacaaccgcgtagagaactcgaactcctcctcaatatgagttaggaatatacatcgttatgtggatgcaaatgatggtgtgctacttatcatgagcattccaatttccaagtttccaacatttgggacagctgttccttggctcatcattctctcgcaggccagagcgtgattgttcatcttcctactcatctcaactccatcacaatgctgtagatgaaggtctgctctttgatctacacaataggaattagaatgcaattcatttcctctttagatttgaattgtaggttgttagcatttggggatactctgttatgtactctgtttctgtaccctgtttctcacgtgactagttcagctcatgtgagcacgacattatcttgtaatgacctgggtgcatgtgtggatcccgtgtcgggctagcggtggttcaattgtacacaggtcgacacatttaaatactctgggtgccattcaggccagggttatgcaatgagaaatcaaacaaaacaactacctccctgtctctgttcttcttcttcctcctaactacccccaaatcctctcgattctaccccaatccgatcacccctaaagctggcaccacgccagattgaggaggtgttcgtgacaaatctggtatcagagctgtcgttccttgcgcgatctagcgaagaagaagaatcagccaaccctaacagcgaggatggtggtggcggagggagagatcggtccctggggtctcgcgtcaccaagctcacctccaacctcaacaacatcttggggtcactccaaggactggagaaatggattccgaatgtggatgcgggcatcaagtctctccatcaagctgtggacgagatttcctcgcgtgtgacggcgttggagacgaagcccgcggagtcgccggcaacggcaactccaccacccttcgggcacggcgtgaacgatggctaccaaggtgacacttacgagatccctgcgatccaggagcgaaccctggtcaagggtaagcgactccaccagatttctccaattacttttgatattggggagagttcagagaaggggaatttccattcatagagtagtggtagaaatgggggaacaaggttacctaaaaccgattttcctaagtttgacggagagaaccctaaattgtggaaaatgaattgtgagaagtattttagcatgtatcaggttccctttgacacatggtcttcctttgctacacttcacttcattgggaatgctgccttgtggttacaaacatatgaagagttgcattgtatagagagttgggcagagttagtcatggcagtgcatagtaaatttgggaaggataagtatcaggagtatttggaagaattagaaaatttgagtcaagtaactagtgtagagagttattacagtaaatttgaggaactcatgcataagttgctagtttacaacaaggggtttgatgagacattttttgttaccaaatttgtcggtggtttgaaaactgaaataaaggcagcaatcaagctgcataagcctcgaacagttgatgctgcgttgtccttggctaaaacgcaggtggaactacttggggaaatccacaagaagagttatcaacggcactcattcaaggaagttttcaagccggttaataagatgccatttcaagggaaagggattttgggagcagctcctgaggataacaagaaagctgaagagaaatcaaaatgggaggaacaatttgactctttaaaggcagcaagaagggcaaggggtgagtgttttaaatgtggggagaagtatgggcctgggcataagtgtccgaagtcagtgcagcttctattatagaagaattgttggatgtatttcagcttcaggaggatagtaaatctgaagaaggggatgcagaaagttcagaggaggaattggtattgtctgaatgtgcagctgcaggcacgatgggcaggaaaaccatcaagtttcatgggtaatacaaaaacaacagttgcttatcttagtggactcagggagctcaagtaattttctagctgaacatgtggtcaccaagttgggcttacagtgtcagcaagtggaaggaactcaggtgacaattgctgatgggggcaaattattatgcaacagaattgttcctgcagttgagtggtggtgccagggtcaaacctttgtaacagacttcaaagtattgacactgagtggctatgatatgattcttggtatggaatggctggaaacctttagtcctatgtgggtggattggaggaggaagaagttaaggttcacatatcacaaccagagactgacttttattggggtcaaagatcaaataaattctggcaagttgattatagcaaaacagatgcaagggctctacaaggatggcgctattgcccagattgtgcagttgtgccaggctgaggttccagcacatgcagggcagacatacccagctgagattgatcaagtgattgctgaattcaaagaaaggtttgatgagccatagggtttaccaccccatagacagtttgatcacaatatccctctactacccaatgcaaagccagtgaccaagaaaccatatagatattctccacaacagaagaatgagattgagaaacaagtgactcaaatgctccaacaaggtataatccaatcaaatgtcagtccttttgcatcaccagttttgttagttaaaaagaaagatggcacatggagattttgtattgactatagggggttgaatgagatcactgtgaaaacaaatatccaatgccagtagtggaggaattgttagatgagttggctgatgcccaatggtttacaaaactggatttaaggtcaggttatcagataaggctaagactgcatttagaacccatcaggggcactatgagttcaaggtgatgccatttggccttacaatgctccagccaccttccaaggacttatgaatactatattttctgcagtgataagaaagtttgtgttggtctttgtagatgatatactgatctatagtaagtctcttgaggagcatgttgatcatctgagaacagtcctttccgttgctgcaacaacatggtctctttgtaaaagctagtaagtgctcctttgcccaacaacatttgtactacttaggtcacgtcattggaattcatggggtatcaactgatccaaagaaggttatggctgtacaacattggcccattcccaagaatctgaaacagttgaggggatttcttggcctcgcaggctactatcggaaattcattaaggggtatggtattcttactaaaccgttgacagagctattgaaaaaagacgtcaaacacaaatgggagcaacaggagcagacagcttttgatgcagtaaaaatggcattgactcaatcaccagttctagctttaccagacttttctaagcaatttgtggtggaaaccgatgccagtgacaaaggaattggcgcagtgctgatgcagcaggggcatccaattgctttcattagcaaggcattgggtgttaaatcccaaatgctttccacttatgaaaaggaattcatggcaattttgttggctgttaacaagtggaggtcttacctgcaacatgctgaatttgtcatacaaactgatcacaagagtttgacccatttgaatgagcagcagctgggtacaagtatgcaacagaaggcttttgtgaagctcatgggacttcagtatgtgatta

SEQ ID NO: 10224 - DNA, 9233 bp, Oryza sativa
cccgagacccacatgcccgtgcccgacccacgcccgccagctctatcgggcaaaactccatgcccgtgcccatgcccgacgggcacgggcatgcccaacgggtacccactggataccacaaagttaaaaacaaatttaatcacagcaaaaccacatgtacacaacacaaaatttcagatctggcattcacatacacaaaatcacaaatatacatacacaaatactaagatacacatacacaacatcaatttcagaaaatgcttgccgtcatctgtgcacagccaccgccgtcgtctctgcgtcaccgcgccgcccctcccgtgtgccgccgccgcccctcccgtgcgccgccgccgcctgctccctcccgtgcgccgccgcgccgtcgtgccacccctcccgtgtgccgtcgcgccgtcatctgtccgccgccgcgccgcccctccgcgccacccctcccgtgcgctgccgccgtgccaccccctcccgagcgccgccgccgtgccgccccccaagcaccgtcgcctctacctccgcctcccaacgccgccccctcctgagcgccgccccttcctgactcctgtgcatggtgcgccatgccgccgctagacagagacagagagacacgggagggagtgagaactgagaaactagggttagggttaataagttgtgaaatatataccatctgataatgggccaatggttgggcctaactcctgaggagggatgttaaactacaggcacattttcgggtcgggcatggattatccacgggcgaaatgtaaaacccggctgtgcccactaagttagctggtgtcgggtcaggcgtgcccacggacaaaataacgcgcccacgcccatgcccatcgggtcgggtatccgcggatacccgagcccgtgggcattactaccatccctaccaaagctgctactgttttggctccctggtaggccctccccctcgcctcgttctatctttctcgcactagctaacaaatctctgacgcattttgacaaggaacacgtgactaactttggatccacgttcctcatctgggcacgggagagaccgacgtggctgggaatattcgagttgaagggctgaggatgaatgccagcggtgctcactataaatgcccttagtgatctcgtccaattattaaaaaaaaaatcaaatactctattcctaagtacaacaaaatcaaatcgtaaacaaactactaataaaacatgggaactccaattcagtgactttgtgcatgttggccaattgatttctctactcttaagggtttgaatgaatttaggtaatatttttctcccattccatatagaaaatgaactaattcgtacaaaattcagttagaacactatacacttgatcatcaacattgtgatatctcattagccgtatatccatgaagatcgtcaccgactaagttgcagttagtggccaaaataatatctacattttggagagaactcgctcactgtttgctgcccagatgcatccatcagggccatttcactctgctatggaaagatttatgcatccacaacatgttgtaataatagcttaggcaaaatgatattcaaagcctaagatgagaaatcaggatttatgtcagcatacaagaaagcattatatccacccaaaaatttccaaagaaattagctttgtccatccatgtccagcacatcattaagcatgcgtgaccccagtactgccactctatttcacaataatacaaaagatcttgtttacaataacataaaagataacattaacagtgtagtctgcatatgacattctggacatgatacacaaccaaatagtgtactctgcatcacaacaagaatcctactggcaatgtgaaatcaagccaccaattcacccaaaacagaactaaccacaaacatcacatgcattgctgctacaccgcaaagatgatacataatgaacaaaaactgaaccatgcgaagtaagctgaaaaatagttaacaagcgcaatgaacaatccatagcaacacccaaaaggcaaaactgcatagtgcaaacatgaccatagctggaatgaactgatcaaaacttttcgcggcacaacagagtatatcgattggatgacagccaaaatttcagtggcgataatagtttgtaaactagcatacatcatcatgtatgtggcatgcctcactgtaaactaacagaccaaaaaagaattccgatacaagaaaagcacctgttcatctactggcaagtgcaagcatgggtgaaatcatcccttggatcccctgcaatgtgtgctgtatctgaatctcctctgcagccatcctcttaagatttctaacacaaccccttaggttctcatctgatcggatatcatccgcgcgcatctccagcaccttgtttgccacccccatcaagaacctggcataccttggcaaggttgcatttcggtgcaggaacagcaggagaagaacgagttcttccgtgtccaagttctcgatgcatctgaccagctttctccttgaaactagctcctccatcaccgccactatgctccttggattgtttcgagctaacgctgaaactagagcatccttgtgcctgaacttcctcagcaacttatcgtgttcagcaaccttcaccttcttaggcttctcaatcacaaggtcaccttccttagccttcgcattttgtccacggaggaagtacctatagttggacggtgccaaccgccgcttctccggcttggttggtgcccaatcaagctcaccaccaacacccttaccctcttcctcgtcctcccctgtcgacttctttttcctcctacccatataaattgtgccctttgaagatccagcaaccagcactgtcccacacggcgagcacgccaaggaaagcaattccttaggatatcgcatcgagtgcgtgagcttaagctcgccataatcaaagctcttgacataaccatcactccccgcgctaagcagccgcgtctcgccggtgttggtcatcttggcgagcgcgagggccatcaccgtcttgacatggctctccaccgagtggagaagccgcccgccaccaatgacatcccaaatcctgacgacgttcccgccggctgtcgccagcagcccgccggacggcaggaacagcacgctctccaccaattcgccatgggagaaggacagcgtcgacgtcttccccatgcgggcgtcccacaatttgacgatgcggtcgtacgagcccgtggcgaagatgttgtggtcggcgggggacgcggcgccggcgcggatgtagtcgcggtgggcggcgggggcggcgaacacgggcgtctcggatggcacgtcccagtaggcgaggagcgcgtcgtcgccggcggtgaagaggtggaccttgtcgccgccggcgacggggtagcggacgacgcgggtctcggcggtgtgggccgtgagcgtgcggagcgcgcccgacgactgcttcttgtcggcgcggaagacgcggacgacgcccttcttgtcgccgacggcgaggagggagccgtcggagcggaaggacggggagaaggcgacgtcctgggaggcggggatgcgggggagcggggagagcgggtcgccggagaagaggagcacggaggtggacaacgaggcggcgagggtgggggccgacgagggggagaaggcgaggtgggtgacgttgaactcgttggcgggggtgagctcggaggcgcggaaggagcgccagtaggaggcctccggggagaggcgggagggcttgcggccggaggggaggagggcggggttcggcgccgccgggaagaagggcttggaggtgtcggcggccatggcggcggcgggggcggcggcggcgagtgaaaccctagtttgtgggggagaagtgggggagagggggtttatgggttttggactttgttgcagatgggccgtggagtggaggaacgagttctataggagaaatggcgatggatggacaggggaattttacaatttggcacctgtttctccctcttacagtatgccaccgagaagtttgaaaatttttggaaactactcgcaggagatgaagttctttttctatattgataccagaaaatatacccgtgaattgcaatgagggaaggctattttaatcttattattgttatatgatttaattaaggtgaaatttgctgtgttaaattcgcttggatatattttttttatagaaaattatgagctgcaattaagagtatgatcgtctctaaattagcttatgagtttttttaaagagatttgttataagattcattctgtatttcaaaagcgaatgaacttttaaaaccgactcctatacggatgacgtatcaaagtaccggcaaaaacatctttaatttttataatagtagagataaatagtatggagaaaaagagaaaaaaagtttaaaatggaatagtcaaaagaaacaatcagatctatttctctctacttgtctatttttctttctgtttcatagtcttatacgcaatcatttgcgtatgaaaaaaacaatttggccatttggggcatgaaacatttgtggaatatgagaaaaaaagtgcaacatctggatataaaaatgaaactttttgagaactggcatataaaataaataaataagttaaaacaccattaaattcaaattataacatattggtctcacacacgctacgtatagttgcaacgttggaatcatcaatatatttatagagaataccttcttcctaaccaaacggtttgagcccaagatcgttttctttgaaaacagaggaaaaacaagaaaccacagtccgacataacacaacttggaccccaatgtcactatgtagggcgacatgggcaatgaccaaactcactctaccgccagccctcctcccgccatccccttcctcgtaaccgccagagcatggcagcagccgtatgtgcagctacaaggacggtgacggcgggcctctaatctatcgttttccattcctccccatcctcgagctccgtgaggccacgacccctatgatgacgatggtgattgtgatagggatagccagatctggagccacctcgaccggatacaacatctccctggatagatccggcctagatcccacatccctgattagattcgtgcgcagtggaggtatcgaaagaggcgagctcgacaagcaaatgtggtgacatcggtggttgggtggcatcggtggtcagatgtatggactatggtggtggcatgcctgagtgggagaggccagcgaggattggtcggaagaggcggtgacttctcacctagacttgttgtctccgtcgactagatccgatacgggacgacggtctagaacgaggaaggctggcgagggtgtgcttagtgggtaggcgggggcgaggttggcgattgggcggctcagacagtcatagtggagatggcggtgtgcttgagggggcggcatctgatatggaggcagcccatgaggaggttgctgagggcctataaaggggtgttgatgtggtgactatgtgctggtggtggtcgacttggtgcaaggtagctatgatgatggggggagaagcctctaggtgaaagcctagctcgtatttctatgagctggcaacgatgacgttttgggcatcacaatccctcgtgggggtgttgttgagatgtctctttccctccctagcaaagcactttggatgaaaaccttgcccaagttctcttgggtgggagacggcaatgctctcagtgtcaaagccttacaggaggtgtcatctttggaggcccaactctgcagttccttccttggggtatctgttcgcctaggacaacactcttcaaagttacatggcggtggacatgtgcgatggatgagcgaatctttcttctatgtcgccctctctctctacactcttaggctatggtgatgactgggagccttgttttgtatggggtgggcgatgggtagtgcttttgtggcccttgctctcctggcgacgagcggtcacgtatagcagtggtcagcttggtgctggatcccttccttgtggtcaggtgtgaggttgtatctggcacatggtatcgtttgtttcttttctttttcctagttatagcatcccagggctttatagtacaacattttatagcaaaagttgcattcaatgaaatcacaatatttaaaagcacatcatggaaccagggaatcatgcttactctgtcttcagcaacatttttgttgtgaactctcatctatagtgcaagcgatccagaatgtccaacctgcataacaacattgctgctcccagatctagccatatagccaccaaatattggatattaggattgagaagcatgggaaaattagccctcgcaaggcggtagagaggatttctacaattgtgtttttgtgtagctaacaattcaaccaggcaatctctccactttaggcagatatgtgaaaatgtcgaatgatgcctgcgaaccactgaaatggtgaagtgctgctgaaaaaacaagtagaaaatgctgaaagataattatccacataggtttcatgcaactggacattgaacatctgaaatacaccaccgtaaagaaaccaattactggtgtctattcggcaatgtttttaatgcaaactctaatgatagtttcataaacatggacatgtacaatggttcgatcatatataactagataatctctaacatgtgttcttgttaatcatataagtttagcaattattgttataaaaaccggtaccttaaactacatcggagaccaaacgcggaagaatgccataaaagatccaaacttgatgacaattctgaggtacgatatttgttaacatagttaagtggaaaccttgatctaccgtcgacagccatcccctattgcatatgttaaatcgtcatgtggttacaacatgcatgcctctctatttaagagagagcataggtcagaatccgactctactactagcctaatacttagcataactccaaaccctaaactgtaacgactttgtgcacatattggataaaaactctaaccattatcacaaacaatttatgatgtcaagctaaatcttagactctgaaatggttgtcaaccttcagagattaagggcttagcattggcggcttagcattggctctttttcaataccattggaatactctaaaataaagtgttacaatgatatccgtgtgcttacaaatttatatgtgaacgtaacaaatcccaaaaggggtggagggccggctgggatttttatttatttttatttaagttggggttgagaagacctataagttatctctaacaacactcaaaattatgtccgttacatatgagagacaattatcggtaacgggcttagagccattacagataggctcatcaataacagcttcttcttttttttagataatgaatcaataactgcttcctaactgagccattgcagatagggtggataatgtctgtaacgactcctcatcaactgtccattacagatgagtgttaatcctaatggttcagatgccacccgttacagatatgtgatttgtaacagatcgttatagatgtgagctagggtcgtctatgctagtgcacgtagatagagaagatccattatatttgtaccaatggccacacagtgaactctccttcacattcaggaaaacacacattgggagtttccaatggaaatggcaagcatatggaacttccagaagagaaagatagcagtgttgctctatcagttagtgatacccaaattgggtctgagcagttagggctgagaatcaccgggaaattcaccctcaccgaattattatttccagtatagttgttgtccataggtaggagatgaaccgtaaccgtccgttagggatgaatcgaggatattagaaagaaatttttgttggcctcaagcgcccatttctgatcctagactattaattccgttctatcgaggttgtagtgatcttcagattgttggttgtctgtcaacagtcataggctaacaatatctgggatcttgaatactataagcgcagttgtaccattaagaattatgcacaaagtggtagcacccagattcaaaataatactacctccatattttaatgtatgaccccgttgactttttatctaacgtttgaccattcgtcttattcaaaaattttatgtaattatcatttattttattgtgacttgattcatcatcaaatgttctttaagcatgacataaacattttcatattttcacaaaaaaattgaataaaacgaatggtccaacgttacttaaaaagtcaacggcgtcatacattaaaatacggagggagtatatagttagttggaaggttggactcaaagtaagttaaaacactcaagtaggccagagtatgagagacatatcttttatttaggtgacatatttttctaacttttgtggatgtatatcaggatgtgaagcacaaaattagctgcagcacatggtggggtgcaataatgcaggtgccaaattacttggtcagttaacaatcaatcacactcaagagatggagcacaagaaacaaaactcaacgcttgggaaatgctattataatcaattaatccgaattccgtaaattacttgttaattcccaaattattttctgaaatatactataaagtttcttgatttttttaagatgcattaatttgacatattcttaagtttggtctttattacgtgccatgaattttctatatatatattgttccgttgaaccctctatgccaataacacgtccatattgttttttccaagacttcacaaccacgaagaactcgaattcatcctcaatgcgagccaatcatgcatggatttcaggggtgaaatccgtgtgctgcttggcattccaattctcttgaaggcctcatctacttcatcgctgtatcgccgaccagcttgatggtcttgctactagatctcgactagattgcagtcctgtaatgtggaaggggtgtgctcttggatcaacacaaaagagtcttcaaaaaaaagattaatagctgaaaaggaattggagagcaattcatttccccacagtatatctgaattgaatgtccaacagaattcaactcggccaattcagatatccaaaacgaagcctaaagcatcatgcatgtaggtgatcttaataagcgagtaactcgaat

SEQ ID NO: 10225 - DNA, 11583 bp, Oryza sativa
attgtatttatctgaagactttcgattgttctaacacaatcattgctgctactctattattttttatttattttcactattttttttaattttctagaaacgcatgatgctaacgtgaagtgacgactttccctcgttccgactctgtagtggattaattgtaatcctattgttttagggccggtttggattggattcaagccaaaacgtgccctaccaagattttgggtaacataaatagtaaatgtgctagtttggattgaagctaaatagttggtagtgctcatgctcaatttagctatattctaaaatcttcttcacaaccctactaaaatttgattttatattggtatcaaaccaaatatagattagctaattttgccctacctaaaaattggtagtgccaaaatctactaattaattggtagggtagagaagcaagaaggcccttattcttttttttcctttctataatggctctgtacgtgctaccttcagtacttcacgttgccttttttttttccagcgaacggcttatcgcgggggaagctgatgggccactgaccgcgcgcagccttatcccctatatactatatactagtagtatattgtactcctcctcatactactatacaatgtatttgtatttgtacacagatatatatacttttaatatatacataccaagtcattttttatgtatgaaaaatatatacacgtatacaaactttatatgcatacatatgcaaactttgtatatgcacgtatgcaaattttgtatacgtatgtacgtatgcaaaatttgtatacatcgtatacaaaatttgtatacatgtataatatacaaagtttgtatatgtatgtatacatgtacaaactttgtatacgatatatacaatgtttgtatacgacgtatgcaaagtttgtgtatatatgtagaaactttgtatatgatgtatataaactttgtacacgtatatatagatttaaaaaccggaaaaacgtatatatattaaaaaaactggaagaaaacccaaagaaaaaaaagagaaaaaatggaaaaccgcaaggaaaaaacccaaaaaaaccgcatgaaaagaaaaaaaaaaccgaaaaaagggtatgtggtgtgctctcccaccgccctcctctctccgtgcacgccacgtggctgcgccgcggggggtggggggggagggcgcgcgactaaccgctagttagcggtttcggcttatcgttgtgtgaggaggagcccatgcgcatgtacatattgcggaaaggccgtgggacaccagggcgaggcccaaggtcgcacgccctagctagatgcaggcccaccccgcatgtttctatttttctccgatctctcatgatgcggatacttcacccatcactttaacacgtggcagtttctcagagaattcaaaccaaattcgttgggtgccacgtggcccaatagaaaaccagatcacagaccctaaattcggtcttagagatttcttgccatgatacagaaatcattcgcccaaccttgacgcagacacatgctatgctaggatagcccgtcatcgccgatgctggaccacggatcgcctagagaagagaggattgccaaagtagagtcttgtcttttgtttgcaaatcaaaagcagattcaatgcagcttggacaaaattgttgatttctctagtacccctctgcttcatattataaatcgctttaacttttttttcttaatcaaacttataaagtttgactaagtttattaaaaactagcaatatctataatactaaagtagtttcattaaatctagatttgaatatgttttgataatatattattctttaggtaagtttaccattctttaaaagatactaggaggtaccatattttctgatgtgtaactttggtaccttcatgtactataggtataggataccaaaattttaagtataaaatttaggtaccttgatatacttttctcaatgactgtaatatttattttgtcttgtgcattggaaatgtttctacgtttttctataagcatggtcaaaattaaagatgtttaaggtcctataatatgatatggagggagtagcaaggatgatctttttgtttgttcagttgtaaaggaacttccctttctcacttatgtggaaattaaaccagcaagaaaagaatgctatcacttgtcacagctctaatgatgatgctgtaacattgtaatccaatccttcaatcagcctccatactagttatacaactagcttactaccactgctacactatataactgaccaaagtttcttctctgaattctgatcaagacactgaagtctgaactacatacagtgtacagtcacctaaacatgaattctgaacaacttgatcccttgtaagctgcttcttctagggacatataagccatgtcgacggattcaagccatgtaatctacaacaaccgaacagccctagtcacctgtaaattaagagagttgagaggcactgaacatggaaaagaacatataaataagtagtatctgaagtatcatgttctcctatgaaaaattgtactcttttcgagacagagtgtggttgtgagtttgtggactacactatattgtgttcatcaaatatgaaacatgtgctgactagattcattttcatctagctgaatatgcgccaaagacatgctactaatttggaaatgggaggcttcgggtcattgcgatttgcgcagcttgatcaacctacagtgccctcttccttggccgtctcaagtttccttccttgccatgacacagaaaaccagggtttacagggaaataaatggagggaaacaacagggtatacaacaattccagggtgacctggatggagccttgttgaggaatctttgctctctgttgtcatgttgtttttttatgattctttttgtttgtgaagttgtaacctaaactttgcgccttttccttcttaatgcaatatcgcacaactcccttcaagttttctgtttataaaatttgcagcatcattcttgtcccacagattcagtccaactcactggttacttaaaccatttcactgaatctgtttataaaagaacttttctttctcacatctatggagtgaacacggtcagtcagaacatacaaacaacaagcaaacatggtaaattaaccagcaagaaaaaaatgttatcacttgtcacagctctaatgatgatgctgttacattgtaatccaatcatttaatccgcctccatactagttataccactagcctactaccactgctacactacattcctgaccaagtttcttctctgaattcagaacaagacactctgaagtctgaagtacatacagtgtacagtcacctaaacatagagagctctgaattctgaacaatttgatcccctgtaacttgcttcttcaagggacatataaacctgaccacattatgtacacagcaatcactcttaggcctgaatgtctgatgatagatgctgcctggcaatgctgccatttggccttccatgcgtcaaggtttgtttaagccattaaatctgcaattgttaagcagctaaaagtttttctttgcaaaattcgttgaggacaataccttataatagaaaataaaatataataactattttactagtgcctgaaacttttcagatgaacaaaaaaactcctttcgtatgacataacgtatgtaattcaggtgttttcacgttatgtttgccgcgtacaatgttatttctcataccagatagtttcgaagtccaacgaaagttttcttcaaggtatccctcgtcctacctatctgatggtgacaaggtggtcaaaacaaactgtccaaatcaccaaattcagctcattgactgaagaacaatatcacttctagtctcatattctcatgctattcactcttaagtcatgttgtaatcggcaatattcgagcagccaaattcatctgtaaagagacttgagtcacttgacagacactgaccttggagaaaaaacatagagaaaatataggacttttacggtacattctactgcaagtatatacttgcagtatataaaagggtatgtttggtatttgttaaaaatctgaaaatggctgtttagtcatttgaagttaggatttatttttatcgggagtaattttccaccggtagtagagattttttggtcgcacttgcatctgaaaatatttatcagcactgttaagttttggcatgcatagccatgatccatcaatttgatagatggtgactagttagtccatacttttttgccagacatatcaagttctcagtatctactatgttgatttctcagtttatgatgggatgatttgccagttttatcaatccccgcacggaggcggcaccaggagacagtcatgcaaaatgaaaacgactatggctatcagtacaatttctcaatggggctggggctggcgaccgggcgaacgagaggctgggacgcgtcgtcgccgacggcaccgagtttggctctggcgcttggagagttttggttgtcgacggcggcgatagcgcatggaacgaaggaaagctaacctctcgagcggatttatctcaagccggatctgacaaaaaaacgcgaaaatacaaaaataccctttttaatttatactgcaaactaatttagagagagatcagatgaatctgtaccgttggatcgtttatactgcaagtatatacttgcagtatagagtaccgtaatcagtttgtgagctctgattctgaggtatccatgttttcctatgaaacattaggcttggactacatattaagtttatcaatattgaaagttgttaagagcattatagtcttctcccatctcttttacatatcatatatacctatttggcctaactcaatattgcaacaagttcgatcctcaatttctctcttctttcagtatttgacaaaagtgaaacaagtgttccctatatccatgttcatgatgagttatctattcgaagacgtgccggaaatcctaattaatttggaaatgagaggcttcgggtcgttacagtgccagatcaacctacagtgccctcctccttggccatctccagctttctgttcttgccatgacagagaaatccttggccccaatttgttgcaaatactcgcaagacttgcagtgggtgtcgctgttactggactgcatcatgccttgagaaaagagaactatcaccccagggaactgcatatgtgtgatcaagttacacagagaaacattgatcacatttgatgaaattatcagggaactgcgttttgttctgtatgattgtgcttttggttagctattttgtttgttcagttgtggccagactctgcacttcttcttgatggaatgaatgcgcacacacatctttcgcacattccctaaaacatatgtgtgcacttcttgttttctgttataatatttacaggttacagcaccagttgttgtcccacaaatgtgctcagctcaagccctatgtccaagtcattgattagaccatcccaatgaattgaatctcttgtactaaatgaagttctctttctcacctgtggagtggtcagtcaatcagaaagaacaagaaactagggctgtgtttagttcccttcaaacttctaactttttcgtgtaggatcaaatcacagtaactaagccaaccagagggggagtgaatggttggtatacccaaaaactgaaaacttttagcggaaataaaagctaccctcaaattcgacggatcgcggtctgaccgaaggtgttgcgctggtctgaccgcctgataaacgtcggtctgaccgatgtagattgatcggttgaaccaccgagatcgcctactagctcctgccttcgctgccggtctgaccgcctcgtacccgccggtctgaccgccgcaatgttgccggtctgaccgccggtgcgttgccggttagaccgccgaaacccggagaacacaaatcgaagaactcttaaagtggatgacgactttattgattctctctgtgtttacaaagtgcaccaacagcactccttacaaaaatttcgactaaactcgaaaccataattcaaaactcaactcaattgctctcaaaagcgatatcgggaagcctcacgctccccctctatttatacccgaggtaggcagcctaaagccacgaaccaaactcatactaggagtcctaaacaccttaggaaaccctttaacacaagaaccaaactttacataaccaattataccaaatttggactcctttcaaattcgacttcgcatcccatatgcacacaataactccatcgtatgccatatggaatcttcaccaaccacgtgcatcaactctagcctaagtatcccgcatgatttctgaccaccacggacgtcgtcttatccccaagccgactcccggtccatcaccgcaaatactctccccgaggcatcgagtcacctacacatgaaataaacaaagaaatcatattccgagaccaagctatctccaacttgactcattagtagcaaacaacagtattacatacgtatagtatccatctagaagccataatcatgaaataatcacggatatccaaacaaacaacccgaaaccgaaaccgacacagagtcggccggttagaccacgggctaggccagtctgaccgcgcgatacacgccggtctgaccggcaacacttgcccggtctgaccggtcacatgaaataacagcagtatcctgtagattcaccagtgaaatccaatcatctccataaccacttcgtgaataaattccaaatatcaaaaccaataatctccgatgccaattgttcattacaaaataataatcaaaaacacttttgattttacatttcgtcacatcaaatgtttagacacatgcatgaagcattaaatgtagaggaaaaaaatcaattgcacagtttccatgtaaattgcgagacaaatcttttgagcctaattacgccatgatttgacaatgtggtgctaaagtaaacatttgctaatgagggattaattaggcttaatagattcgtctcgctgtttacagacggaatctgtaatttgtaattgttttgttattagtctacgtttaatacttcaaatgtgtgtccgtatacgtcaaatttttttttgccagaataactaaacacggcctaggtaaacttgaaagaaaatactgttctcacaggtctaatgatgatgattccattggaatccaatcctcccgattcttttctgattaagatatatattttatctcggtttccgttaccacacttttcaaaccactaaacggtacattttgcacgaaaactttctatataggaattgctttaaaatatcagataaatctattttcaagtttagaataattaaaacttaattaatcatacgctattggttttcttgttttattatgtgaactcaaatagggtaaagtactaacagaagtttttttttccctttttctgaacaaggctgaccaaattatgtagcccgcaatctattgctcgatactccctccttactcataaaagaagttgtttagggcaatgtttaagtcaaaccttcggaatataaatcatgaataactctcaagttgttgagtttaaaaatataaaaattatatgaatatatttgtcttgaaaaatactttcataaaaatatacatttatcacttttcaataaatatttttatagaaaaaaaaatcaaagttgtgttttggagaccgtgtcgcttttcaaaatgactttctttactagtaccgagggagtacatgctttggcttccctgaaaggcgaagggctgctcttgacctcaattctgcatcaatttttaccatatatcaaggtttgtttaacccatcaaatctgctctcattaagcagacatcttggcttagcacattaatatttatataacatactgtatataataaccagttactagtttctgaatcctttttttagatgagcacagaatctatgttcgtcaggcagcgtttgtcatgttccttcatggatgaaagctgtgtaacgtcatctttgtcgcgtacaattttatttctcaaattgtcatgccagatactttcaaagtccaatagaaaatttctacagggtatcgatcgtcctgcccgtctgatggtgacaaggtggtcaaaagaaactgcccaaatcacaagatttcactgctagtctcatgctctcatggtatgatcactcgtcttctttaaatgcacaacaatccgtgtcaaatcatcaaaagcaaggaactcaagcaatggcaaattaaggagggatgtgtttagcactcagttaatcgtctgacatacaattcttaccgcatggtaaaccagaaaaaagaaacaaagaattttgtgaattgacacagcttgtacttcagttcagatactatggcctgcttggactttgttcacaaaattctttgtttcttttttttccggattgtcacagttcagatactatattcacaaatgtatctaacttaagtactcatgttctctgatgaacattggactttgttcctgagaaagagtgaggttgtgagtttatgagctatattatgttcatcaagggtgaaacatatgcttgctccatgttttctgtttataaaatttgcagcatcattcttgccccacagatgagctcaactcaattcctatatccaagtcatggattaaaccatctcactgaacctctctttctcacttcaacagagaagaacacatggtaagccagaaatgtataaagagggtaatcacttgtcactcctctaatgatatgactgcatcgtaatctaatcctttaatcagccaacatactagttataccactgctacactacactttgtaactaactaaaggtttcttctcggaattctgcacaagacactctggattctgattgtctgaacaacatacagtgtacattcccctaaacacagagagctctgaaatcttaaccacttgatcccctacaaactttcttcttcaaaggacaaatgaacctgaccaaaaagtctgtttaagccattaaatctgcaaatcttaaagcagccaatatttttctttagcaaaattggttgaggacaaaaccataaataaataaatacagtataaccaatttaggctgtgtttagttcaagccaaagtttggattttggttgaaattgaagatgatgtgactgaaaagttgtgtgtgtatgacagattgatgtgatgggaaaaataggaagtttggatgaaaagtttggatctaaacacacccttactagcgtctgaagctcggatgaacatttgactttgttcgtcacacatagcatcgtcatggatgaagtctgtgttcacgtcatctttggcgcgtagaatttaatatcacaaatcatcatacctgatattttcagagactaataaaaaatttcttcagagtatcgccttgacctacctatctgatggtgacaaggtggtcaaaagaagtggcccaaagcaccaaattcagctcattgactgaagaaggacatcactgctagtctcaacttgtatcaaatccttgttaaatcatcgaatgaaaagaacataagcaatgccaattcaaggatggatgtgcatttatccacaaatcttgagcacaacatggtgaacttgatccaggaaataaaaaaaaaaagaattgtcacttgacacagctctgatgaatctgtgatgatgagtaacactcagtatactacattaattagaatcaaatcattaatcaaatctccaatctggagtaacactgctaaactagaaactaacctgcatatcatactgctcataagccactaatccttaaccatctctgaattctgaacttgcctgagaactctgaatactgaacatgtctgaaaactctgaatttatatacagtggtgcagtcacagagagagagagagagagagagagagagagagctcagaagaatggcgcgccgagcggctccgtcttcgccgccggcggcggcgcgagcatggagaggtcgtcggcctgcagcagcgagccgaggccctggaggtcgtcgaggctcatccccatgagccagtcgtcgtcgcgcgcctcctccttgggcagcagggcgtcgtcgaacgacgccgccggcagcgagtagtccatctccgggaacgcgtcgctgtcgacgacctccgactccggcgtccgcgtctccccccacgactgcgccgccgccatggcctcctcctcctccttcctgctctgcatcttctcccactcgttcttcttgttgtacagccggcacagcacccagtcatccagcctgagcgcgcccgcgcccgcggcggcggcggcgccgcccttcttggcgaggcggtactcgtgcatgatccactccgtcttgacgccgcgggggggcttgccgtggtagaacacgagcgccttcttgatcccggccgtcctgccgttgtgcagcacgggcttgtcggcgccggtggccttccagtagcccgaggcggcggcgcggttggggcgggagccgttggggtacttgcggtcgcgcggggtgaagaagtaccactcgcggcggccgaagagggcgcggtgggggaggtcccatgggtcgtggcggtagaggtcgagctcggcgatgatggggaccggggcggcgcggcccgcggcgcgcgggcagaggtagtgcgccaccagctcctcgtcggtggggtggaagcggaagcccggcgggaggttcaggtccgcctccgcgtcgcgcactcgccgcttcgccgccgccatggacacgaggtgttcgatcttgggacttgagggaatgagggtggtgggttgttggatgtgagtggcggcgggggtgggagggagatatatatagagggaggtgggaatggagaagattcgtgggaaggagagggggggtcgaggtggatatggggagggtggaggaggaggaagaagcactgcagcggcatattcggtcgtctgtctgtcctctgtcggttactcggttgatgttcatctgctttttttttacctttaattttaaaagttaaccgttctaaaatttgttttaaaaatctaaacctttttacaatgttagcctgcttacgcgtggcaaaataataccgtcacactcacaaagcccgcaatggttgtgatagttttgtcatgtcacggtgacatagcaggacaatattgtcacgccagctaggggtgaaagcggtcacggaaattaccgatcgaccggatgtcgttttcgtttaaggggtactgtttccgaccgtatcgattttggctatttttaaattgagtaaagtccatcaccggtccctaaacttgtactgctgtgtcatcccggtccctaaactcgcaaatcgaccgttcaggtcctcaaacttgttctactgtgtcatcccggtccctaaacttgcagatcactcgtttaggttctccaacttgttcagttgtgtcaccccggtctctaaacttggatttgaatatcatctgggtcaaatag

SEQ ID NO: 10226 - DNA, 13239 bp, Oryza sativa
cactactgaattctcatcgctagtttctgcacgtacagaaccagcgagagcaggcctccgaaaccatgccccgctgcgacgtttgcacggacgggcgagcgatcaggattttagggagcgcaaggcgtgactgctcactgttcgtttgcttcatcttcttcttggtaccgtcagtgagagcaaggactgcatccacaatagcaaccaatggcgagaaaggtggcaccgatggagcggagaacatcaacaccaacggtggcaactacaacaataatgcctcatcctcaggagcgttctctaggtatattactctaattaccttagtgttaaacatgttactagattatactattattattagtagcatgttcatgtttagcactatcactggattatttcggttttcacatgtcgtgtttattatcttttttttcttgattaaaatatgccaaattatgaccatatttccaacaatccaaaaacaggtcgagggaggttctagcgccaatttggtgtagaagaagaaccctcatgcatcccacaacaacaacaacaatgtcaaacctgacatcaaacccaaggctacaaccaattttaagaagaaaggcaagagaaaggcaaagggcaactgctttgtgtgtggtaagcctgggcattaggccaaggattgtcctgagcgcaaggacaaaaagtctgcaaacatggtcattatcgagggcggaggaacatcggggtatggtaaatttttacctacagttctctctgtttttcattcacctgattggtgggttgatcctagtgctaatattcatgtgcgtgctgacgtttccttgttttcttcttatcaggtcgggagatgttcctccttgttgatgggaaacagatcgcttgtggctgttcatggtgttggtatggtcgatctgaagtttacttcgggaaggaccgtgcagctgaagaacgtgcagcatgtcccttcaataaagaagaatctaattagcggctctctattgtgtaaagatggttttagacttgtttttaaatctaataagtgtgttgtttctaaatatggaacttctattggaaaatgttatgacagcggaggcttgttccgtttttctttggatgatatgtgtaataaagttgtgaaccatgcaacaaatgatgatgagtccaatttgtggcattcgtgactttgtcatgtgaattttgagtgtatgacacgcttagctaacatgagtttaatcccaaaattcaatttagtcaaaggatctaagtgccatacttatgttcaatcgaaacaatctcgcaagcctcacaaggcacctgaggcgagaaatttggcacctctacaacttgttcattccgatctgtgcgaaatgaacggcgtgttgactaaagggggaaagaaatatttcattacattgatagatgattgcactagattttgctatgtgtacttattgaaaacaaaggatgaagcattgcattactttaagatctataaggttgaggcagaaaaccaactggaaaggaaaatcaaacggttgaggtctgatagggatgaagagtatttttccaatgaatttagttctttctacgaagagtttggaattattcatgagaggacgccttcctgttcaccccagtcaaacggggtggccgaaagaaagaaccgcactctaactgagatggtgaatgccatgttagacactgcgggactttccaaggaatggtggggtgaggcaattttgactgcatgtcatgtcctgaataaaattccaatcaagtataaggaagtaacaccattggaggaatgtgaaaagaagaaattaaatctcacatacctacgcacatggggctgtttggccaaggtaaatgtacctatagccaaaaagcacaaacttggaccaaaaactgtagattgtgttttccttggttacgctatccacagtgtgggatataggttcttaatagtaaattccagagtacctgacatgtgtattggtacaattactgagtccatagatgctacatttttttagaatgaatttcctatgaaaaaagcacctagcacttctagtcaagaacctatttcatcccctgagcactttacaccgatagaacacattgatcaaatgtttgagggaaatcttgaggaggaaaacattgtagatactcgaaagagtaaaagacaaaggactgcaaagtcctttggtgataactacattgtatacctcgtggatgacactccaagaaccatagaagaggcatattcatctcctgacgctgactattggaaggaagtggtatgcagtgagatggactcgattatatctaatggtacttgggaagtcgtcgagcgtccatatgggtgcaagcctataggatgaaaatgggttttcaagaaaaaacttaggcctgatgatacaattgaaaagtacaaggcaagacttgtggccaagggttatacccagaaggaaggcgaggattttttcgacacttattcaccggttgctcgcttaaccacgatttgagtactactcgctctggcagcctctcacggtcttctcgtccatcagatggatgttaagacagctttcctcaatggagagttggaggagaagatctatatggatcaaccagatgggtatgtactagaaggtcaagagggaatggtgtgtaggctgctgaagtccttgtatggccttaaacaagcacctaagcagtggcatgagaagtttgacaaaacacttacatctgttggctttgttgtgaacgaaactgacaaatgtgtgtactatcgctatggtgggggagagggagtgatcttgtgtttatatgtcgatgacatattaatctttgggactagcctcaatgtgattgaggaggtcaaggactttctgtccaaaagctttgaaatgaaggatttgggagtggctgatgttattattaacattaagctattgagaggagatgatggtgggattacacttgtgcagtctcactatgtagacaaggtcttgagtcgctttgattatagtgactgcaagccagctcctactccttatgatcccagtgtgctattaaggaaaaaccgaagaatagcaagggatctattaatatactcccaaacattggttcattgatgtacttaactagtgcaacgagacttgacatctcatttgctatgagtaagttgagctgatttgtttcaaatccgggcgacgatcattggcatgctctggaaagagtaatgcgctatctaaaagggacagtgagctatggaattcactatgccgggtacccaatagtactggagggctatagtgattcaaattggatatctgatgctgatgagataaaggccacaagtggatatgtattcacacttggaggtggcgctgtttcatggaagtcttgcaagcataccatcttaatgaggtcaacaatgcaagtagaactcatagctttagatactgccactgttgaggccgagtggctttgtgagctcctaatggatttgccagtttttgaaaaaccactactagctatcttgataaactgtgataatcaaacggtgattattaaggtgaacaattcgaaggacaacatgaagtcatctaggcatgtaaagagaagactgaaatcctgtcagaaagttgaaaaacttcggagtgatagcattggattatgtctagacggctaaaaatctggcagatcagtttactaagggcctatcgcataatgtgatagacagtgcatcgaatgaaatgggcttgagacccacttgaagttacacaatagtggtaacaagctattgggtggctgagaggagaggcccgtgaattaggatggtgaaacaagctattgggtggctgggaggagaggcccttagattggctcatttatctgatgtacttatctccttgtctctatggcaagttggtgcataccttaatatgatccgagtgacttttcttaaagtagagatgttggcctatataacatcttagaaggaacacacctatatgagtctgactgctagtcacagtcttatagatttgggtgatctctagaaactcatgaagaggcctagagtatgacttatatgctccaaaccgagtggatgctttagtagcctagtactagtaaagggctttggtgaagcttgttcacacaaaactgtcaattcaaggcatagtccattggtcagttgtggataagtgtagcctctgttcaaggtggatcttcaacttaacactctcctctagaaaatacgggtatatcaaaacagcagtggagctgagagcatttctcgtgcgccgtgaaatattggtggggattgttggatttatttgtgtttggcacatttattttcaattaaatctataatattcaaggcacgcgttaaatgctgaagaattaccggacatgatgtgtgaaaggtttttgttcaagaattgataattcaattgacacggaggattgatgactcaattagagaacaatataaatcctgactattactgttgattgatggtgttaatttggcaaattaacaacgtccattaccaataactgatgttgttcaatgggagtaatggtgtttcggtttcaacatcatctcctttacctctgtacgcatataatcagagaaggagctagctcctggatgtatggaacaaaaacacatcactccaccctgttgttgctgcactagtgcattctcatcgctagtttctgcgtgcacagaactagcgagagcaggcctccgaaaccacgccccgctgcgacgtttgcacggaggggcgggcgatcaggattttagggaacgcaaggcgtgactgctcactgttcgtttgcttcatcttcttctttgtgccgtcagcgagagcaaggactgcatccacgatagcaaccaatgacgagaaaggtggcaccgatggagcggagaacatcaatgccaacggaggcaacaacaacaataatgcctcatcctcagaagcattctctgggtatattactctaactaccttagtgttaaacatgttactagattatgctattattattagtagcatattcatgtttagcgctatcactggatcatttcagttttcacatgtcatgtttattatctcgtttttctggattaaaatatgctgaattatgaccatatttccaacatgttcatgttgatatgcttgagagatattagtgatggacttgcattcgtatgttttgctcactgaagttcaaatattgatttctgcaattgtagacatgcatgtccttttctgtatgaattttgcttttgtgcttcctttgtttcgcctagtgattaaaattttggttcgaaattttggaccccaccagcaagcaactatatatctcgctcgaaatttttgaacttctccaaatattttgtgcatgtggtcaagatttattcaaattcaatcaaaatttgttaagatttaaaataattctgagcaaagaagtactggaaacaccaaaattcgtataatttcagtgacaccaaaatttcggcccaaactaaaagtgcaaactttggtttgacctatataagttaaacatgcctttgcaggtctgctcccactgtgcacagcacaatcatctcaatgttctttttttctctaggctatatatgatcatgtctgttgcagctgtcatataagccttttctccataggttcatacaagcttacatagtaggcttaggtgtgttatatatatactagtttgtacctctttccaacttctactctctcgtttttcacgtgcacactttttgaaatgttaaatattgtgtttatttcaaaaatattctataataacaaaaggttatatttttaagttttttagctaataattagttagccatgccaactgctctattttacgtgaagggaaaatttttgaaccgctactatatattgaacacatccttaaaagacattgagaactttagattcacattatatgttacagttactattgtaattgtaatgttttttcttcaattaatgccccaacagctctagctagggcgctaggtggcggatcgtctgatattgcgcccaacagcaactcactagaatgctttagcttttgagaaggaaacaaataggtggaacactactcccagtggatgatcccgaagtattggcattagataatgtaacagctttgttgtgatctctagactatattcaatatgtagagtgtgatgctaccatcgggtaccggacaactagaataatcacatcatgtgagtaaagctgtataaactctacagagtctaaaactaatcgattagccatgctcacggttatgagcggcttggtgaaatgatacaagtatagtgttggtgatttactaaatgatttgtgaaatgggtatggtgggtaataatgatgattttgcccggtgcgggctgagaaaaaaagttcacttactgccatagaaggcacaagaatgatactatgatgatatttatgctactattattatggtttactctttgatttaaatattttgttgtaatatattattatttactattgcgaaacaaaattttctttatgctaaaaatgagccacaaatatagtcatctttaatctcagcttgcaatagtcctaggtttcccatggcttgggtaggacttgccaatatcttgtgtattggcccatccctcgttgtttcttttagtcttatttgtaggaagcgggtgcttccgtttatcggagtttctagggatggttcttttctagggtgattcttagtaggttgcatttgtgatttgatagatacgtataccggagaacttatgtatattttccgctgcgtttgaaactctttttgtttggccaattggtggaaccattttgtaggactgttgccacctctaagttataagagccactttatgtacttatgtgccatgtgcattatatggatttgataacaatgttgtagatgtttatatggctagttggcgggactagtacagggtacgtttctaggtatttgggaattaaatccccaggtgccgatagttttaaagtggatctgataccatggttgaggtaccaaatatgatttattctctaaataatatgaatgaattaaataatcaaacagtactggatttggtggaggtgttgatgggtggtttgaagccaaaccgagctatatatatataacaatcaaggatacacaaatattcaagaaaatgcacacaaatccaacataaaagactcaacttaaatagaaaaatattgagtgttgcacaacatgtaaaatattgttgtgcttcctctgctttggcctatgtaaatccagcaccactttggacatctgctactagagagaggctagagttcatacttatctcattgttttttttaacaagcctatacatgagcatgtcttttgcataaccatgataaatctgtttattattaggtgcattaatacaatctttagtagtcttaggaggcatcggtaagtttgtattcaccgggaaaattcaaacatgtattagattgtaatatgcttgctctaaatgccccaatagctgccgagcggtggatggaggtgaaactgaaggggtgccaatcactagggactaaacatggaaatgtctatggcctttgtcctgaaggactgaaaggagtcttttgtcgatccctgtcttcttggaaaaagatcactgtgttgataaacgagttatcatgcttatgcttggataattaaattggcccctttagccacagagttttaaaagaaatattgtacagttggggctaagcacagacatacaacagtagtagagaagtcttacataaaatacgttcaatggagaatttttgtcagatccatttatttatctccagctaccatccatgtgttatatatatgcatgtgtttattaacgcgtatgtacaattttgcctcttctatgccatcccaaaagtaaccatgttagtggcaaccaaagaaatcatttatttccttcttccctcggttttgacgtagctatatagagagaatccattatatgcccctgagtttactctagttcaatgatttcccatcgactttgtcttcctctataatataccaccgactttatcaattttttctataatatgccatcaggatggataattttcaaaaaatacctaaaatgcccttcaagccatacaaggattgccgattgattggctctttataagttttgaaaaaaatatgaaagttttagtgtagccttcttatacgatataaagttttttttatatattttaagatttttttcaaaatatttttatgtggtatatgaaagatgaatcacatacacaaaacatagctacattagaaaaataattttgtgtagcatatgaaagattatttatataaacaaactcaacgttacagtattttattagcatatgaaacataaattatattttcaaaaaaattaataaatgcaaattgaaaatcttaaaatccacacacactttatattatgtgtggggactatgtaaaaaaatttatattcttacaatacttctggtaggtaaattaattgtcaaccctctatggcttgaagggcactttatgtattttttaaaaaatatccaccctaatggcatattgtagaaaaaattaacaaagttggtggcatattatagagggagataaagtcaatagcaaatcgttgaactggagtaaactcaggggcatagaatagatgctctcgttcctatcatgacttatatatgttgcttgtctgctcagtgcttacaatatagtcacggacagtcatctgatttggtcttgctctaattatacacgaacgtttgttcgtccatccatatcgccagtggtagttagctaggtgcaaagcgtagctaggcctaggaggcgatgggaaattcggattcagcttattcaggatactgggtaatgaattatcagattgttgcacacatcaatacatgaagcactcaatccagtggaatggtttattgttgagggatatccatcaggttaaaagtgacattattattttatcatgttatcaacatcttttccggctaacaaacctttttttgaaaacctttccagctaacaaacctaaagcctaactgaggttcgccatgtataacttcttatatgtacatatggataatgtttgggcatgtctccatgtattgcatacatgccttttaatctttggtatgcacaatatactccctccatattttaatgtatgacaccgttgactttttgtctaacgtttgaccattcgtcttattaaaaaaattatgtaattattatttattttattatgacttgattcgtcatcaaatattttttaagcatgacataaatattttcatatttgcaaaaaaaaagttgaataaaacaaatggtcaaacgttggtcgaaaagtcaacggcgtcatatattaaaatacggagggagtatatattaggcttaggaggcaaggagtgtaatgctgagtctaccctctccgtcaccattgagattatcctatatatagttgaaacttgaaacataaacttgatatgcatttacatcaattcagtgttcaagcatagcaagtgaaagaaactggagcatttacatacgtttacatcaatttcgcatgtactataaaccaaccaggcaaccacatatgttttacgtgtagttagggaaacaccttagctttacttcaatttcgcattcaactacagtccagttctacgtgtagtcagggaaacaccttagctttatcatggtggtgtagttgtggtcgtatgttttttgcacactagaactcaaattttgtattttgcagttgcacacatggaggtccttttttcagtatgaattttcgcttctgtgctctgttccggcctacataaattcagcatgaaactttgcacatctgcttcgattccactgctccatctcattgatctctgcctgacatctctgtttcataggttcctagttattactcctagctcagtaggcttatgacacattgagaactattgatccgtatgcccatctaatagaacacttctcgttttcaccttaagaacaggggagagatggacaactgcttactaactgcagaggagtcttttttatagttcgggggggggggggggaggtgcttctagtaactcccttcctattaaacatctacagtttattttaatgggtagcgtggagattatgggtacccctatagttggccataaggcccgaggcccgaaggcccagcccacggcacgcctttttggcccggcccaagcacggcacggcccgacttgggtcgggcccgtgccggcccggctcgaccgtcgggccgtgcctgggcctccccaccagcacgctgggctggcctggcacggtcgggccggcccggcacgatgggctggcaggccagacccggtacacaaagtatagggactaaaaatagacatataaatgtcaatgtctaaagaatagggaccttaaatagacttattttagctatttatataccacatcacaaagaagagggaggtaaaatagactttttttagctatacaatgtcacagcccaataggagggagaaaatttagacttattctgaggaaaagcacgatggcccatcgtgccttcgggccggcccggcacggcccgaggcgtgttgggccgtgcctgggctgtgagtgcggcacgtgggctggcacggcacggcccggtgtgtcggtcgggccgtgccggcccgacaagcctcggcccaggcacggccgggcctgggccgtgctgtgccgggcggcccacatggccatctataggtaccccatacctacacggtatggttatccgactagttataggggatagcttgtatctatagaatatataacggatcatgacttgggtattacgttaccttgtatattatagaacggcctaaagtcctgatttgataatattgtaaagtaaatttaggataccgataccgtattggttatggtttctatgttgtaatcctacctccatcctatataaggtgggcaggagaccttctagggggatattgacacccctgatcgtcggatctacaatacacttggcggattcaaattctcaaatagtaatagggtattacctctcattgaaagagcctgaacctgtttaaatcctttgtctccgcatccatccacttttagatctcgtacgctacccctttatattgctgaaatattgtttcgacaggtagtttgaattgaaagtagtggctttctacgttgcttggtatgtataagaggcattgatcaaatagaatctagcgaactgtgattaaaggtactagtgagagggtacttaaagttgtggatcgggtacgaaagtggaaggttagaatagcaatcggcttcccattatgtcctccttagttttagggcaaattagttcatctgttacggtaattttcattgaatcattattttatcgtctggttgaatgaccatttgttcgatttgtgtggtttttggctgcaacaattgacgcggaacaaaaatgtgatgtaaattgactaatagatcgaatctgatcatctgaagagtgtgcatgagagatttaatttgtcgttgtcaaatggaactagaaggcatcatctactaagaagagtaattctgcatcatccccacaatcgtgtagcctctgtatggtaaaaacagcaagtcaaccagaaatactcgtgattgaccaaatgaacgacggcatggatgcaacatctgatggcataagcaagcgatgcagagtaaagaacactccaggatctctttgccatctctttggagttataacgcaaaactagttgatcataaaggtatctaacgaccaacgattttttctgtaaacaattactacctgtatttgtgtcattgtttgttaccaatctacccttcgagattcttctgtaatcaacggtggatactcatttctacaagaggtatgggagggacctttcaagcaccgtaaaagatctcgttaattcctatgtttcaacattaggtaacataaacagaaagtaacgggtaactttagccgtgatagccattccaatgtttcaacaactaatccaatataagtaacttgttctgtttaccggttgtctaaaattggactattgtgagagagcacgcatcatctttccgtggaagacaattacttggttgtagtataaatttaataaaaagataagttctctaaacatcatgagcccatctctgtctactgaaccattcagggcatcaaccatgcagctaatactactacggaaatgatttttctgtacaagaacccctataggttgtagatgaaccataactggttgtgtttgcaaaaatgaacccctattttcgcacacgtctacttatgatgcccttatgcaaaaaatcagcttataaatagccttattgttgcttgttatctagtcagatcatgagttatcaaagtgagagagcttctagacgcctagttgattgccgtgcactctctctctatttttgtaacctataatattgaagttggcatgtgtgatccgctactctgctctcaatactaacagttgtctcgatactctttatttaagcccatttcctagtgttattttgctaacaggaaatatgaaatttcgtgtatataactaggctattgtgtatgcattgtcaatttgtttgtgcaactctttcttgttagctagtacattgtatatagaggcttaggaggtatcgggatcacaagtttcagaccaaatggaaggcattgggtttgaattcttataaacagagaatgaggattcacttatatgtcttccaaagtttgctactctactagagaagaccgcctcacagtatgtttcattgtaataaccctttaagatattgcacgcttgtaggattctacaatggaatttgaagttcctaagtgcagaaaatcaagaaacattacctattagcaaaatggactagagatttgcatgctagacttagagcagatacaatagcagactattagccaactataaacatattttaataagataaaagatgagagagaagagaagcgggctacaaatctgtagccagctgcagcacggactataagacgcaatatgtgtatgacgggtgggaccatat

SEQ ID NO: 10227 - DNA, 7691 bp, Oryza sativa
tcacagtatgtttcatggtaagaaccctttaagatattgcacgcttgtaggattctacaatggaatttgaagttcctaagtgcagaaaatcaagaaacattacctattagcaaaatggactagagatttgcatgctagacttagagcagatacaatagcagactattagccaactataaacatattttaataagataaaagatgagagagaagagaagcgggctacaaatctgtagccagctgcagcacggactataagacgcaatatgtgtatgacgggtgggaccatatattaattgtatagtaagcaactactgtattaattggctattagattggctatagatgaattggagctattagtgggctatactattaaacttgctcttaggtgtaacatggaggatccctataggttgtgtgcactgtatgcatgactctcttggttgctacactacaatgtttgacggccacatctgtcctttttggaagctgtgtcactttctcttttcttggaccatcaaatttttttaaatttacggggtatataatagggttcgtaggcattaggaatgcagggtcgagcttgcaagtgaacacgatatcaatcattccacatatatatagtaaaagtagtaaggcccaccatgattatctgctaggttgtgcatcgagagaatggaaggtgaaattggtgaggaaaaataatcgaggagggagacgagtaaaaataaaaagtgagagagagcatatattcctaaagcctgggaacaagagcattatccacaaaagagatatgtattgagtattgtctactgatgagatggctatggggttaaacataccagggttcaatttgtgaaactcaatagatggatgacatagttagagccgtacataattccaatcgattttgctatatatttatcgaaaaatttttctctaaaaatttgacagatgtaattacagtacaatcgtagtgtaattacactgtaacttatatgtaattacactgtaactatagtgtaacttgcatgtagctttcaaaaatctctccgtaacatgttatttcggtaaaatggaggtcgtgggaacaaattctttcacatatgtgtgtgctatgatttgttttcttcctcaccaaaacaaatcgtgtaatagatttaacgattcaaaattatgtgaaacttacatataagttacactgtagttatatgcaagttacagtgtaattacatataagttacagtgtaattatactacgattgtactataattacatctatcaaatttttggagaaaaatttgtcgacaaatgtataggtagtcccaattccaataatcgaagtgatgcactagcatttacataaacacatgggcacacaggagaaatatcgcttgtgcatccacgtttatcgctagcatccatgttttatccttacgtatatgtttatgccggcctcttccatgtattcttaaacttagttatgtccctaatgtcaatggcaatagtcatagaaaccatttactgcacttcctttgtttctacctacatatacaaagtcatcgtgactttgcttatcttcacacatattgcttacatatagtcatctatttgttttttgtaagttatatggatgttccatccacgtggcacggttgattcctaggtgcataaagcctagcaagtaggtttaggaggcaatggtaacttagaaatctctttgtgaagggaatgaagtactgcgatactttatggtttagcgtgacacgactccgatgagaacgctagggcaagcaacgatggtaaaatatgtaggagaaaggtgcaaatgtgcaattggcactgatgtgttgtaaagagatcatggcaattctaacatggctatgaattttttttttgacctacgaatgggccgggcaattctaatgtgtaattttttttttgaacttgtgaatagggattgcaatttcagaaatttcaaaccctcccggcaagtgattatctcagctgaattttttgttttttctcaattttttgaccaaatatttagtcaaattcagttaaattatgttaacatttaaagaaaaggtccaaaaagtcccaaaaataccgaaatttcagccaaaatcgaaattaaaaaccctgctcgtgactagtataaataggtgaccaccaaactgtgtaaaaaaaccgcatgatgcataactgaacagtgtttgtgaatgccactagctaccactatgatattagatggtgacagccaaggaaataaactgcaaccgcgcacaacacttcatgaaataagttattattattgtttaaagaaactgcaatttgggcatcactttcaattcgatactcgatgtatatgatagtttggataatgatccgtattgtccagtccattaaggccctgtttagatccaaagttttgttttcaaactttcaactttccatcacatcaaacctttcatacacacgtaacttttctatcacatcatataatttcaaccaaatttttaaatttcagtgtgaactaaacacagcataagtactagtgtagtgctacttcatggcctgaacccgcaggttttatgacttttaggtaggattggatgtgaaaaagcattgaaccggtagtgttgccctatcactgttaaagtgttaattcacactgaaccagcagtggtagcccgttccgtggtagtatcacaagtctattatataggttacatgaaatatctatttgtggcatgcatttttttttatttttgctcgatgtatgtctcccttgtaatcgaataaatgggttgtgacaccatatgtatccagctttgaggactatatatataatataagtcgcttgtttgccagtaccatttctggtccagaggactcctccgaatgaaacatatattctcctgttgctcactcaaatgtgaatttacacctcgtcatgtatatgaccttttgggtgtgcatcatgcagtaggtttaggaggcatccggatgtacatcagtaacttaaatggctgaaaaatgcagtagtgaagaacaaatcgcgacggcagcagcgatttgggtgatggcggctagggcttgtagcagctgctgggctatcgatctcttccccttttcttttttttttgttttttttcagttggtttaatagatatcctgatgaagatcgaatggcccatattaattcgatcaccgattactataaacttattgtctattttgcactactcggcgagctctacgcatccgcggttcctgatcgcctattcaaacaacggtttaaaaatttaacttttgtgcgtttgttctaatattccacgaaatatttcctgatcgcctattcaaacaacggtttaaaaattgaacttttgtgcgtttattctaatattccacgaaacatattaattggaaactcggggcattacattcttccccctttaattaaattcgccctcgaattcgtccaaccattctctagaacacagggtattacacgatgatctacaggctttccccaagctaggcgtaatctgaagaagtttgcagccttgtcccagtgtgctaacccattcaaacctctcagtcttaggctccatagttccataaacttcaatacatatatacactgcagtaaaaccttgaaatcagattctccctgcgtcccaaattagaaggcctatattttttctatacggtcttcaataacatacttgatcattaatttatttcatattatgtttcggacaaatataaaattagcatcacattaaagtactctaaaatataaatcttgcggtataacatgcataatactttgtgtctgtgtgtaaattgaagatgtttttgccgagattttggtacattatccgtgtttgaatcagattttaagttcgtttacttttagaaatacaaaagaagtcgtataagaaatctctttaaaaaaactcacttactaatttcagatgaaagtcagactcctaattatagctcatgattttctcaaagaaaaatatatccaagcgaattctcacagtcaagttcaccctagctaaatgtcacgccccgaactagtcccgactggaactaaaccgtgacgctccaaattaacctgttaatcgataccagtcctagaaaacagtgctggtatcacaggaagatagaatatcacagcaacagaggtctctttattatagagtaggagtacagtcatgttgggctgcggacagatcccgagctcacaactgcattacaaaagggaaacggaagccaggactcaggctaaacaacacaggcgcgacttgggaactaggccgaaaccctaaaactcatcgtagccggcttgctcctggaagaactcctcatcagcaggatccgcttcatcttcttcagcatctgggggggattatttatatagagcaagggtgagtactggagtactcagcaagccaggggaaataagtgtttaatgcaggcttcaaggagaggctggtgtttttgcaattgattttatttgaactcttttctgaaacaactaagtgagtgcttctcaaacgacacggatgagacagtgtgtctcgtccggtcggagtatgtgcaatgtattagtctttagattttgaaacaaggttggcacccggccaacagcttttcaaacggccacccgggccaacaacttccaaacggccacccgggcctagctgatcccatcagctgcagattttccaaacatcgaacccctttccacaacagcaatttcacaagcagtagtcaaacaaaactacgctaggaatcacctcacatccgcccatgaccgtgggcacggctgttcgaacagtttgttaacctctgcagagggggtacactttacccacacgacattactaacccggatcacccagcccgtggggatcagccacgtcgggagacctccaagctttcatgacaaggcatttctaaagccgacacaggtttaccatatgccgacgagaggggtcccagaccaacaacaggttaggtcccagaccatactgtgccaggaagcccaggggtcctccccgacaccaccccggcgaatccacatgtctctcggcatcaaggctcccctgataagctagttactcagccaggggtgtcccattccacccatgtggtcgtacttgtcttatgtttggatgaaattccaaggaaacggtccttaagtgcaagagcggaaaaccgtacacccggtacgttccccggtccgcggttttggaaattcatttagttcgcaagcaccgacccaggtgtcgggttttccaagtcttttgtaaaacccaagttttacccaagttgtttttcagattttaagtttgaaggcgtccgctgatactcgcactaggtgcgcgaatatcgagacgcaactagatggttgcaaagggacatggtatcacaattaacaaagaaaggatcaaatgcaacaaattaggtaggtctaccaatctgccttgcagacgggacaacagattaagtgcgatcctatcaatgcataatatttttcaagcaacataattaaatttcaaatataggctcaagatgttcaaaggtggcttgccttgctcgagatctggagctcgatcctcgaaatcctcgcactgcgggtcttcgggctccgaaactacacgtgaaacgggacaactcaacaaacggcgaaaataaagccctattaatgacctcgaagcgtgccattagatagatctcaagatttgaggaattttggaagttgaacggagtcaaacggacttacggttgggaagatattgaatttctaagattattggatttttggtctaaaggaaaaggatttaattaaatcctttttggaaaataaaagaaaagaaaagaaaagagggagggaatatagacttttctcgggcggctagggcgcggcacgagagaaagggcggctcggccgggcttaacgggccggccggcccaagaaggcggcccagagcggcccaagacgcgcgcgcgtgggagggaggagagagagagagccggtggaccgggcttaccacgcgcggtcccgggtggcacccgcttgtcagcggctcggctcaccgtgcggagggagcacgcggcgcggcgctagggtggggggaggatgcggtgcacgcgcgtggttcgcggtggacgcagatgcggcgggcccacgcgcagcctcacggctcgcggtggaacgcgcgcacggggaggggctgaccggggtcggctcgacccggtcttggctgagctggtgccgacgtggcgcctacgtggctgccacgcgggccggcgggaggtagacgacgacgccggccggaacggacggtggacgacggcggcgagcggcggagcgaaccacggcgatacaggcaaaagcgagcacaccgggtggttgcacgtgacgaggggagacgagccaacggctcggattcgccggaggaagcttgacggcggcgaatcgcggcggcggcaaccggcggcgggagaaggggaaaacggcgacgaggtcacgaggggccaattcccggcggcgagagcatctacgcggctacgggaatccgatgctagcgtcggattgggcggaactacgccgagcgaggccggggacgagcgggtgctacggagctcgagcggcgacggcggcgagcacacggcgagtgacgacaacggtcggggcggcgccggctagctacggggaggctactcgtgctactaccgaaaactaagggggagagatggagcgaggaggaagaacggagggaggcactaccgagatgaggaggggcgctgggacgagaggccgacggcgcgggagtaatctctccagcctcgggccgaggaagaggaagaagagggcgcgcccggagtccccttccgcgtcctagtgtgcaccgaatcctccggcacacatgcgacgacgaacggcgacggcgaacaggggcgacagtggcggcaagagacgaaaacgagggagattggagggggaggggcttgggtttaaatgggcggcaatgtcgggttgggagaggggaaccggcattggacagtcaagccggcgagctggcgctccggctagcggccaaaacggcgacaggaggtgacgccggcgagagggaaaaagggaaaaagagggagagaaaaggggagctcgccccttgcctctttgggaaaaaggaggaggggagcgggagcgtcgcggcagagggaggagggctctgcctccgtcccttggcggcttgcgcgcggggaggcggggccgacggcggcgatgacggcggggcggtttggagcggcgcgacgacacgagcgacaggcgctgacgacggcgacgaccaggcggtcggccaccacggcacgcgcgcgcgggaaacaacgggcggcgcggcggatttgagcggcgtggcttgggcacgcacgctggcatgcggggccgggcggctgcgcggctgcaggcgcggcagggcagcggggccgggcggcgcggacggcgcagacggcgcggctctcgcgcacgcgcgcgtggcgcgcgggcggagctgagggggaggcgctgggcgcagctctcgcgcacgcgcgcgcggcgcgcgggcggagcggagggggagggggagagagagagagagagcgccggggagggagggggaga

SEQ ID NO: 10228 - DNA, 22068 bp, Oryza sativa
ctatagggcgaattcgagctcggtacccatttggttgggacatcatcctgaagcacagcaatctgttcttttagctctgcataacagtggagtggggggacattcaggcattactgctacatatcaccgaattaagggtttgtttgcctggcctgggttgaggaaggcggttcagacctatgtgtcccaatgtgaaatttgccagcaagctaaggttgagcattgcaagactcctggattgctccaacccttaccagtacctctgcaagcttggcacacggttacaatggattttgtggaaggattacctaaatctggagggtatgacacaattatgttagtggtggacaagttttccaaatttgctaagttcatacctttaactcatcctttcactgcatacacagtagccttggctttcattcaacatgtttatgatgtgtttggcatgccccaagtgattatctctgacagggataggatattcactagcgctttatggcaagaattgtttcggttggctgatgtgaagttaaacatgagctcttcttatcatccccaaaccaatggtcaaacggagcgactcaaccaatgtttggaagcatttcttcggtgtactgttcatgctataccaagcaaatggtctggatggctatcacaagctcagcattggtacaacactttgtttcacagtgtgttgggcaaatccccttatgaagtactatttgcaaggaagccaactcattttggcttagtggacactggtagtatcactgtgcctgatgttcagatttggttacaagagcgtgcacagatgaatgaggtgttgcatcagcagctcactcgagctcagcaaaggatgaaacaccaggttgacaagaggagatcagaacgtcaatttgcagtgggagactctgtctatctcaagttacagccatttgctcaaatgtctgtggcacggtgttcatgtcagaagttaagtttccgctattttggtccttttactattctggaacaaattgggaaagtggcatatcgtttggttttacctgcttctagtcatattcatcctgtagttcatgtgtcactcttgaaagtggctgtcaaacctgatgttgaggtcagtccagaattacctcttcaagaagctgaagttgcagttggtgtcctacctgagttgattcttcggcgcaatttgatcaaaagaggtaagacagttgttccatatgtgctgatcaagtggactggaatgccaactgaattggctacctgggagaatttgtgccaattgaaatctcggtttcctcatgcaccagcttggggtcaagctggtccttaagggagggggaattgttagcatttgggggtactctgttatgtactctgtttttgtaccctgtttctcacgtgactggttcagctcatgtgagcacgacattatcttgtaatgacctgggtgcatgtgtggatcccgtgtcgagctagcggtggttcaactgtacacaggtcgacacatttaaatactctgggtgccattcaggccagggttatgcaatgagaaatcaaacaaaacaactacctccctgtctctgttcttcttcttcctcctaattacccccaaatcctctcgattctaccccaatctgatcacccctaaagctggcaccacgccagattgaggagtgttcgtgacataggtccatttcatcccagcatattcagatatctgacggagcgtaaaccataatatatacttacgatcacaataagcaagtaatttaaatttatagagatcacaccatatgtaggaatacaaaaatcaaggtagcattggtaaatacttgcaagtagccaagctgtccagcatgaagctatgaagaacaggattttaaatttcagagagccaaagcgttttagggggctaccaaaatgtcgataattctggaccaagattattaagaaccctgcaagagaagtgttaataatgagcaatgaagcatgaaacttggccactctaagttgcatcatatatatacagttaacgtttcaaaatacatgatcagcattcttattctcaagcttgtaaatagaggtgatttaggaccgaccatttttcagattccagattcatttcatttattctgtgttagacgtcaatctacttactgcagattgatcacaatttggagtaaaatgtattgccacattctgcactgaccactgagagctgtaaggattcatataatctttgctccatttttatatctttgttataaggataattgcaaaatttgttcttgcactcgtcatgtgatgctgatgtgcagcagcactggagcttccacatgctaagtgaatgcggtcggctacagataggcatcaattatatatctgaagttctgaactgaaggccctagaatcaccatatatggaatgatcatcaattgaagattgcagtgttgctccagcgattttgctgtaggattgtaaaggactattctcaccccaaaagctagccaatgagatgaggggttccctcacttatatattaggtcattttgctcttcacaaccaatgtgagactattcaacatttgtttcccgaatttggatcattgtagttaggactgagaatcatcaggaaatgagccctcccagagatataccagttgcagttgggttgccgcctatatcctggagatgctataccatgtcatccgtttatgacggatggagataatacaaagatttatgtaccctcggacttcaggtctcaaggtggcattcttcctcatcgtagcgtaagccaacggtcatagtgccttgcttcatctcaccaattagattgaggtcatgattagcgtgccaagaacaccaaattatgggatcttgtattctccaagactgctatattatcagctacttgctgatggagtggcggatgcacatcgtcattcattcatggatgttcatgcatgtcaataccaaaaaatattttccatgttgtgcaacaagctaagattatattgttggttagtaaatggatcactcaatctacacgtcatgggttcaatattgccatttgcctcctttgtctcaattgaatttctctctttctttttttttcctcaatgttgcttccaatgttagcatttgattttctggacaagtcttgagcatccatctaatttttttttctgtacaagtcttgagtatccataattttttttctgtacaagtcttgaatgcccatcttgaaaaccctgcctactgcttgatggaaatggtaagcttgttaattgccaggccatgaaaagtaggggaaaaaaatctattttacatcttcggactctcaccaaattaagtgtagaaaacccagtctggtgtttaccgactttacaaaccgtttaattggacataaaatagaccctttcactaaagttatgctcaagaccttaataaagtgctatggctttcaattaaaaaccgggtctctgacctttcatctaaaaaaaacctcaaatgctaccagtcagattcaaacaaaacaaatactagctagtggaaattaagtgattgcacacaaggtatatattaacatacacaattaagtagggcaaagagtccttgcaagcatattttatttctagctgacttctagctgtctaacatttgtggacatgcatcagcttgtgaaccacaaaattagcaactcaagttcactaaagctacacaatagagcagtgcggattgcatgtgccatttcttagccaataattagtagataatcgcagaaacaggttattgactgcatggtttaacaggctcaaaatattcaaatattcaagagatagagcacaagtcaatgtgattattttcaaaatatttttaaaattttgtagaagtatacatgttttaaaaaaaatacaaaagatataccgtgccacatggccaacaggcgacaccaaccatgtcatccatccattgggtgacacagtgggtgtcaccaagtgcccaagctaaccgaagagacatggcggatggtggaaagcaagcagcgctctcagcaactggctagcaacaccagcattattttcctatgtatgggcgaaaagtgcggtgtcgcggcaacacgggaatattttattttttaaaaaaaaatcacaaaatcatgaaagaaaacgtgtacttttttattaaaaaaccaatcgatagttggaaaatgccattatacggcattgatttgaatcacttatatattctcaggctggcaggattgctacatcctgattgggccacttggcactattgaaatttgagataaatcagggaattagggatagtaaaaaaaaactaatcacaatctgcacatccactattaataacaagatagtaacaacatctagattcctgattctagatgcttccgattcaactaccctcaaaaggaataaattcctcgtagttatagctcatgcttgtctttttaatataactagaaaaatgcccgtgtgttacaacgggtgaagtatattttaatcttattgttgttatattgtttagttaagagttcgcttggatatatatatttttagaaaatcatgagctacagttaggagtccgatcgtatcaagttagcatgcgagttttttttaaacggatttcttatatgatttcttctgtattaccaaaagtgaacgatcttaaaaaccgactcaaatacggatatgtattttcaaaagcaaacgaacttaaaaacccgactcatacacagatgacgtaccaaaatatcggtaaaaatatctttaatttttataataatagagatttaagtgtaggcaatttataggaaagagaaacaattttatctgaggaggattagaaacattaatcggcaagtaccaggaaatcctttccttagtagcaccaaccaatagtagtgtggcatgtatcgatgccaatccgtgcacctatgtgaatacgtgaccaagtcacagccgtccaatcgattaaatgcaacagcaatcaatcggagtattcaactcgataccgacttgcgttgacgacgtacgaaattttgctgggaaaaacatctttcatttttataataggtaaagataggctatgttgctaaaatattttcttgaatatactaaaatgatttgctctttcaaatatgtgaagcacggcgattagtagcatatgaaaaagctagccggctattttatttatatatatatgaccatgaatttctgcacagtttgctttatttatagaaaatagaaaatgataattaatttgagtgaattgcacttagtacctggttttattaccacggtttcacatcggaccaggcattaacaaatgtttttagattggaactagatttttttactcaaagtttgcacatttggacaggtggccccacaagtcattcaccagatcgagtcttcttcctcctcaatctggctgtcccctctcctcacacgaccttgcaggatctgctagtgcagctcgtggacgacgtggggtatgccacgcgcacctcacacaagtctcccgtcgttgctgcagtggtctaccgcgtcgaggtccaactactgatcacaacgctgtttatcacctgtacgtccttccccccccccccccaacaacctcacacccattggccggacgacccatatgcatgttggcccaaaaccggaagatgttagcccaatcaggagaaagccatgctacatctcaaaagctagctcaagtgataaggggcttcccccacttttaagttggttcaactccccctagattagcaatgtgggactattcccaacaatgcatatgggagctacctagcttaagtaccagtaggcagtagtgccaccgcctcggctagatctaggagcacaatgtcacatagaagaacacacttcccatcgtcttcaacatcggtcatgcaggcaaggtagaggttaagctcgagcgcaggcattaatcatgagcattagatagggacacggtatatatataggagtcgagatggaggtgatggtggctgcctcctccagcgatgcgccccctgcccaagctccggccttgttggtccttcactggagctcaccttcgattggtacctgctgccccttgctcagagctgcattaattcatgcaagccctgcttgagctatagattacgagctccccgccagcaccagagcagggggcggtagaccggtggtgatggggtgatagcttgatctgaagagggaagaggacttgatctggtcagtggcttgtgaccacttgtgcaatgtgcgaagtttggtaccaaaatctagcccaatctgaaaacattcgatggtaccgaaactggggtaataaaatatgatcctaactgcaatacactcttaattaaattaaatgtatcgcgataagaaggataaatatagaatgaaaatttgtaatcctaagactcaatagattgttaatggtttatatatacatagattttttaaatttgtgaaagccatattccataaaatacttttcttttttttttaaaaaaaaaggaaagcttggtgaatgtatttcttgacacaagccaacaagaaataagtttttaatgaaattttaagggaattacaatattttttataaagtatttgtagagtaatttgtcggtgagggccaaaattaccgaaattttgaaccaaaatttcaaacactgattgtcactaccatgcacttactatatatgtaataccccgtatattaaaagatacttagatttttttagtttggattgacttgtttaaaataaagatgttaacagaaataaataaaagaaaatatctttagaagtgggccaacatgagaagactcatagacccagcccattagttctcccctaaaacgagagaggggaaccgaatcccacctcccctcatagtgccgccacccatctccctggccggcgcctccttcctcccctcctcctgtgttcgcatctctcccatctacagcaaattgctctccctagatctccaccttcatagcttggatcaagaagcaaagtagaaaaacggaacgaggaggaggagaggagtaaaagggggggttagatcggagtctcccctattgtcttctcacaagttctctaacgaaaccctaggtgaggcttatccccttgttgtatcagttgttctagcatggctttagtgctttaattcgtggttagagaaggctagagaaggagtttgggtagttgcggtttggtttgttgcagttctacatgtgggcagatttgcagtgcttcagtgtttcaatgtttcggggctctaattgttattttctgtgaaagtatacaactaagaagttgtagataatgtttggatgtatcttctgaccaaagggcgtgattttatctcaagtggtttaggagatataatttttttagtacgactgttgtttttgtgtcataatctggatagtagtagattgaactgtttttggacgggttaaacagtggaatcagctaggccacctatagacaaagttgtagaggtttttcttagctttccatattggtaaagtacaccctgattgggcgagtagaactccagttatggttgttttagtgtggacagtctgaaattctggacagattctgaagcctgcattcaagtgcaaattagaccatttaaatggcagaacaaaaatatgatttccacataagagttgtaggccttgttctgtagatttccaaaatgtatttatttgcggttatagccttttcatatttcaagatataaaggtttgaagcagcagtcttgtttatagtccaagcagcgttccttgttattgcgttgtgatgggatggggaagtagattcacctttttcattgttttatatgcatgtttgaatatgttttctgaggtttttttttattaggtggtggtccttcatatcgtgcatgataccaaccctttattagaggcaagtgcatgacaaactaattgtgtgattcatggattgtttgctctatctatttatttccgatatatttctatgtgacatgtgaccgcttatattcatattgttgttcgcgccatttaggttttcatgtctatcctatgtttacgacattattcttgtttcaatattccggattctggttctgcttaaataattcaaattctctgcttgccatggatgtgcagtatggtttcaatttggttctttgattccagtttcaattattcaagtaccatgcgtagtcatgggagtccaatttggttctttattcaagttcctatgggtaagcgttgatcacacttactcggctttaccggcaaatgctaggatgtattcactattgtctgggatggaaactactatttcaattcatgcctgtccgggatgggaactactatcttctttgacttggtgtttgaaaatgcgtttcctatcaacgaaagaaaggtttctgttcatgctttattgccaatgttgtgtatatgtgttttctagttccatattgtacttgctgagtatttttatactctctcttgtgtttcatttagttttaggtacatattgagaccgacatgcataggcgggaagtagcacccttatatacacatctacttgcacactattaaactatattgcttaggtccataatgacacttaaattatatcttggtttggtcttctaataatcttttagatttctaatagtttcttccccatggattataaggatggatcgtattatgagaatgatattgttattagtttagcttacaattgcctatcgtgaatgtccgtatttacaggagagactctgccgaaatttctaataattttggaagttagtggtttgagtgtttttttagtgtggcactctaggtacgtggctacatggggcgttacaatatatactaagagttgtaggttgtaaggattgatatatatagtattacatattatttacatctatattatgtcagctagttgcaaatttgtttttgaactcattatgtgatgctgttgtatgcaattctaatcaaagcttgcacatgcatatgctcactgaatgtcttcgactatagataggcatcaactatctgaactgaaggccctatcgatctgatcatctgaacaggatctaccgcaaatatcagttacttgtaggttcacctcacatacgaaatatatgatcaaaatataagggtagataatttacgaactttcgattcaagatgcttattcgtgttggtgcttgcccagtattaggactaaaagaaaatgagtcaaataggcttgggaggaatctgaggaactcaaagtcactagtggccactgtttggggtaattaaggactgtttggttcatgtcctaaattggccttaccagtatttaggccacataaatagtacaactggtaattttggtttgaatccaaactttggccagcccagcataatacaaggatgtggacatgtggtactggcaataaatggacccgacaaaattgggatggttaattttggcccttacctaaacacaatttcccaaatatcgacatgccaaaacatacctttgaccaaaattaaaattggtaaggctttgttttggcttcaaaccaaatcagctctaagtgatgagccactcggatggtctgtctagttttgcagtggtaccaaatctattgaaaatgagtttttatatattccggaatagtcattcgaaacaaaaataactctatcgtaatctaattgagccccatgaatgcaatcactcctcttacatgttcactctctgaacttctgaagcataaggtagtacattggtatcaagaatgcgctagtacttctcaaagagagaggtcatgaaatcaatataaaattggtgacacctacagcagaaatgtccactagtttgttctaataacaaccaaattaccaaattgtctagttgtgtagtccagtttgaagctttgaactctgtcataatatgtcattcgttgctgatcagtgaagaattaaactcagccggtttatgttgctttggattggtatgcactgggaaaatataatgatcaatatcaagcatggaagtgatgatgtcgtagggacttatatatagagactagcaaaatgcccgtgcttcgctacgacgtattaaaactacagtgctttggtacttttgtgtttttgttcttttaaaatatatgacgttgtccaatcggatagctgcataaaacaaatattttgccaaaaaaatacctaaactggatatattaatttgtctatataaataatacaacttaatataaagtatgtgcagcccaataccaaggtggcctaggaacagcgcccgacccgatgcgggagaagccggggccgtccgatctgatggacggtcctgattgatcccgacctagataaatattctgcagctcaaaccctaaccctaaaatcatttcccccgatccccttgctctttctcttgatctcaaaaagcgacggtggcgaccttccccccccccttccttcccccgtgagcattgccggcggcgccctccctcaccgcgagcgactacagctgcgccatcccccatcacgagcggcggcgccctccgcggcttcccatggccggatccgacagcgacaacgacttcccgtgggcgtcgacgggaagtatatattctctgataattcaatcagcaaagtaaacgatgataaagcttctaatccatctaatctccacattttttataataggcagcatttgccattaattagtgaagctaatttggaataactattacttggacaaattttcacatgctaccactttgagagatcattttggtggagagatattatgcagttcacagatatcttttaatttctggaatggcaaagttagatcagtgattttttcaagagttttttcttgcgcactcaacttaaaagatcagttacagtgttattgggcgggtactaaatcattttgccgcatcgactcatgtcaagactcaacaagacacagatcggacactgtgtcgagtcaatactgaacttggtgagagaagagagggatgaggaatagaaaatgcttgtagtttcacccctcgaccctcaaaatgaaagaaagtggcaatctgcagcttttgctttctttatgataccttctccactctcctgtctcctctagatttctttattgtcctttttatttattcttctctattcgagtggataaaggacacatgcaatagttatcatgtacaactgcaaacaagaagataagatcttttgtacaaaaaaatgtgtgacacattgttttagtgttttacttactaagagtatgttttatttgatgatatatatagtatttttactaaacttatatatatggggcgagtccctgaatcctatattttatagcataccaagttagacactcaagtcggactccaacatatcctggtaacacttcagttaatgtgattgaggttgtgtttagattcagaagtgtaaagttttggcgtgtcacgtttgatatacggacacacatttaaagtattaaacatagactaagaacaaaactaattatagaatccgcctgtaaactgcgagataaatttattaagcttaattaatccgtcattagtaaatgtttactgtagtaccacattgtcagatcatggagcaattaggcttaaaagatttgtctcgtaatttacgcgtaatctgtgtaattagtttttttatatttaatacttcatgcttgggtctaaacattcgatgtaatatatggtgaaaaattttgcaaggggatgcgtgagatcaatcaatacaagcatacggtactcccattgtgtcagagttttcaaattcaaatcatgttgtgtgtttctatctgtttataaatctgccccttctgaagccagatacccaaatggaagtcacagatacacagagaagggccattacatgtaataccggccggcaattaatgatcctcatgttcctgcaacagggaactctcttcacttaagaaaagtatctgatatttccagcaaaaggaagatagaagtgttgctctagccattttgctacccaaattgggtcatatcgttaggactgaaaatcatcaggaaatgcatccctccctctcggattgggatcaggtgcagtcgctatagcgaccgtaactttggcagtccctcgatccatgtcgtccgaaatccatcagaggattagaaatgccgtagacctctcaaccgtgtgatccatcagctacatggcctggtcgccggaggttcttgcattaaccggtgaggtaatgacggtctcggtgtcccggcaagacggtggtggatgccatgatgcacttcgatgatcctgtgaacaacgtctgcaatcaggggcggatctagaatgggggcggcggggtctcgagccctcactactggcgtgaagactatgagagccccacgaagaccccactaatttttttttatcatatatagatgggagaggggactgtacctctatctagtttgctcagattccactgctattttttctggatccgccactgtctgcaatatctgcatctgtgcttcactgaggtcagccaagcctgcacatttggagagttggacttggacattacaacagcagcgtttgtttcccatccacctatttgcgcattgaagtagacagcagtaacgattctgccgacttgggctttccaagtgctcttggataatgtggcaaccgagcgctcggaccacgaaggcaggatgagaatgccttgaccaatgaggagcacaagtaaacctcaattaaccttaatcttgatggaattgaacaatatgacgggatctgtccgttcatccgaattgaatagttgggttttcttgtccaaattgttactgctggaagtgatgaaagtacacagaagaagaaagagagatggaagaagcagatgaacatacgagataacgagaagcagcaaatgaacagagaaaagacttcacttaagtcttagccgtttgattcattttgagcgttatggattgatcaactgtcaaacttgcagtctctatcacaactgcacatgatcccaattgtgtcagggtcttcaaattcacatcgtgtcgtgtttctgtctgtttataaatctgccctttctggagaagtgggtgtcacagatacacagagaagggccattatatataccggccggcaatgatcctcatgttcctgcaacagggaactctcttcacttaagaaaaagtatctgatatttccagcaaaaggaagatagaagtgttgccgctgccattttgctacccaaattaattgggtcataccagttaggactgagaatcatcaggaaatgcatccctcttagatatatcatctgcatgcagatgcagtaggattttcgcgtataacctaagaaaaatatgtactttgttgtatgcttaggatggatcaaggataatagcaagaatgttttgttggactcgatctgacatagatgatccaagcaattgcattctaccctgctggaacttctagttttaccttctgatgatcatagtttgtttatcaactgccacagtgccttggctaatcccaattggcacaaggccatgactagtagcatggcaacttatatcacctggtatcttgtattcttttagacagcaatcacacctaatgattcctttggaaggtaattagcttgtagttgggccattaaaattaaggagaagtccatttcaagttgtcattaacttctaaaccgaaaaatattcatcattcaacattgcaagcagttcaccttttactcctcaaccaaaaccagaccagttataaccttttgtggtgcttacttgacatcccgatcagaaaaaaaaaacaaaaaaaaaaagaagtcccctatctctcccaatccttgtcgtgactcgcacccaacgcataggcactagacgctctgctgaggggtctgggcagtgtcactgtgatgctttgcagtggcagggtgaaaaaaaatacaacaatcgctctctactgttcgtattatacatgtattattagggaaaattaaagatgtactgtattatactacctgtattattaggggaaattaatgatgtactaataaccattgctctccactctctactgttagtattatactacccctattattaggggtaaattagtaatttactaatacggagttacttgttatttatgttttttcccggatagatcaatatatgatcatccattgcgctggcgtcgctcatatttcattgaaaaagctagaaaaggagaaaaaaaaagtttagtcattgctaaatgatgattataaccctccacacctctttttttacaataatatctctccacgtttctactaccactaattggtggtaatataaataaatctaaacccttcgatcaaatgagatcaaaggttcagattgatttctactaccgtagtgaggttataaacggcgatgcatggagtatcatgcattcatgcgcgtgtaaatcagtctgattttttaattgaggggtattaagtgaatggtttggataattgagggatgaataatgtcgagttttataagattatagggcacatttcggagtttcgataaagtttaggaacgtaaaatagacctctttctgtgtccttaaaattattcacaagtgctagcagccaatttcaaactaatagctgattctaagatactacacacaaatactcaagtactttttttttgaaaggtaccagcacaagaatgtgcttattcattgaatatagcaggagaaaaatacaacccctaggggtaaagaaaaagcagaaaacaagaaaagctgtacactatacaaactgcgggatgatctctgcaagacgcttggcgcatgccaaggcccacatgccagcctcttcttttatccttgaaaggagatacgaggttgcggcttccttatgatcaaatatcctcatatttcgcttcttccagacttcccatacgatgagaatcgagcatatctttatttttaggtgccttttattcttctaacttttgtggacatatgttagcatgtgaaccacaaaattagcaactcaagttcactgaacctacactaaaggggttgcaggtgccgaatttcttagccagtcaacaaataatcacattcatgaagtgttcaagagaggggaacacaagtcagtatttggaaaatgccaatatatataaggcattgatttgaattatgcaaattacttactcgcaaaagaaatcctgcaaattactcgttacttcccaaatcattaagccccgattgatcagggttcttattatcgagggcaacccgcttcagattgcagaattgatttgtgtattctgcctatataatgtgttttcactgccacgtactacactgagagagttgtaccttgtgaggattgatataatcttgtatatatttttttatatctatattatggttagttacaagtttgttcttgaattcgttgtacgatgctgatacccattgaataccctcgatctaaggcatcaaactatcaaaagtgaggattgagatcaaatgcagtcactgctaggactacaagttagtaactgcacagtatcatttttcagatcaagggtgcagatcaactactacagtattatcgctacagtagccgcaagatattttttccctgtgtgaacagtgcttcgaggatctcagcccttagatacaacttggatggtactgcacctgaaccaaatcccaaaagtgaagactataccctagctagcatcaacataaatatcggttacttaattgtatgttcacctcacatatgaaatattcagatataattgaaatgtatacgagctagcttctcttttcaattcagtaatgcctattcttgttgaattggcacttgtccactatgactcgaagataaagaatcaaatcaaataggcttgggaggagtctaggaagtcaatgtctccggtggccatgtttagggtaactgtccagagagcggtggtgtatggtctgtctagttttgcagtgggtgcttacaagcattgaaggggttcctacgtacttgcgacgatagctacccatactctctatttacagttgatacatctggagcttgtggtaccaaatctgttgaaaatgagcttagtatatgcatggtctgtcaaccaaaaggcatctaccataatatatttgaagattagaacacatctagcttacattttcactctcagaagcatatggtaatttctgacagagaggccagagtacatttgtagcaactattaattcagtgtagcatttagtagatatgtccactagtttgttctaacatccaaataggctagctgagcctatagtttgaagctttgaaattgtatcttagtgcatcattcattgttgatcaggtgaagaattaaactcactcagtctatgttgcttgcgctatccaaaatttctgactgaggatttccatgtatctgtataatggaatgaagcacacctagttctgaagtcttgaattatcaagtcatgacatatgtttatttgaaattttcttccttcatgggatcttcatgtgtccatggattgaatttctatgttactggactggccttttgtcttggaaggggttgaattttccatattagggagttgagtttttttttatggttcttgtttgagaaagtgatgtgaattattgcaccttttactgtaaatttatggtagtgtcatttcttaactcggccatggacataaatatatcaagggcatttacaaactagtacaagttccaactactacaagagtccaatactgaatgccagtacactatcatgacataaaaaaaacacatgataaaaccagaggatgtggcagcatggccactcctgcttgtttctaaacaatttggtgcaactgtgtcccagtgccagtgaagcaaactgcaagtatgcaaatatacaagagaagcattcagattatcggctatatataaatcatttggacacttgaaaactgcaacaaggaaaggttgtgtatacctccaggtatcgaggacgccgcgagaacatgttcttccattatctacaaaatctctggacaatctgctggtgagaatgggaggcagctgggaagaattgctctacttgggtgtttcttcatgcacaaggtatgcggactctgggtgaaacatgtagcaatgtactgtcacaagctgaacataagaaacttctagtagtctctgtttgacaaattaaacattgaaaaccttctaagactgccaggaagaagttaccctataccgaaccgtgctgatacttcttgtcattgaggatgaaatagtttttttttttttaccgagcggcaaatattcttagcacattttagttctttgagagagttcttcaatattcttcttccaaactcggcttagttatctcattttatcactctaccattgtagcacaggccaagtgaggtatgtaatgtctatgtgccgagctgccgttcatctcagagagagagatctatgcaactcctatatcacatcaaaagctccgtaaaaaggctactcgtagtcggagtcgaatctatgtattctctagtaactcaatcagcaaagtaaatgatgatacagctactgttgagacttggctgtgtagtacacttatggtgtagaggccatattcttaatacattatttaaaagaaaaggctactgttgaaactctgaaaacttcgaaatttagctgaacaattgactgaaatatgaagcacttccccccttttataattggcaatggactagagagaatatgccagagctgattgtgtggatctgttgaggaacatatgccagagctgattttttgaaggctatgttcctagtcataacaatcattttatacttccatttgtatagtgtacaaaaaatcagtgctcagatttctctcaaggatccagttcctttgccaattctctggctgcattagtgaattttgtgctccaacgatatgttttaaaaagtaggcaaaaacagagttttgcacacggggatttgtagtttatgcttatgcacaaaccaaaaaaacagagttttgcacacggggatttgtacattatactccctccgtacgggagtagattctaatccctcgaagggatatcctctcgtatacctttttcttctaaattcgatgtaaatagttatgaaaaattctgaaaaaaattaacaatgtagagtataatgatacctactagtccaccaaaattgaagtccaaagattttgtggatatgtatatatgtgttgtatgaatgttgtcaaattttttcagaattttttataaccgtttagatggtttttaagcaaatgagagaacatcccctagagggattataatagtttcctcctccgtactcgtaaagaaagtcgtttaggacaatgtttaagtcaaacattgggaatataaatcatgaataactttgaaaatgtaaaaattatataaatagatttatcttgaaaaatacttttataaaagtgtgtgtgtgtctataaaaatagaaacaagaagtcaaagttatattttgaagagcatgtcgctgtcctaaacgactttctttacgagcgcagcaagagtactttacaattttattagagtatgacattgcgtattagagtatgaaaatgcgttcattttttctcctgatttcaatcttcaacacaaacccagctccacggttcatcgcatcagcgttcatttttttttttcgatcttgtttgtgacggggcagaagaccatgatatggtctactatttcttttgggggtttgcaatatagagcggaacacttttcaaaggtctccacaatctaaacaagtttgaaatcatgcacatagtacaggtttgaatcatgtcaaaagtaccaacttcagatagaacaatgataaaaatggctccaaaaatgcttcaaactaagttctccatttgtatggtactcaggacaactgatggtgcaaaattttcttccaaaaaagggtctggataaataacattagatttttgatctagaagataatatcagctctggaaatgggagcatctaccgcttcccaccaccaccaccgagctttgggcctttcccaggcttgggagcattgcctttaccagaagccttctgcgattttgccacctctgccttcttcgctttcttctcgtcctttgtcttcttgatgcgctccttgatctcactgttatggaaataacattgataagtgtataatcctagaagggaaaaaggtagcatgcatagacacaataatgtgccgatcatcactagatttagagttcataaactaagacaagctaaaatgattttaataaatctttgcacagcaataatttcttactaccaggaaacgcaagctacacatttcaatacttgaaaacaaagagagccaatagcctgacactgctagcatggtaagatgagaatgtggttgaaatgcattggcttcttcaaatccatacatgaatggtgttaaaagaatccataaaccagagatggcatagaatagcataccgaagagcggattcccttgctgcatcacgaacctctggcttctcagctctcttcttctggatgacttcaagggtagcaccaactatagaccgggagtacggtttcttggtggtgcggcgcctcttcttgactgcctcggcgtgaatatcctgtaaaacattgaattacaaaagtaaacatttgaaggacaatgcattacatcacaaatttaaataaacaatagattaactaagataggtcactggtaccacaacattcagcatgacataaagttaacagttcacaacagccaaaaagtagttacataacatcctgaaccaaacagcactgttccaacaagtttgtctcagcacattcacaggcaacagaccatcggtacaagaaaccttccaagtgaaatatggatgacaaggaattgtcactcataccttcttgtgctgctttctgtacatggctgtccatgtaagcttggctggcttcagacggttgtggaagtagcgcttgcacttcgagtttgaaaacaggaacacctgatatagtttaccaaagaaattgatcagaaataggttagcttttgtcctacacatgtgtatccatcttgccaaagtactcacctgggagtctgcacggatgaatctgatacccttccctgggtaaatcttggcgccgctgaaacggcacagctctgtcctgtacatcagaattcccaaattatgtaagaaactttctatttgcaacattccagcctcgaaaatgcagcacagaatataatgaaattgaattgtgcagggtgcaaaatacatacttgagaaccatcttcgctgcctcaccaaaccttcaatgcctccttacctgcaaattacaacgtcaggaatcatcgctagagcagaatataaatgcattgcaatgtacagaccacaaagatctctcctcttcagcccaacactaccagaccccaatatatagcaatctaaattaacaaaattctagcatttctctatccatcaaacgagtacaagaaatgacgcataaagcaaatgcgattccactaagttgccattccaaatcagtgcccaaaaactaatcaaaggaaatctaaaacacatttgcagcattcggatgcacggacaacgccaccaccacaactccaatccagctgaaacccccattccccatcacagcatcacctcaaccaccaaaacaacaagccccacatctaatcaaacgcctcgatccaatcatacgcgtcgagaacgcgaacaaacctagccgccgcgccgccatcacacaacagcccgcaaaacctaccaagaaacaagcgcgggactcgaaacagcgaatacgctacatacacgagacggcgcagcaacgccatggcagcgagcagcgaagcaaatccatggggggaagaggagctcgactcacctgtgggagcagcaaaaccctagcgcctccgcgtccgcctccgctgcggcgcgcgtgggaggtggtgctcccttttatagtagggcaagcgcgcggcgggatggatcggagccgtccgatgcggtggggggacggaatggacggggtggatgagttggtgtgatgataatgggccgggctggtttgtcgggccttggtcaaagtgggccgtcggcttttcttctgtactcggaataagttcacttcataaccctcaaaagtgactcgaatctaattcatgaccctaaaccgcaaaaccggatatcttcacccccaaactattgaaaccggtgcaatttaactcccttggtggttttggatggcagttttgctgacgtggcagtattgactcggtcttctttccgcgtggcgttgacgtggcgcttaggtggcattaaaaaaaatatgcatgggacccattagtcattcacacacaaaataaaaaattgtgggggccactgacatgtggggcccatatgtcatcctctctctccctttcttcttcctcccttctctctttctttctctttctcttctctcccctttggctggccgcgggggagcacgggcggctggagctggagcggcagcggcggtagccttgccatcagccttgccaagtggagagaggagaggagaggagagcaggtgagggaggaacggaggtggtgggttacacgacaggcggggcggcgcgtgagggccggaagggagaggggagaagcggtgccgccgagctcatgttgtcgccgccggtgcctcctcccgcactcgcgctcgcccgcacgccgccggagccaccgctcgacccgctcgatgcctccgccgtcgacgtcccgcgcccaccgccgccgtcgacatcccgcgcgatgtgaggatggatgcggggagatggtggaggacggcgacgaggagctctg

SEQ ID NO: 10229 - DNA, 33052 bp, Oryza sativa
tcctgcagcccttaactaagtttgtaggcaaatatattaatatttacaatactaaattaatttcattaaatatatttttataatatatttgtcttgtgatgaaaatataaattcttttttctataaatttgatcaaacttcaaagtcaaaacgacttataatctaaaatggagggagtacttgattatggtttttctttgtcaagatttcaaataaccgtttgacaggttgcacatttcactatagacttgtcaatctcaaatacatgatgttccagtctatattcgaggtgcttatagggatagattatgtgtttgggtgttccaaggggatgactgtgcgcgcatgtgtacgagcatctacatttgaatgagtttcttttcaaaaaagttgaagattattttattccgtgctaaatgttactacctctgtcccaaaataagtgcagccatggatatccgtgcccaacgtttgaccgtccgtcttatttgaaaattttgtgaaaaaattgaaaatatttagtcacacataaagtactattcatgttttatcatctaatagcaataaaaatactaatcataaaaaattttcaaataagatgaacggtcaaacgttgaacgtgaatagtgtaaaactacacttattttaggacggagggattacatgctgagtgatcacagtttggagcactagtaggattgatactatttttgcttctttttttataatcgtgatgtcacactgatgtgcagcagctagcttgcacgtgctcactgtatgcgctcgactattgatagagtgtgcagcccggcccagcaaccgtgggtcacccatgttacattgggcctgcttcaccacagacccatcggagctacaactttaggtcctagacttacacaaccaaaaatgttagtctgatgggtgagtaatgctcgacccatggaaattggcttccaaatcagagctctgatatcacttgttagagtgtgcaacccggctcagcaagtatgcaacccggcccagcaaccgtgggtcacccaggtcacattgagcatgctcaaccacaggcccaacgggaaccacaactttaggttctgggcctacacaacccaaaaaactagtctgatgagtgagaattgcccgaccttttaagtcgtgctgcccccatcatcaattatcgatatgtgactaaacccaacaactatagatatggatcaactatataaattgaagacccttacatcacatacatatatcaatgtttcctaaagaaacccataaataccagtgagtgtgtaggttcagttcacgttacatatgaaatatatataataaaatgggaatgcatgctatccttgaaagactggtaaggtcagataaaatttgcatgctatcctattcttgttgatgcttggccactatgactcgaagaaaaacaatagttgaataggcttgagaggaatctagaaagttaatatctctaacagcaacagttggggctcactgaagaatcctgctggtctgttttgttttgcagcagtagcttcttccaaccattgaggagggtgaacggtagattacgccagcagaactcaaataatcaaatcttgatagattaaaacatatcccaacttaaaaaaccaatggaacgcacgttcggcggtctattcgacctaccaaggttagtctgacagcagttcacttggcgatctgaccgtcaacctaaaaacagtatgacaaagcttctgtaaaaactcgatttcacttaaaccaaccattggatccacttgtaaactttacagaataaactaaacaaaccaagaaacaactccactggaggtatttgcaaactaataaacggtttaagagaaaacaccctcgaaagtcagctgcctcagaatttcagcaaatctgaacaaaacctaaaacttaagcaaattcaaataaaactttccagatctgatctatgaagtattagaaaggttttagatagtttaacttgaataaaatcgcattaaaatgaagaatatcaagttaatgccaaaactgaacaatatcgtaaaacttatgaaaccggaagagatcgtcgatgccttgatgattgaatataatatttattgctcaagtattatttacaaggtgcagacacaacagctcttgaggctagctaatcatacattgtttactgttaatatgcatctgaagcactccttgtgaaatatggtcgaaaggatcttaatatgtgccagaatggaatggtagtacccagaattgttgtcagtcggttaaagaattagttagctttcgttagtcctgacaggacactaattagtcactcctcttacatgtgcagtctttgaaccatttggtatattgaaatcaataatgcctagaagtaacgtgtgaaagcatttgtgctcccggttcgtaaccccatgtactcccggttttgcaagcgggattatgaatccgggactaaaggtgggtatctttagtatctaggactaaaatccatatttagtcccggttggtagatggatagggccacgtcacgattgttttttacttattattattatttttttgcttgtacctattccccacccaaacccacccaaaccattcacaaattatacacaataaaatcatccacaaatcatacacattcacaatccacaaatcatacacatccacaatccacaaatcaatcacaaaatcatccccaaatcaacaaaaaaaatctccaacaaaatatacaaatcattcagtacaaaatatacaaataaaaaaaattcactcgctgccgcccggccgtgcaccgccttgcgcccggctgccgccgccaaggagagttcccaaatgacttcataattaaggagccactcggtctacgatggcgtggtataatatatttctttccaaaccgaataatacaacatgttaaagactatacaatttcatattatatcataccaatctctaaagggtaacaataataatatggtgtatttataagaaaaagactatttacaccttagatgaaacacccaaaggttaaaataattaagaagctcacgagaggagaaataattatcatcaactacagttaggtggagccaggcaattaattgtataacatttaggatacatgatacctttggacccaacttctatctatctattatatactaaaagtacattaaacttcctataaacgctctcgagtcgccaagtggcgcttctacaaacactcctggaccgccatgtggaccgccatgtggcactatctaatctcaccgtcgattttcacttaaattgatggacccgttaatttagaacattagattagatctattattaaaaaggtgatagtttttcctaaaaaatatgcaactggtggctgggaaaaggaaataaaactaaatgtccgtacgtaagtataattgaaaaaaaaacaaataaagcttcccactgttaggcggaagaaaaaaaaacatctactaacgataaaagatgataaagcaaaaaaaaaaagatgactcatccatcctctcctcaccaattcaattatctcctcttcttttttttaactaacataatataactattgttttatttataattaaataaataaatcaagataacattagctatattttactataaaaagttaaaatacattatttgatggtagaccctatcgtttgaatggcaactaaataacaacgaaaaattaatcgaacataatatgtattatgcgatactaaatcactatacctaacaaaaatcaattaaaacgctctagagcgctcataaatcaccatataatatgtcctaaaattataagaaaaaaaagcaaaatttgatacaggacacccaaaaaatgtgtaattggctgggagacaccgtaaaaacgtgacatggctaatggaaactataaaaattatgtaattggctataggacaccggaggcaatattttatatttccgagtcaaaacaggtgagaaactttttgaaatggtgagattgcccctaacacagagcgtcgccgccgcctcgcccaccgtgagcggcggcggttgtggcctaccccaccgcaatccgccgcagcggcgccatccgctacttccgatgggtggatccggctgcagaaatgtcctgcgggttgacggagcgccctcggcgacggcgtgtcttgagccgctggagcttgtctctcctctccatcttcgtccgtcacctgccatctctcttcggacgacgagcttgtcgccggtcagatattacgtattgctttgtgatttgctcgattccgttggtttccagctttcactcctgtggatcatcccagctgattttattaagttcgattcagagtctgttggtttaatttttagctgattttgaatcaaactctttttttttcatataattgcgtgtgtgtggatagagggtaccgcttggtcggatagacggacaaaaaaatattgtgactattggaaagttactattttttataagtagttaagatatggataaatgtgaatttgtccatatttatatctaaattttttgacacagggagtaaccaacagcctttttcccacgaatagaaaaaaaaagaacataacgaacactgactacaaatcaccgagcgacacgtggctggacatacgaggtgctagattaaatttgatcaattaaattgacgtatccaatattttatctattagatctattttttaaaaataaaatcttaagttatcatgtctcacgtcctataaaaaacggataaatgaccttggaaattcttagaaaaaatgaaacaccctgtcatcggctctcacttaaatcatttagaaaaattagaaaaataaaatctccacctcctcctcactctcacatctacacaaccctgtcaccccctccctattgttttatttattaaattaaaagagaaacaaaaaatatgtttgatattattttagaaacaaagtacaaacacgagcgcttacaacgtgcgcgcactcacctatgtgaacacacacatgcacatacccccatgagtacttctgatagactaggatgacatattttgagatggacgaagtcactacgtacgtctcgctttcgacgggtacgtcacctactactgaaagaatttgtaattctaggacatgaacacgagtgggaaaattccatcacaaccaacgtttacttcgtagtaatgttggatattaaaacaaccataatttttaaactacatttctggaatactcctatgccctttaaaccggtggaatcattatttctaacagttagagctatcttatataagaaaaacaaatgtgtatacatggtacatcacatttaaaatattattgtgcaattatatttcgctttcacattagcttgcgtggtacttctgacccactctacattaaattatcatagatggatcggctctcaaatcacatcaatcatattaggctatataaacccatatatttagtggagcttcatgtcccacccaattaatcctcgaagaaaccatgataatatatatgcaattaaaaaaagaaaaataccttagttttactttgcacttactcttcgttgacatgttttctagggaaaataagtctaccttcttttcaaatgatgaagaagattataaataattgtttattgatattacttaaatatgatataatataaagctaataggttagaaaattataaaagaaattaatgttgatgaaaagaatttacggagaaatcgtggtagatgttcaccggttaatattttcatcttataagcgtctcaatcttagcatacgacccatgcccgcgctaagcgcgggctatcttcctagtttgataaaaaaggccttacatattttacaggaacatcgatccatccatgaggctagctaccaaagctgttgctaaagagatttaggacagatacatatgtgtagtatgggactgggaggcattgtggaaatttcgcatgcctatcaagtgtggttttgcacgaaagatggtggtgtgtcaccgtgcccaggcattcgtcgcactgacagcccacatcatcctgccactcagcagcatttgcaggctatccaatatttgacagcactatgcaatatatgaaatgcatgtcgctagcctcgatggtagtgtttgcattagtaatatgagtgtagagagaaaaatcaagttgaattgattatccctatcatttttctcaattgttcttttcaagaagacacaattagtaagtgaactgtatgtgttcagcaatactaacgcggtaggctcagttcaacagactacgtacatatgcttctcatatatcacaatgaacaagctaatttttcaaatcaagatcacaatgaaaaagatttaaaaagtctaaagggaaaaaaaactatattgtacatatataatctgatataacccatctctaacggataaagatcatgcaacacaacatatgctaattgaaccttccttggactgggatgcgtcaggattatgcatatgtcttatgttttcgcatcatttcagagataactgacaattgtgtttcccacgataagggtgttgcttgtctggttcatcaatgtaacattggtcaaggaagtttgtttctacttcagatttgaatcaaggtcgcgtgcaattcatgccagcaaattcagatattcaaaacggagcctacatatacgtgatcaaaataacaatgtaattgaaatagatatgattgagatcacaccatacgtaaaaacatgaaaatcaagggatgatttgtgatatatatgtgtttcagatgagctgtctaacaatagcaagtacactatagctgtccaacatgaagctcaagctaccaagaacaggattttaaatttttcagagctgaagtgaccaagcttgagaattttggtccaaagttattttaaaccctgcaagaacaatgtcaacgagatatcgtgaagcataaaagttggctagtcatgtcagttacaatgcaatgatcaactttcatatacaattaacgtttcaaagtacttaatcaaggttcttagtagcaagcttaatagtgatacaggacaaaccatctgcggatctgccagattgcagactgcatccttttattctgtcatatatagatatcaattaacccacttgtgtgagtcatcgcaatttgattgattgaaaattacaatcactctgcaaagtagattgatgtctaacacagaatatataagtcattaattgccacaaattgcactgagagtttgtaacttaattgcaagggttgatataatctttgcattagtttttatatcttcatgtgatatacagcagttcttcaacttgcacatgttcactgaatccgctatcgagatcaactatctgaactgaagaccctatatatcatcaccatatatatcaacgagttttgtaggttcaattcacttcacatatgaaatatgtaactaaatggttaggctagataatgtacaagcacctcatgtatgcatgctgcctattcttgctggcttttggcgactctatgagtctcaaagaaaacaggagccatatacgcttgggaggaatctgggaaaagtcgatgtcactggtaggagtgatcaggaatacgaacggatgatcagttgaatttggtatttctctcgtttcttataggcatgatcttacaaccactaaattgtttcttgtgtgtttgctgggaggctagcttaaacagtagatgcatttgaacttctgaagcttgccatgcccaatttgttgacaagtagcttaatatatatgcagaattggatcgcaaggcctctaccgtaatctatttgctctatacaaccttcttaaggtggccactctcttacatgtgtccattctctgaaatctatggtatattggtacaataatggctagtgctagcttatgaaaaagaggttttatcagaactaaaaaccagttaacattgataatacttgcagaaaatatctccaagtttttttttctaatttccaaatagtctagctttgtctagcatgaggctttggaactctctcctagggtgtgttacactacaaaggttggtacagctgcattttaaagagaggtcgcattcagtaaagatcagaatatcgaagagcatgacacggcgggagcatgtacagtattgttggaaatatggtgtatattttaatccaaaatgttaagacaataattatggcatgaacaatgtggggtgatctagtgacaacatttagcataaccagaagcatgcttacagtaccataagcatcatgaacataccaagaacgcaatgcgaccaacagaacaaacagaggtatgaacgacagtaggagagagacataccccgagaatggccctccgctggattgtaaggcagaactgcctctgtcgatgttgaagttcgcaaaagctctggctcccagagctccatctccagagacggcggcagcggcggctccggctccaggtgcagacatggtggacgacgagacaacgacgaacagagcagtcgtgtagagcagtcgtgcgggaagcactccccaataacttggtcacccgcctacccggtgcagatctcaggcgaaggtgtggttccggaggccctgctccttccgatctctcgtgcgcacaagcgattgcgatcagaaacgaggaagcgaaatagaggcagcacagggactagcggcctccttatataggaggagagatatctgccagtttagcggcctccttatataggaggagagatatccgcgaatcgttctgatcggactagcggcctccttatataggagggcggaggactagccgcctccttatatagtaggagagatatctgccagtttagcggcctccttatataggaggagagatatctgcgaatcgttccgatcggactagcggcctccttatatagcaggagagatatctgccagtttagcggcctccttatataggaggagagatatctgcgaatcgttctgatcggactagcggcttccttatataggaggagagatatccgccagttgccgcacgcgcgtcgtgggatcgtgcatgcgccgttacggaggcaatcgtggtagcaaaaggacagagactgacgtgacgcacgccccgccccggcccggccaggcacacgcgcgtggctttccgattcccacctcaaccggtcaacagagagcctccaataactccctatttaagttgaggtactcctcgcttaattcctgaggtgatattgttatccttaacacttattatgggcatttgagatttaatagaataaattgggcctagcccaatctatctatctattatatactaaaagtccattaaacttccttcaaacgctctcaagccgccacatggcctcctacaaacactcctatgtcgccacgtggcattttataatctcaccgtcgattttcttttaaattggtggagccgttaattttaagcgttagatctcccttagagaaaaatcatccccactatttttgagaaaaattaccgtatttgctttaactaatagatagaaaaaaaaaggagaataccataataggacaagaggccagccagtgaggatcgggcagggtacatacgttcttttattttctggtgtcatacgttctatttttttttcctggtggcatacatacgttactacgttagttttttttagcctttttttttagcaaacaatattttttgctttacacattcggcaaacagtactattactacgcatacgatacgtacacgtacgggagtttagggggaagtgttaatagatataaaatcacatgttaccgatttaagtgaaaaccgatggtttgatttttttttctcataatttttaatatttattttaatttagagatatgacatgtagtgacctatgagcatttatacgagcgccacgtggcggcttaaaagcgttcatggaaagttcaatggatttatatatactaaaagccaattaaactttctatagacgctctcaggttgccacatggcctcatataaacactcctacatcgtcacgtggcattctataataacaccgtcaattttcttttaaattggtggacccgttcattttaaccattagatctccatctcaaaggaaataaatctggtatccccacaactaacaccttacatacatgaggtaaaaaaaagcagtacgtactctttccaccctccgaatctcccctcctctcctattttctagctaacttatcctattttataattaacactcaatatataaaaaaataattcaaacatctaaataaccctcaagttacaattttattctcattttttgttaattgttctgttatttataattaaatataaaattcaaaatccatattgctcatattttgttatctaaatattagatcatgcaaccattctaactacaaatgtctaggcctaatggtacgcccataaacacttctaagtcatttgccacatgacactctattaaattaaaaaaaaatctataagtgtgacaaatgaaaacaaaacatctaaccattagtttccacttgaatcaatggatccactatcttatatggttagatctatctttaaaaggaaatcccaaaagtcccaaccgtttgtcccgttcctctctccctaccattcattatctgttctttttatctccatggcaactaaatccaaaattatctttacgagaaaaaaaacacccacaaatggactccgcctaacaagtctagccagcttttcctttgtcatgtgcttctcttctctttctcctcaagctagtacttataaaaacaacctaaattagactttaaaataatcgtaaatttttaaatcttatattcaatttatgacatttctaaactattgtaagtttcaattaaatcaataatttaatacattgtggacccgtctatccaacttgaagcctccaataaataaaataaaatactaaaatttctaattaaaaattaaaatatcccaccttaagtttttaatagcagtcaacccattatttataccatgctaaatagctaattgccttcctcccaactccttctgtttcagattataagtcattttaaattttgtctatgtcaaattacttgaattagtttataaaaacatagtaacattttcaacacaaaacaattatattataaaaaacatattcaattttgaattcaataaaaataatttggtgttgtaaatattgatatatttttcgtcaacaatagaagtagttaatttctcttaacatttaaataggggctatttacttatacttagatgcgcttttatgaataaatgatctttttagagataaatagacgttcctaagatcatcataacatctaaattatacatattatatctgatgtcactaatagattagagtaaaagcttttaattatatcttttttcttgtcataacatgtaccctgtctaggatctatttgtcatagacaatagattgaaaacaatcaatggatacttttatcccatgccaagttgtatggccttaacccacttatatttccataccaaattgcagagatcaaaacatttaagggatgcttgatggaatggaaatctagaaaaaaaatagaaaaataacatgataaaaataattgaagactgaacttttttttcttctaaatttaactttttttgaatttgaaacccattctaaatagcaatgttcaaatattttaggagtactgatacaatgaaaataactaaaattttaaataaaatataatagaaaattggactttttggcattatgttggaaacaaaatctaacataatttcagttcgaagtatacaaccctaaactacaacttgggagcaataaaagtctcatttttaatatattttctgatttagaaaaacttttactgctaaaccatagttttatactgcaatactatataattacaattaaatcattatttcaacatattcagctcatttaattagatcatgtaatcgtattagccatatttttaatagaaaatatcttcaattgatatatcctaaaattcaaaaaaacatatatagtgcaaaaaaaaagatatgctaaatattaaaaaaataaatgcattatgtacaaatgcattatgtagaagtgatatatagtttcatatatatatatttcttataaaaccaaatttgcacagttttaagtaattttagtttagaatttatacaccagcgatggttactagcattcagagaaacaccacacaaattattgaaaaattaaacatgtttacaatagagtaatcataaaaattcctaataaaatttctaacacagttaaataagatgcccgcgcatatgcgcgggctaccttcctagttattctaacaagtatatgtattatatataaccactgatgctagtttttctcagtagcatgcatatttatatttcgttggaaactctcatatagtcaactgtaagcaatcaagactgtcaaaaacctgcatacagcaaaattgcagcttcagtcatttgctcatatctaccataattggatgtcagcaggattgagatgcatcggcaaattagccctcgcgtcatcggtagaaagtgctacattggagcacttgtggatagcaccattgaaccaggcaatctatattctcttctctttatgcagttcatggaaactgctaagacgatgagtccgtgatcaactcctatttaggaataacccgtaccagtgacggttttattcagttaggcaggaatatatctgtgaaccagcagtgatatgatgagccggtttcaattggcttttgtgtgatagcataaactttgtccagaaaatgccgcaactaggttttgtatgcagctagagatttgatcaggtgtatgtttaggtgaattacaccattgtgaatttgggtgaataacaccattgtgaataaactaaatacagatatacttggtgatgtttttaatacaaatcgatcttattgccaatttcatgaacatgaacatgaacattcacactgcttcgttattaaaaaccttttgaaatcgattaatctttaatatagtctatgccaattaatggctagatatcagcacaaatcattcacggtttataattcactactacatagacgatttctctgtacgagcatccctatagtttgcaggcaaacaataactgatcgcgtctaaaaatcgacctgcattttcacatacaactctttaaagacctgcgtgcaaatatcaattttcgctggtgaacctcttaacacacccgtatgcaaaaaatgagtctattttgacatgcggatctcttaagtgaccacaagcaaaaatagatattcgcatgcatgccccacgctttttcccgcaccatttttttaactcccctctttctctccaccacaccttattctctctcttctcttcccactcctcctagctaactcctcctctccctctcccctcttccaatctcttcttcttccctccccccttctcttctccagtgggtgccagcggccagctagcggatctgccatccccgccctcaagagcaatgagtccgtcaaccctgccctcaggagcggcggcagcgggagcgggcagatcagtcgcccaagacctcgagagcggtggcggtgggagcgggtggatccgccaccccgccctcagcaggaatgatggcgcagatccgccgccgctgctttcgggaatgacggcggcgggcgcagcggcccgacgacgacggcaccggcggtgacgactacaacgacgatgaaggtagcgactagggtttcgagcgattttgtttctttgggatttttaatttttttcgctgaaactattttcacgtgcggtcgtcataggtgaaagaaagcgagaaatcctatttttgcatgtggttatgctaccgcatggaaaaaaatgacgattttgcacacacctaagtgcatggaaaaatatgttttggccgtttggaaaaatcgttgtgtaggtttgcaagtcttgaatggtttctcacagacctgttagagtcttagagattagttaattagacttgacacttggttgtccggtggaagtgtggactattttgcctatttactatcagaacatacaaaggattaaacaataatacgatgttgtttcaacagtgtatatttaagatggattagaattttcgcagactataaattggaatccttatgaattttcttggggaaatgggattgattaaccttgatttatatgtgtactagcaagaggagaacaagtacttctcctactatactccctccgtacatagtccgtacaaaatacttctagtatttgaaatttgttcacaaatataatgattttattgtactactttccaacacaactacctatcgtttaatgaatggcaccatattcttttcccttcatccttaatgtctcaatagaatttaaaagttattgtatttgtggacagaggagtacatgtctagctaggatcaaaaatttcgatgtaatcaatcaaaacacacacagtgtttcccattttgccaccgacatactcaaatttcatttgaaatccaagaccatgtggtgtaaggtattagttttgcaaatcatgagagttccaaaactagtttcccaaaactatatggtccttgattcatattcattaaattcaagattttcttagttgtggtcttttatatttgccatgaatctgttgtataaaatggacaggtgaaccctctatcctatatgtcaataaagagtgcgtctccggtgctttttacttagagtagaaatcaatctaaaccgctaattcgtttttatccaagggattagatttatttatactaccaccttattaagagtagtagaaacgtgggagggcaaattcgtccattgaaaaataaacattgatggataaatttgtaaatacgaattggaaactttgggatgagatcgatggtggtggcgctacaggagggggcagaggcggctaccgcggtcgctgctatcggcgacggcggctaatctgcgtgtggacactcatcgccaacatgtccatctaggcgagtgtttgtaattcttcatagacagaggagaatgaccagatgcaaggcccaacgattgtttgtcccgtatttcctctgacttcaattgtacagagaaaattttgaaggttgtaaaatttgtgttgatgtctttgtaatttaatcttcataatccgtaaagagatggatacttgaaaagaatatctacttaaagagaattcgatagatattggatggatggttactggcgaaggtcagttgccgaatcgagttggcaccgccgccggtgtaggtgcgtagagatacagcgagagaaaacgatataagcggcgacactaacaacagattcaactattaacggaaaaataaatatcaaaattacccctaattaactatacaggtagcaaaatactaatatacccttagaaatcaacggctcagatcattctacttgtagtagaatactaccagtagaaagcactggagcgtgactcgtcaataaaatgtccatttttcttccaacacttcttcacaaccgcgaagttctcaaatttgtcctcagtttgaagcaatcatatgcacgactgggatgcgtcaggaatttgcatctttcttttgctttccagtcatctcagggtgcaagcgattttgttctgctcaccagcatttcaacatttgagagaattgcacatccacctaacactacgcaggaaacgctcatctctgacagcaccgaagaactcgtcatggatgacctcacctttgaccggtccatccacagcctgtgagaggtgaagtctccagccgcgggccatcacaagttataatcactctatatcacagggcatggatttttcattttcctgttgatctcaacgaggtcacgcagtgctgtagtggaagctgcgctctagctctttcattcattttcaccaatggaaactcacccttttagattcgaattgaatgtccaatgtaattcgtcctcaagcgattaagagatccaagcagagtataaagcatcatatataatcttaataaccaagcaatccaaacagacagagatcgcactgtaggtaaaaacactaaaaattaagggagcatttgtaatatttgttgcagatttatatactacattaattctttctcacacttgcaagtatgctagctgtccaattcgaaattatcaagaacagagttttaaattttagagtgccaactctctctctctctcagcgcaaaagcatttcaggggcactgaaatttcagtattgaattgtgaactgtgcacgaacactgttaggccttattcggtttagagagggattgaaaagtattagaggggattaagaataattccccaccaaataggtgtggaataaatctcctctaatcccttcctcacaagggttaatcgaacatgacgttaaggctgatttgtggagagcctgaaactaggcatttacatgctcgtcgtttgcattagaaaaaaaagacaataatcagttgcaaacataatgaccgtatcaaagtagttgagtgtattcagggagcatgtgcagagctccaaagcgatgcaaacatatgaaaatacaataatacatttagagatcttcttcaatacttaaaattaattaggaccattgatctgcaataatctaacggacagaaagagaaggtgcctggaaaaaggtattaaaagggtgagtcaggtatggaaggtgggagggtaaaatggtaattgtttttcattaaattttttcggtaaagggcaaaagcgtatttttacaaattcagaacttttgagagaagcaacaaacgtttcagcatgaggaagaaaaaaaatgagaggaagaattagaacgctcgcgtgcgagaggaacctacataacctgctggtcgtcgctgccgtaaaaggctgccgcttgccgaggccgcacacgcccgccgctcgctgctgccgtacgcgcctacgaaagcagcagctggacaccgtcgccgccgacgcacgcgcccgtagcgcccgccggtcacagctgacgtacgcagcagaacatcgctgtcaccgccgctgcacgagcccgtcgcgccagccagtcgccgccgtcgcacgcgctggcttggttgattagggttaatcttgaatcaacggtgcgatggcttggttgattgggtgacgggtgggatttgagcaattactaagctacccttgttaataaaaaattgtgttcctaaattaccctttgaagattaatggtggataacaattcgttaaggaggtacctggggtaccttccaagcaccgtaaaagatctcatatatttaccatcacaaagtcaggtagaccctagcatagcatatgagcctcagtaaggtgctagtatttactagtagtaaaaattaatctgaaccgttgatctcatctcatatctattaatactattaccccaagtaagcggtagtagaaatatgaaggggcattattatagaaaaaggtgtgaaggggcataatcattatatagcagtaactaaacatttttttctccttttttttttgctttttcaatgaaatatgagcgatgccagctcaatggatattataggtcgatttagccaaggaaaaagaacataaatgatagttactcctaatcatggtattaatagattactaatttagccctaaaaataatggtagtataattaaactgttagagaacactggagcatcgtatcagtgagcaggttcactcctcttttctcataagaaacaaccaaaaggttaagactaggacactatacaagctcctcatctacgcaatctgccttttaaagcaaaggagtgtcaaataggattgggaggaatctaggaattcaatatctctccttctcaaatccacagtagctaattgcctatttggttacctgcgcactcgtcagcaacgaagctgggatccccatggcatgtgctgatcacattgccttacactgggaggcaagaaatgaaagagaggatagataataggatcatcgaagcatcataaaatagacgtggcattacttttgaacctcatctcttgaaagaaaagtaatcgaacactggaaagagtcatgtggtgagttatacatctcttgttgatgacttttcagttgaaatcatttagtattcgaaaatattgtttgaagttgtcatattttcaaattcaaattcaaactattcaaacaaagacatatagaaaaattaccaaaataaaagttatagatcttgataagttatacaactttgtttttgataatttttccatttgaaatcatttactacccgaaaaaattatttgaatttcttatattttaaaatttaaattttatatagtccgattaaactcggatggagaaatgaccaaaataaaattggtagatctcaatgagttctacatttttttatatgagtttatttagtaccataaaattcaattcgaagtttaatttttttcaagaagtctgatttgcctcctctttgggttgggctggcttatgggtcttatgtataagtcggatatccgatggaaaataccagataatatccgacggatatcacctagaccatatcgtttttatatccaaaaaaaaatatttgaattcgtttccgaattcgaaaattttcggatatatccgaccaaaactatccgaatccgaaaaatggtccggtcggatggaaattatccgaatcactttccaaccctactgctgagcgttccctgaattcccaaatttctgatcgatcgtgagcctgttgataggttatctacagttcgtttgcatctcttataaacaacttatttctgctgcttcttgctgttaattctacgatcattgagtttttggtagttttttcttaggatcgaatagcaagaactaagccaaccggggagggggggaatagttgtagtacctaaaacgtgaaacttttagcggaattaaaagttaccctcgaattcgatgtagatcggtgtgaccagagttgatccacctgtctgatcgacgttgatttccaggtcaaaccaccctgcgatcgtctctgcctcctgtcgccgctgccggtctgaccaccttgtccccaccggtttgaccgatgcgatgccatcggtctgaccaccaaacccgaacaaacacaaatagaagatcactcaatgtagattggaactttaatatttctctctgtgtttacaaagtgcaacaacagcatgaaattctcgactaaactcgaaaccctaacttttctctcaactcaactctctcaaaaacattaccgggaggacacaccctccctctctatatatacccgagataggcagcctaaagctacgaaccaaccttgtacaaaaatcctaatcccctaggaaaccttcccgtacaaaaaacaaactttacaaacttcaattgtactaaatttggactccttccaaattcgactccacatcccatacgtacacaatatctccatcgtatgccatttggaatcttcaccaagttatgacaccgcatgatatcctgatcgtcattgatctttagcctaagcataccgcatgatatcttgatcgttcagacatcatcttctcccatgttgactcccgatccatcaccggcaacactctcccgagacatcaagaccacctacacatgcatcaactaagaaaccatatccgagcacaagttctcaacaacttgacttattcttagcaaacaacaatattatatacgcatagtatccatctagaagtcataaacatgaataatccacagatatattgagaaacaacccaaaaccaaaaccaacacagagtcggacggtcaaatcgcaagctggccagtctgaccgcttgatacacgctggtctaaccggcaaccactgcccgatctgaccggttctacttagttagcaatccctgttcatcacctgcaaatcaattatctccaaaaccacttcgacaataatctccaaatatcaaaactaataatctcagatgccaattattcatcacagaataagaatcaaaccaactttattttacacttttacttggaagttcttgtgttactgctgctgctgattcaattcgatttactcagtttagaaatcaattacgtcataagtgctacccacctatataaatatagctcttggatttgttttagatatgtacagatttccctagaaaatcaagagtaaaaggattcattttcccaaatctattcagtttcttgattcgtatgaattaaaacagagatttctttgctttggtcttcaatatgtgccatgaatctgctctatatattggcccggtgaaccctctatcggagtaacatgtccattgttttaccaatacttcacaaccgcaaagaactcgaattcctcaatgtgaggtgatcatgcatggactgggatgcgtcgggattatgcatctgacttacttttgtaaatagtttcagggatgcaagtgttggaatgctgcacatgagcattccacatcttgcaacagctgctcgctttgatcatcgctcggtgattggccagagcaagatcgttcttcttccaactaatctcaaccagattgcaatttcttccatggaaggtgggctgtttgacaccttcccagctaattctgagatttagaaggtgccaaaaccatcatatatgtgatcttaataagaaagtaatttaaacagatagagatcacaacgtcaaaaacacgaaattcaagggagaactggtggtatctgttgctggtttatctgctccttttgttgtaacacttccaagttggctagttgtccaacatgaagctatcaagagcaggattttaaatttcagagcgccaaagtatttcagtccaaaattattgtgggccctgcaagaacacaatcaaggatgattaatgaagaacaaaacttggccagtctatgtaactacattgcaacataatgatcaattttcttatgtagttaacattcaaaagtatgtacttgatcaaggctcttattatcaagcttgtaaataacggtgacatagagccaaccatctgccagatttataggcttgatgctttagttctgtgttagatgtcaatctacttgctgactggtggcaggtttgaatcaatacaatgcgttgtcactgtgacttgtaaggactgatcgataaatctttgcatgttttatatccatgttaagattagttgtaaatttgttcttgcacttatcatgtgatgttgatctttagcagctatctggaacttgcacatgctcactgaaggagatcaactactaccgataggatatacatatcaactatataaactgaagacaattcagtacttctcatatatacgaaatatgtaaacaaaatggtaagctcctcatgcatgcactgcctatatattcttactggtaatcagataggcttgggaggaatctaggaaatcaatgcctctggaaacattaagagatgctgagtgatgatctgctgcgtattgtttggctcgttctgcagtgacagcttacaacaaccattgaactggttcttgcacacttgcagggctagcaggagcttaatatctgtttgcagaaaacagcctcctgaatggggtccgtcctcttacatgtgcctagactctagtggagtacttctgaaagagagtggtcaaaacatatttatcggaagcttaaaaaccagtgtaagatttctaacactttgaaacacagacctattggttgatcttggtgctacgagaattaattgtgcgaggatgaagtccaccgtgcacccgcccaatacattcacatgagtttccaaattaaccatgcactttcctaacaataattccatgccatgatcagcggcgtttccacatattttggaccggccacgtgtcccaccaatgtcctataaaagaatagaaggcccatgtgaggtagtgaacaatattgacttctcgcacactagaatacgttgggaagggacccgatggaccgcttccaaacctacaggataaggccatttccaaccaatgacactagacactagtacacactattctttccatgcaaacaccactattccataattcaatttaatgctacttatctcacatgatgtcttggatgttgtgtagaaatcatgtctcatgcaagacatggtttccttctccttttctcatttattcacttgtcacatcatttttcatcctacgtggcagcttaactaatgctatggacaccatcctagtcattgggttggtaatgccctaattaaatccttcaagggagatgatgaggaattaacctaggaagttaatgtgtctggggccagctctgtcacatatcgtctgtctaatttagcaacggcaacttaattataagcactgaattagcttttatacgattgcaaagctagctgaccgtgtacgctatttaaagttcatatacaaactcgtgatattgtctggcgccaccgcacaaagctctatgccatcgtgcgattgagatggcgcggctcatcgggggcaacggcgattgcgtagggacagttgagatcgagatcatgagtcgcggatgttcggcccgccgccatcgctcgcttgcgacaggaggggaaaagagacatttcgcgtaaaccttaattttctcaaacatgtcataaacgtcaaataaagaggaatggagggagtacaaacctaatatagccatgtcgcactagttgattgagattcttattatcatgctagtaaatatatgggtggtatatagggccaaccatttgttagactccagactttgttccctgtcaaacatcaatctattttctggtggtgaattatcacagtttgggatgtgtttgctgccactgccacttattatagctgacttaattttgtaagcgtaactatcactactacacaaaacccttttggtgccggttgcaaaccccacataggtgccggatttggcaagcggcacccagtttccagcacctatgagtattgttaatggtgtcggttcaagaaccgacacctttgaggtgtatggatcacaaaaaaaaaaggatggcttggctcgactcaattcgagcggatgcctcaaagccaaaagaaatcgaaaaatataaaataaaatgaggcaagttatcagataatcacaaattcattcacagaaacattcatagatacattcacatcaaacatttacaaatacattcacagatgcattcacaaatacattcacaagaggagatcagtgaatacattcataggaggagatcagcgacggcgagatcaacgagaaaggagagggcgagggagaggggagaggagtattgacctttgggctggcccacccgccgagaggcaccctggctgccgacctggctgggcaaatgctgccgagcgccataccaagcaccccgaacccggcccagggcggccgaagtgggggcgcacacggcagtgacaggcgggctatcatagtatttgctaagttgacgggctggagataagcggactcgaaccgctaacacggccacaaggtaaaaccaccgcctcttaggcctacccaacgggggccctagggcggacgaacccgctagccagcagcggtagctatgcgcccactgtgaacgccagcgccgacgccgacaccgccttgaatgagctcgaaagccggcggttctcctcgttgaccaccttttgatgcggacatcactacctcggatacacacaacaatcctccaacggtcattcaaggaccgataacaagagctcgtgcgcgacaattaaatttagaggtgagttcgttcctatgttcttctttgtatgaattcgagaatagattgctacctaatgattatattatgattaggaacaatggaggggacaaggagacacttggagaaggacttagagccatggaggatcatcgaggacgtccaagtcaaggtggaggcccaaaccaagtcgacgtcgggtgtaattcggagtccaggaccagtctgcactaaaacgggcacccaggtcgcatacgtgctcggattggggcgttctttatatggatggaaagctaagaagataacttttccaatggttttggtcccacgtccaaattctttctaagtcaatggaaattgaccgaacaagttgacgtctagaatctgtcctggtgctgcatcaccgtatttgggcctttggcccgtgtatcgtgttggaacccattagggttacgtcgagaggggtttgcacgaccctaaactctatatatcagtacccgccgccatctttaggtttttgggttttgcttagattaatctgtcgagaacagtttcgccactagatcgttttgtaagaccccaactcgtgagcttaatcattcatccgcaattttggttgttttctatctcgttcttgtttgtgttcttcgactgtcaaatagggattagccttctcggtgaggttatccgcgttttgacatgggtgataaccagaggagacgtggtgctgcgattgcggggctcaagagcgtgcgcgttcaagaagctggatcgatttgtgtcgcgactccgcctaaatcgttgtttatcagaacctttcgaaagattaggaaccctagtacacatcaccttctccgcgggctcgccgtcgccgcgttggcattgcctcctcctacgccgggccctgccgcctcccctcctgcccgaatctagaagaggggagggtgtcaccgccgcctcctcccaacaggatcaatggagagcgagagagagagagaagagcgacagagagaaaagagatcgatggagtcgatggatctggattgatccgagggccttatctcctcgttcctcgtgatggagcctgccagctcagctcatgcctgctcggtaaattctcaggtacctataatataacacataacataggtgctagtttttaattaatagccacctataatatattataggtgttcgttcttttttaaaaaccggtaccattagtattggtaccggttttctttagaaccaatacttatatttgtttaaaggtgttggttttctattttttatcccatgggaggtggaaaaaggtcaataggtgcacctatatgtggagattatggataccccatacccacacggcatgtttattcgaccgggtataggggtaccatatacagatagaatatatttagtacaggactcaattgggttgttatgttaacttgtgtaccacggaaacacctgatggtcctagtcggatacgactgtaatttatctttacttgtctattccgttaggaacatggattgtatcttgtaatacgggcttctccccatatggagaggttcggtgtctcttggggcataatttttctcccggatcatacgatgaataatacactcagcgaattattccccggacaggagtagggtattacttcttatcgagaaggtctgaacctgtataaaacttttgtctcctaacccatccacttttcctgcttgatagccacccctttagtattgccgaaatattgcttcgacactataagccggtccctacgaggtttttgtagtagtgtagagcgccttttcattctacatctatgtatatacctaggtacttacatatttgtccttgtgactataatgtgatattgatgcgcagcaggtccggagcttaatttgcacatgatcactaaataaactcaactacgaaaagacaggtcccaactatagcatagccatatactcgcttcttattaaaatataaatatttctagaattcaaaatttgtcaatttatggagaaccgatagtaatgcgaaattcgtacattttaagcaaagtgggtgcgtgggaggggaatttaagcaattcaaaattcaaaatttgatgactgagatgaccgaaagggaatctttttcattaagcttaaactttgcaaaacaacctgaaaattattatattgtgagacagatagagtatatcatatcagtgacttataggtttattcctccatttcttataaaaaatattatagtgtgcgacagagatactatatcatatcagtactgactgatagatccattcctccttttcttataagaaagaaccaaaagggaaagtaagactagaacaatgtacgggctctccgtctatgaaagctgtatagtcttgttgctacttggccactatatatgactccagaaaagagagagtcaaataggattggaaggtatctaggaattcgatttctctccaactcaagttcgaagtagccaagggcctatttcattacgtgctcctctgcaagcctgtgctcacattgtatcttccttgagattgcaagaaattgggagagaggatagatgataggatcatcaaagcagcaccaaatagaggatgatgcggaacagatggcacacaagtttgaattgtgctttttaggttgatgctacaacaattactgaattgcaaatgatcactacataaactcaactacgaacagacaggtcccaactatagcatagccatatactcgcttcttaataaaatataaatatttctaggattcaaaatttatcgagttatgagaattgatactaatgcaaaattcatacattttaagcaaagtgggtgcgtgggaggggaatttaagcaattcaaaattcaaaatttgatgactgagatgaccgaaagggaatctttttcattaagcttaagctttgcaaaacagcctaaaaattattatattgtgggacagagtgagtatttcatatcagtgacttataggtatattcctccgtttcttgtaaaaattattatagtgtgcgacggagagactatcatatcagtgactgatagatccattcctccttttctcataagaaagaaccaaaagggtaagtaagactagaacaatgtacgagctctttgtctatgcaagctgtataatcttgttgctacttggccactatatatgactcaagaaaagagagagtcaaataggattggaaggtatctaggaattcagtttctctccaactcaagttcgaagtagccaagggcctatttcgttacgtgctcctctgcaagcctgtgctcacattctatcctccttgagattgcaagaaattgggagagaggatagatgataggatcatcgaagcacagcaccaaatagaggaggatgcgggacagatggcacacaagtttgaattgtgctttttaggttgattctacaacaattactgagtgcctagcaaagccgataactagcctcaaagagtccaagataactagatgcaagcaaccaaaatagtagtgcaacctaaaccgtcatctccattacggcaacctgtactgagggttagcccaaccacactctaagttaccaaccaacacaacctacaatcaaacaagagaaatctcgaaggaagtagaagcgccaattgcaattggggagcgtcgaacactacttctgtaatcccacaaggaaatcacaagagaaaaggggtagggatctctctaaatttgttagcacacaactaaacaaaggggttcatattcttattgtcaaaagtctttcaaatggtaaaacaaagggaatatttatattaggaataaccctcctagttgggaatgaaaattcttgagagtttattggacatagactagctcaaaggtcttaataagtgaattcccaagaatactcacgcagtcttcaatgatttgtccattactccttattgaaaaatcaaaatgatgggccgtttgttggagttgaaactagacttgattatctttccatccatatataatatgcaaggaagaagttgactagatgggtctcacataatttgaaaattggagcaaatgttaggagacgtggactccgaattcgaaatcagcatggcgtaaatggtcgtcgtattcacataacccatcatcaatttgatcttctagctcatcatcaatgccctgcaagtcttgtgcacgtgtgaatctaagtaaaagcaaagtagatgatttaggtagtacataattctcgttaatattaaagttaaattcagcgagaaaagagtcaaccttttgtcgtacttttattgaatgatgttgcgcactccatccttgcttggcacaatcccttggagatggagtcacaacatggcttagcatagtcggtcctcgagattgtggcactagtccaaatgatggtttacgttcatatgatagcaaggttagtgcacagttacttcgcctttgtatagtggtggtattggttgagtaaataatccaagtcaaatatctctctttaggcgcatcgatatgttttaacctacaattataaaagacaactagtaaccttgtcttttgaaaataacaatattcagagttaagcatagctttaaccttgcatggatgtgtcacaatcagattatgtgtcaactgcattggccgatccacattaatcaagatgtgtttaccaagtgcatccaatgcaatcctctctcaactcacgaattagaattgaagcaaaaacaaaccatattttttcacaacaaaacgtcgatatacttcaagcctcaatccattttctttttgtacccaaaactaggggtgggcattcggtcagactgaaaaattcggtctcggtcttcggtttttcggttagttcggtctttagaaactcaagaccggatttcattcaaaaaatcttaggaccaacaaattcggtctcgtttttttggtctcggtctcggtctgaccgattttttttcacagccgctagagagtggagacggaggcaatggcgacgacgctggaggaggaaggcagaggcgttggagcttggagggcgctagagccggaggcggaggcggcggagggcaaaggtggaggcggcgccgacgctggaggcggcatcgctgtcggtgtcaatagcacggggaggaggggatggggatgggaagggctcggtggatgggaggatggtgctggtggttggttggataaggttgtgggtggataaggttggttttgctaaggaggtattgggcctaatgggccaattctatatttcggttttttcggtcaattcggttaaccgaggcctaaaaccgaatcgcccgacctaaattcggttaagtagaaagtgctgaccgaatttgtgaccgaatttttcggtctcagtaagttcggtttcggtctcggtcattttggtttggtctttttctgcccacccctacccaaaacatggctacccctagccccaaatccaactagaactaggacttctaatcatatagggaacctaccaaagcagggaaacaacatcgacatacaactctaaactccaatcttcttgattcaaatttgattattttttccatacacacacaacaccacatgtataccataaggaaacctttccatgcatccatgtgaattgttctctagcctgggtatcccatgtgatctgcttgactgtctacatctcaacttcttccaaatctagttccgatccatcactagtaatactcccatggcctcaagcaacacttccacatgaacaacaaaaaaatattctatatctgagtacaagttcgcaccaacttaactcacatcagcacacaacaatgtcacatacatataaaaaccatctagaagtcatatagataaagtaatctagaaaatccacgaaaacaacttgacactgactcaaaccctaagtcaacccagtctgatcgggtggaccgcatggtcagactggctacatacctctgatctgaccagcaccctcctgaccggtctaaccggtgatccagtgccaaccacactattcaccatataaaaacattattcaccgtattttcacaaacactcacctttggcaatagttcatcatataaaatagagtaaatttcataaaactgtatatactttgcatgatctattacaaaactacatatttaagaacttgtttcacaaaactacagattcagtgtctccgtttatcacaaaactacatatactttgcacaatatttcacaaaactatagatttagtatcttcatttatcacaaactacaagtgtaatgtcttcattatcacaaaactacatattttagcatgtagttttgtgataatggtgacactaaatcgtgataaatgaagacactaaatgtgtagttctgtgataaacgaatacactaaatctatagttttgtgaaacaagttcttaaatctgtagttttgtgatagattatacaaagtacctgtagttttgtgataaaaatctgtatttttatgaaacaagcctgtagttttatgataaattgtgcaaaatacttgtagttactctataaaataaatcatcacatgattctctatgccagtaacaggttcattgttttacccatacgtcacagccacaaagaagttgaattactcaatgtgaggtgtgtaggatcgaatcacaagaactaagccaaccagaggggggtgaatggttggtatacccaaaaaccgaaaactattagcggaaagaaaagttaccctcgaattcgacggatcgcggtctgaccgaagttgtcctactggtctgaccgcctggttgccgtcggtctgaccgagattatatctctggtccgaccgccgagatcagctactgctcgctgtcgccgccgccggtctgaccgccatgctcccgctggtctgaccgccgcttaccgccggtctgaccgccggtagatcgccggttagaccgccgaaacctggtaacacaaatcgaaaaactcttaaagtagatgacgactttattgattctctttgtgtttacaaagtgcaccaacagcactccttacaaaaattttgactaaactcgaaaccctaactcaaaactcaactcaattgttctcaaaagcgatcccgggaagcctgacgcttcccctctatttatacatgaggtaggcagcctaaagccacgaaccaaactcatactaagagtcctaaacaccttaggaaaccctctagtacaagaatgaaactctacataaccaatcataccaaatttggactccttccaaattcgactccgcatcccatacacacacaatacctccatcgtatgccatatggaatctccatcaaccacgtgcattaactctagcctaagtatcccgcatgatctctgaccaccacggacgtcgccgtatccccaagccgattcccggtctatcaccgcaaatactctcccgagacatcgagtcacctacacatggaacaaacaaagaaaccatattccgagaccaagctatctccaacttgactcattagcagtaaacaatagtattacatacgtatagtatccatctagaagtcataatcatgaaataaactcggatatccaaataaactacccgaaaccgaaaccgacatagtgttggtcggtcagaccgcgggctagccggtctgaccgttcgcatatcgccggtctgactggctaccagagcccggtctgaccggtcacataaaataatgaacctgtgattcacctgtaaatccaatcatctccaaaaccacttcatgaataaattccaaataacaaaaccaataatctccaatgccaattgttcatcacagaataataataaaaaacacctttgattttacaaggtgatcatgcgtatggattgggatgcgtcgggattatgcatctgacttattattgcgcatcatttcggagattcgagctttggtgtgccgctcattagcattcaccgtctttgcaacggctgttcacttcgatcatctctctacggctggccagagcgacctcgtatgcttcttcctactaatctcaaccatattgcgactgaatttcatcaacgaccagttcaattcaacccagctaattctgagattgaaaaggagcctaaaccatcatatatatatatatatatatatatatatatatatatatatatatatatatatatatatatatatatgagagtaaatatatacatgtgatcctaataagaaagtaatttaaacatatagagatcacactgtcaaaacacaaatttcaatggatcaagaactggtgatatatctgtttctggtttatctgcccctttgttctaacatttccatgtaggctagctgtctaacatgaagctaccaagagcagcatttcaaatttcagagagccagagtatttgagggggaaccagaattttcgataaattcggaccaaaattattgtggatccgagcaattttaccatccatcatttggtacctcgaggtaccatattttatacacaaattttagttcctcaagatacgaagtaactcaagctaccaaattttacactagaaaatacctcgtggtacaaaaaatttgtgtaactttgaggtaccgagggcctgtttagttcccaaaaaacttttcccaaaaacatcacatcgaatctttagacacaaatatggagcattaaatataaataaaaataaaaactaattgtatagtttatatgtaaatcgcgagatgaatattttgagcctaattaggccatgattaaccataagtgctgtagtaacctgaatgtgctaatgacagattaacactactagagaaaccatctttggtcggttgccaaaaacaacaatagtcccgattgcttaaaaaactgggactaaaaagcatttttagtcccggtttaaaagtgcaatgatatttagtcccggttagtgttaccaactgggactaaagatcatcttttgtcccggtttattcattggcacgacgtggtaggtctcctaatatttttaatcccggttggtataaacaaccgg

SEQ ID NO: 10230 - DNA, 51795 bp, Oryza sativa
tgtgtgtgaatgacaaatgggtcccacatatatgtttttaattgaaatgccacctcagcgccacgtcagcacacagactaggtcaacaccgcccacgtcagcgccacgtcagcgaaaccgccatccaaaaccaccaagggagtcaaattgcaccggtttcaatagtttgggggtgaagatatccggttttgcggtttagggtcatggattagattcgggtctcttttgagggtcatgaagtgaacttattcctctgtactctgtgtctttgtgcgtttctttttctgttcttttaggctattttctgtgctttatgcgtttgtttgtgtgtgtgtgtgttaaaagaaaattttgtgtgctttgtgttgaaaatttaaaacagtttcagaagaaaagagaagaaatcgctaggacgttgacatttgtcttaagatgaccgaaaaattgttgttgcactccatcccaaataagtgtagttttatagtggccctctgtatatctttatattttacttcaacttttccatccagattgtagctattgaaccaatagtaatctctacttacctccccccccccccaaaacacaatcccaccctcttattttcttcatattagtgaaggacgtaatcctatatatttatatagtccatccacactcagtgtagttaatgctatttctctcttctttcatgaaaccatatcatttcaattattttttattctttggatgatagatctatagtacaaatagtcatttctttcctctctcgtaaaaccacacaatctcaattattttttattcaaaattcataagtatcaattacataaaatatgttcaccttgcattatatttgcaatcatgtgttgattatataaaacatatgaagtcattttattttggtttacaaaatataatatagcttatttgtacatacgatacaacttaatttcccgcaacaacgcggcagggtattcatctagttatcttcgttattacctccgtctcatataaattgtaattctaggttatttaatatatattaaggtttgagaataaagactataattttcttattaaatggtgcataggtaagagcgaaagggtagttgaaggtaaaatatgaagaaatttgaatgaggagtgattaataggaccattagtactttattgcgacaattattttgggacaaatttaaaccctataaatacaattattatgggacagaagtagtatcttttaagctcttgcttaatactatgtctttaactctagctatttgaaatgtggttgcgttgatttagggtgtgtttagttcgcgaaaagaaaatttttgggtgtcacatcgaacatctgaccggatgtcggaaggagttttcagacacgaatgaaaaaactaatttcataaatcgcctggaaaccgcaagacgaatttattaagcctaattaatccatcattagcacatgtgggttattgtagcacttatggctaattatggactaattatgctcaaaagattcgtctcgcgatttccatgcaaactgtgcaattatttttttatatctatatttaatgctccatacatgtgtccaaagattcgatgttatgtttttgggtaaagttttttttggaagctttagtgtactgaccggccgttgtgtgtgttcttgacaaggaaaagtatcaattagcacttgtgttagtgacagagtgacaatgacaagttaacgtcagcatccatggcattgatatagaacagagatttttatttttgttaattttactcttttagtttctgacatgaagcaaattgtccactcgtgccacgtttccacgccatcgttctagtgaaattacatgagcaatgccgttcacgtatagttgtcatcacaaattcacgattaattaggaacactgatgctgatgtgtataacaaaattaaccgcctaaccagccatctgcttaaccaaagaatgattaattaaccaagtagtcgctcccttctagaatgatgacgttttagaatgcaatgtattttgatcccaaaatcttagattaataaataaacaaataaatgtcaaaaaaataaataaatatttactatgtgaaagtgatactaagtagatttttggtaccaaaataatttcattgtcattatttttaatatgttattagaaataacaatgattaaatatgtatatcagagactacttacatgtcctaaacatcataagaacgaaaaatgttaattaattggtagaatcggtgggcgcaaatgcatgctaattgattataccatatatctcccctgcactttactcatccataaaattaatatgacatgtgtgcatgagtgcatcgttgttttttttctttcttctatttttctaaaagcacagtagaaatgcaaactatcacagcgtgcgtatgcttatacttatgaatacacgtatgcacctctaattcaatgagtatcttataaaaactgaaccgtaccgttatatgttaagattcacgagatcaccatagacgcatcgttgtcgagttatgtcatctactattgaaagaataattttggtgactcgtattaaacaacaagtaactttgggatgaacgcattgcgtgcatttatatacagtcattgagtctaccagtttttccttaaaaaaaagggaaatttacgcacatatataattcgatcacgattaaccgtgataaagctagcccctcaagctttactttagatgataaagctagcccctcatgtttagtttaattacctgatgtcggttaacctaaccgtcatcgacatgtcaaccatagaaaaaaaagggagaatttgaatcacatccagaggacagacctgttgacaaaatgaccaatactccctcgattccaaaatataaggcacaaccatccttaacccaaagaccaaaaaataattattatcatcttatagtttagatcatcctaataaatataatgcatgcatccaatagaattagatagcatgagagtggaggatttaaaaaagtaataatttaggccctgtttgattcagcttaggattattataatttagcttattaggagtaagctgaaacaaacaagtagattattatagcatattattataatctaataagctgctctagaggagcttttttcagattattgagtggctaaagacccactacccctacatacttgagaaaaattaaccacctatgccatcaaccgaacagatagctgagggcattatagactttatcctttcaaacccaataatccatgcctccaataatccagacaaacaaacaactcacagcttattataatctagtttatagtaatctggcttaataatctagattataataatcataagctgaaacaaataggaccttaatagataagatgtcatagttaattaattgcatgcttgcatgtatgccttaatattacggaacatctaagaaaaatggtcgtttcttgtattatggtattatggaatggagggagtaatcgcacgtaatgcctgccgactcaccgtaatatgaggctgagaagttgattgcagaccatctagtgcaatcaatggcgctcgctttcggtgattgttccaaattaattacggagtaattagcacaacacggctcgccgcccttgccatcccatttaggcacatggacagagttgaaatgtgttgagagctaggctagctagctgattttttcggttatcaaattgagatattcaatctagtctctgaattgactgatatcaaagtttaaaatctttaactatagataaattttaaaatgtttgtattagaaatattggtctcaaaaggtacttcaaaaatcacatttttattgataacaataatcctatatatatattataataaaaaatagtgatcagagttattttttaggccgtgtctttatttaaaacgataagtattattaacccggaaggagtgtatctgatggtattccaaactgattaagactatcgaattagttaccatggtattggttagaaaaaggaacatgcatcgaaaaactaaaaaccaagataccgctatcactttttggggaaaatgtgtaggagcgtccattttcagattcaactatatttttcaagttttcattacatacatgattttcactacgtattttcttcacttgaggttcatacaacagtgatagtggcaacaataatgctggtcgagaaaaactggtaagcatattccctgagctgagtttgaatcggcttttccagcgatcgttttctgtaacatactttttaaaacactttttatatagatttttctcaaaaaagataaattattttttttaatttataatagttcattttcaattaatcgtatactaattgctcatctgttttgcatgcctggaaaagtgtaaccatactgcccaatcgaatgaagtctttagctttgttgtttattcttttatgctcgacagattaaaaaagctacgcacctacatatcatgtattcatgtgtatacagcagattacgaagacggcatgagttcagttctcttaatttgccggattagctggtcgataaccatgtcattatcttggtccccaaggaactatttgtttactaatgagattgatagttgagccatctcaatttaaaaatatagtacttattagacctttggtaaggagtatattaaggggatgagatatttttcaatataaattatgaacaagaaaaaggtatatatagcaaaaaagtaataaaataataaccagatcatacatctagccattaatatctgctagtaccgtagaagaactcatatgaggagtaatcaatagcatgtaagagctctcatattaacttggaaatttagtcgttgattagatgatcgtgttatcatgattatatgtccgtgagtatatttcacaaaactacatatattttgactaaactatcaaaaaactatatatttaaaaatatatatgtatcataaaactacagatatttagcaccaaatttatcataaaactacaggtttaaaacattgtatcacaaaattacagatcgatttagtgatgaagtcatcaaacaactatagattttagtgtttatacgatggcactatcgaggttacaaaagttgtagttttgtgataaaactgatcgatattaaatatgtagttttctaatatgaaaccttaaatctatagttttgtgatacatatccttaaatctacaggtttgtgatagattgatcaaagtccctatagtttagtgaaatttgcatgtattttccatgtgccacgtttaaaagcatatcttctactccctccgtcccataatataagggattttgagtttttacttgcaacgtttgaccactcgtcttatttaattttttttgaaattattgtttattttatttgtgacttactttattatctatagtactttaagcacaacttttcgttttttatatttgcaaaaaaaatttgaataagacgaactcaaaatcccttatattgtgggacggagggagtatatgttgtgagaactgagactccaaaataaatacattgactaaaactccaaatcaagtacaactcaatatttgttaattacaaatttcacaattatttagtcatgccaaatctctttaaccatttttaaacataaaaaataaaaagcattgcaacgcagaagttagcgagtagtatttataaacacgaataagagtatgaattgctacaatacatatagttacttcgcaattcttgttttagccgttgtactatggtatactaattgtaaatgtaggagctctcatattaactagaatgatttagctgttgcttagataattgtattacatgactgcagatctgtatttttcatgttccacattaaaaactcatctattgtgcatgttgtggtgattgagactccaaaccaggtataacttaatgtttgttgattacaaatttcacaattattaaatcatggaaaatctctgttaatatctttgacatcgctcagttatcatatttaactcccaagtcttaaacaaaccaacatgttattacaagaatgtctaatgtaacatcacattccaaagttaactaatgttaccacaatatggaaagacaattaaggttcaatgaggaagattagctaataactatactgcatcttccatcatccttctaaattctaagtagctgatcctcccatctctgtcctcatcgaaggtgtggatcatcctcatacagtcctcatacctttgcccttctttgaaccctagcctcctcatcacgctccacagttccgaggcacatatgaagccatcctcattgcgatcgaacacataaaaggcatccttaagctcaccctcgctcgccatcttcctatccaacagctcatccacggtagcatccatagggatgtcacacccttggcactccatggcggcctccccactcctttgccacctgaggcctaacctcgttgtgacagtcattgcatcaaagcatgacacccctcctccaagcaactgcgaagaaggaggagggtcgttgtccacgaccatagagttgataacactatcgtcatgcgctaagaaccttgcaattgcgctaaataaccttccaatcttattacttaccgaaatcacatctatgatcaatggtcccagtaccaacatcatgagggatgacaccagtggaattaggatgttgtgatccatcatcatcacccactatatatctttgtgtgaaatgcagcaaattgaacagcaatgaaatccagtgtaccttattgaagtgcttactcaaaggaacatctcaacttacatgcaaatagcctgtatatatagctgacatagatccttcaagatatccataaggtgagtctttgcatcatttcggagaaattcagaggaagatggatatgctattattgcctatctttattttttttctatctgtgtagatattggagatgacttcagacttaataaaaggttatggctgcaagctgtcgatgaaacttcctggaaattactcaaaacagctaggacacaaatggttttcgtaactatcaccaagaaggacaaggagatatatgaatattaatgccaaacaataaatggccacatcttttctagccttctagctgatatcaacctcccctctcccccctaggtaccattcgacagaaacccttgcgaaatttcggaagtaatcgcttattgatactcctttctgttataaaataggcttaaaatcaccatcaaaaaccaaacgcgaaaaaaattataggaaattcaaactaatgataacaccgagacacgatattttataacgaagttcatccgggacactgataacaggcgttcctccccgatctaggtttcgatcaaagtgacaacgaccctctacatgttgctgctggcagccgctccctctcgctatgctaagtcgacatgcggttacaacaggtgtgcctctctatttaaaagagatccgaggacataatctgactcttactctatttatagtatacaactccaagtcctaaactgtaaccgactacgtgcacatatttgtcacaaattaaactctaacactttctatcacgacaacatgttgtcttagacatgtatcaagttaaagttcaaaaacatcaaaatgaatattttttttgaaatatttaaattggataatttcttatgggtagatttaactcaaaagcacttttataatattacattaaatcatgtttttcaaatgttttagaaaataaattagcaatcaaagttgcatgttggagacttcttcaatatatagaacgacatgtggccccatcgtttcgctttcgtggaagaaaccaaacggcatgcttgcaaacaaaaagtaatttgtgaataaaacttttatatacgtgttcttagcattctaaaagtaaatgccgaaaaataaacttcgatgaaaaaaccacaagatcagttccaaatttaaggttgaaaattcaaattttggctgataagcttaagagaaaagatgaggccccttcttatgaccagcgcaaagtaacacacccgccaatggtgaacgtgactctgtgagcgatgacaactagattctatacatatatactactatattgaaacatatccgtggaaataacccttgtcttttcaatagaagtaacaatatcatgtttgtctatccaaaactaaagttgtagcacacatattatcttatcattgttgatcctttggccattaatagaagttgtatatccaacaattttcattttgataatataggtcatgccgtgcaaacagactgttttcggttcattgtcaccaaatggaacattaggaagaccactgaacttattttcagaatgaagacaagttcaacgaatagtgtttctttgaatttagaatatgtgtcatctagtaatactagtacactttattctgaatttctgatgccttgaacaagagcgcacacaccagctacatcgtgaaaagcaattagaatgtgatacggtcttagttaatcttccaagactagacacatgcaactcttagttactgttaaataggaaaaatgaaaaggtatgccatggtttatacaacctttttttagttaagaacttcttttcaagaaaatgactaacggctctctgtcattaacaacccgggtggttatagacattacagagaacctccacatgtcaacattgtgcttattaaacatgccagcatacaaattttccttacaactcctttttgaggatgaaatataggttagcatttttttatcataatcactctccaatgaagtccatttcattcaaacatacaatgccaccctttttttttttcctaaaaagtagtgtgcaatacaacttggcaaagcccaatgcttatatggctgttgagtgcacgtaaggttgatatatgccagcactcatcgcactgcctcttcgatgtgatcaatccttgctaggttaacactaataccacttttcaatttactagtcacagtcccctgcattacaaacaggagggtatttgatgaagatggttcaattttttctcttctcccatatttttctctcggttcggtagttttttggtataccagtttttaagagcggttgttttatacatgagattagggtgatgacaaccactattaaaatttaaaaatagtataccagtacagcaacaaccatttgcttaccgtttcagatctaatgttaccgacagttttgctactctacacctgtatggttttttgtcaattttttatccctacactagtgtaagaactacaggaaaggagaagaaatcccttgcatagttgtaatgttattactcggaaatgggccggccatcgatcagacttggtccaagtctttagcccaattccaacacccatatgtggttgtctcttcccaagttccaaacgtccagatagcccacaggatctggcaggttcagactttgacagttgacaaagttctgagacacttcattcgtcgacatcatcaatcaataactcctctaacctcaccgttttttttttgcctaccttgctgatttacacgtccctgtttactgtggtctgctcctcggctgagtctgtgaatttttgtgttgccggtgcgccggtcatgtaattagttaggctggttaattgggtaattagttgctgtgtttggggtttggatgccggtcactgtgatgcttgttcccggttggatggcgctttgtatggcgcgcggcatgtggccatttcttgttttggtccatttgtttcttctgttatttcagtttagcctctctgtcctgtactttgtgccatcgtgcttttctgtttagccccttacgctttttacaaattgaatgtgaagaagacaaaattctgttttgggggtgtgtttgtggttggtagttatgctgggtatgtacatgtgcttttgccctgttgacttttttgggtctttcttgttctctttggattggtgttgtctccccgtcgctggtggcttgctcgtgccggtggccgttgctgcttgtcatcttctgttcctgaatcggtcgaggttagtccatcttgcggatgtgctgttttcattctttgttgttgtactttgggggtgggggtgtgttgttcccctcccggtagtctcttcttcccctttgttgttcctgattctctgttggaggtgactcgatttggtggatttggggagagctgtttctcccccggttcagttactttttcctctgttgtgactgcttctttcggtttcttcttcaatgtgttcctttccagtgtgttcgctgaccggaggaggagccgacgatgatgggtgggatttgcgcgctggtggtcggggatgccgaggaggatgagacggagctctgcgcgatctgcgtccacgtcatggtgcccggacggccggacggccagtgcgcgtcctccccggatgtacccgcgccttccaccacgactacgtccaccggtggcgaaccatctcgccgcgctgcctcgtctgcaatgcgtgggtgacgcagcggtcgcagggacctaaccgtcgccgtcgcccgcccagcctgatctgagttcttggcatgtcggcgttcctactttccttataatggctcagctcttggctcttggtgaggtatagttctattcccgctgattgtcgtagtcggtttctaggctctgcacagtgctccttgccgatttcttgttttttttcttgcgattcttctatgggtctgcatgtaaattgacttgttcttgtatttggtggtagcaagcagtatggtatgcaggttttagcccttttctcaattttttgctgtttacttttttcctacatgtattttgtgcttgcaaattttcccaatgcgtcttgcttaccctttccatgtgttgggtcttgtaaaaaatttcccttttcatgaggcccttgtgtaggaaaaattgccctctttgctgttgtgtgcgatattttattttattttttaaacattgttctagtgttacagttttacatagttagtaaaaagggtaccgttgttcggaaggggtaaaaataactatgggtcaacacacatatggtcatatttatgggacctgcccaattcccgtttgtaagcggcatccccccctctttgggtgatgtaggttgctgtgattgctggtaacttttcaagtgtatttgtcaagtggtcttaatttgttattactgctaccgtatgtatttatgcggttgtcattaccctgccttttttgttgattgagctgatgtttcttgtcgaccttgctgtccggttgtcctgcctgtgggctgattcgttgctgcgtgcgttgtcttctttgaaggcagggtatttactgggggtgattcatgtgcgtgtcgacctcctgtggtatttactgtcctcacaggttgtgctggcgagttaattcactgtttattggtgtaggtgtcggcttgcatgtctattgtttgttgtatgcgtgtccatgcccttgcttgctgtcccttcttgcccctctcctttatatggttactctgtgcatcagtgcttgctcttctgttttcctttctacgaccggttcgttatttgtttcttctttgttcttttttttccctcccgacgcttgctctgttctttcatttatattgtgttaatgttgtactgatcgtacgcctccttgtttctgtaaaattatgatatccatgttcttacttgtgaaatcttattaggcactgggtatacttacttggtcgtattggtttatgctgtctgtatcatctgctagagctcgtcgtgccgcaatccttcgtggtaggagttcttcctcacggccagcatgtgaatcaacacgatcaacaggtaattgccttttccttcgttactatattcatttttactccccttttgcccgaaatgtaaacgtcacttctctagatttgaatttgtctttgtcctttgcttttggaaagtttgattatgttaccttttttttagctacctcgttcaattctggcccttcgtaccagtctttggtcattcggaggaaaaggaaattggcaatcttgcgtcgccggttgtttgcttcaccaggttggttctttagccgtgtttagttgcaaaatttttcttcaaacttccaacttttccatcacatcaaaactttcctacacacaaacttccaacttttccgtcacatcgtttcaatttcaaacaaacttctaattttggcgtgaactaaacacaccctaagggtccaggcaatgaattgcttaagacccctgtactgtagctctatttatccgtacacagtactgcacatgaatagatgattgcctctgttttttttttggtcgaatgctcaggaggccagtaatacaatatgcttttagatttttttctggaaaatattctcattgtttgcgataagtcttataagctgacaaataaatgaagcaatcaaaattgatattagggtaagttcttatacttctataaagattaaggccagaaaatagagagggatcttagattttgtcacagatgatatgatacttcaccctgtgtgacattttcaactgaggagttgtaaagaatatctgcaacaataatttggaagtgaatcatgacaagtattcttcatataatttactagcatgattctatttctttttgcaagagatcaatgctgctattaaattcagtcaagagtgtatcattacctttctaacattaatattgcccttggatcataaggccacaccatgaatgcctgcacttttggtctttgaaaatatatttgtattgttttgagggtgaagctagctatggagcaacatgcacagattagaaaaaatgtaaaagtgcttgggaagacatgttgaatactgagcatgcagatgcaggtaatcgaaagaaaagttgaaatggatatattatgcttcctaaggtattaagaaaacatctgttttgttctaacccatgtatgccctatgtcagtgacattctgaaagagcatttggctatatacgattcaaaaaaaaaaagatgctaccgaatttttttggtgcaaacatgcttacatgcttgaagagcgaaccatttgcatcttgcagctgcgctgaagtggtttgaacatgtttgcagacaaaattgtggtttgtaatgagctcttcccacttgtaatcctttatggtggagaagaatgccaatcagagcatccacctaaatgaacacccatttgaaagtgtttgtcctttttgttaataaaaattatagcccaattcacttttttatcgttcatctttgttggtgtattgtcttctattaagccacttaatgacttaatggattcgcaaggacgacttatacttcattgtactctgtttattaaacaaatgtagaccatatttatcaaaatatgtatctactatctaatcattttatgtagaactatttgccatcgcgcgcggcgtggcgccgcgctctcctttctagtaaaagatcaaggaccatttctttctttcctccaacgacttcaacaatggaatatgttctggcttctacaccacataagagcaggtataatagcatgctgtaagtcagctgtaaacatattttaaagagataaataaggagagagaagagcagcgggctatagatttgtagccagctatagcacggacttcaagacgcagtgtgtgtatgacagatgggaccagatattaatagtatagtatataactattgtatgaataagcttttagattgactataaatgaattggagctagtagttggctacgctattgaacttgctctgagtttctggcaagacggtcaatctgggaagaggaaaagaactgcagcttacctacaaaacatgcctttctctgaagaatcatagcttcctgaactttctctgaaagcaattgctcttttcatttcatcactctttgcaaattagtaattgctcggtgcaggaggaattaccatatgccagcctgacagaaagggcctttatgaccaggacatctaaagaaatcaatcctgcaatggttcagctgctgcatacaactgattcacctgatgaagagatagatatcaggtatcctttgctgcaaaacaaacgatatactactagtataaggccgagtttagtccctttgaattaaggatttatattagaatttcataggattcaaatcctataggaatttttttctatttggccatttgatttaaaggattgaagttttcaaatcctatgaaattcttatggaatgacacattgcatatgggttttggaggaaatttagcaagagctcaaacctcttggaaaatttcctttgagtttatttctctcatccgattcctgtatttttcacgcgctctaatcaaacgaccattcctgtgttttgcaatcctctgttttacacttcaattcctatcagaatcctatgtttttcctattcctccattatttcaatcatgcgattcaaaggggcccttagttgcaaattttttcttcaaacttccaacttttccatcacatcaaaactttcctacacacacaaacttccaacttttccgtctcattgtttcaatttcaaccaaacttttaattttgacgtgaactaaacacaccctaagctatcatgtgacctgctggttcactgaggcagatatcagctgacagcataaggcctctcacagtgcaagctatggggcccgtacccctagtccaaaaatttggcccaaagacatctatcccacagtgtaagcacccttagttgtgttgtttaattggatgaaggtactgtgtaaataaaccgagcccacagtggggcgttaccctgccgcgtggtcacgggagaggaacgaaattaatttactcacctacccttccagcgacttctcctcgcgctcccctccatcgcccttcgccgccttgtagtccgccgcacccgccgctcctccttcccttccaccaccaggctccgctccagccgctcgtactccccgtcagccgcggcgctctgctctctctctctctctctctctctctctctctctctctctctctctcacctgttccaccggcgctggcgtcgggcccctcctctctcggcggcgacgaggaggtggagcgaggaggacggcggtggtggcgcggatctggagcggcccgagcttcgcccgtcccgggcgccgccttgctcgccccggctgccgcgtcgtcgaggactaggagctccgtggtgatggcgctcatctccaccttctagaagaaccggcggcgcgaatctggagccccgaggacgcagccacctcctctctctgccgacgacgaggagacggagcgtggtggtggtggtcgccgccacgatctgttattttgcttcttttttctttttcatcttgtggtggcaacaatagtgtttcttgaatccatattcttgagttcttccaatccccaagatcctctgccacatttttgcttgctgaatttgaggattatgcttgggcgggagaggatttaggagggtgaatcgggtatttcgctaggaggattgagtgcgaggtcacgggtcggcgaagcaacgctacccacagcgcgcgttccttccgttttctcctccgcccgtggactcgcgagagcgaggtttcacgcgtctctgcttgggggcgaggagctcagttggggcgcgcttcctcgctccacgcaagtgcacatccgagctggcgaggtggagcaccggtccacgtaggtgcactgtgagaggccttaaccaccatatgcaacaggtctctatcatttcaacctcagcagatgactggagctactgccatgatgattacaggatgcattatgtagccattaatattacggaaaagcaaacggcagagtgcaggactggtatgcgaagcccaggaagatcatgcaatgcaaccatatgcacggcattctacatttggtaaagttctcttaagagtaaattgcacccacggtgtaacaacttggcaggtgggtgtaatttaatgtaataacttgaaaaataagcgttctagcgcaacaacttggcaagaaggtgcaatttagtatcagaactttataagtgatcatataaatgcaacaacttgcaaggtaggtacgattttgatacaataaattaagaagttgtgacaacttaattatttggagcatttttatataaattcaaatttttaagtacttgacaatatactagcgtggatttgtataaacatatttatatttttatcctaataactaataactctaataactaataactgaaagtcaattaaactagatgtagaaattattatatttcggttgatatttgagaagatgaagaaaacaaaaaattcttaaaggtaactgaatgtaaattgtaagtgcaatataattcttaaagattaaattcagtattataaggtaatatccataggattactgtgtattggcatattgatatcgtgaaaaacctcacttagcatatgcttagccaaattgattcaccgaaatactaaattgtcaagttcttgtactaaaacgcacccacttgtcaagttgttgcactcggacgttcaattctcatgttcttgcactatatctcacccatctgccaagttgttgtaccgtgggtgcaatttattcttttcttaaacaggagaaacaactacactacaagaacatactaaggccgtgtttagttccattcccaaaattttttttacgtatacggacacacatttgaagtattaaacgcagtctaataacaaaacaatttacataatccgcctgtaaactgcgagacgaatttattaagtctaattaatccgtcattagcaaatgttactgtagcaccacattgtcaaatcatgacgtaattaggcttaaaagattcgtctcgcaatttacatgcaaactgtgcaattgtttttttcgtccacgtttaatgctccatgcatgtgtccaaatatttgatatgacggaatttttagaagtttgaagggaactaaacacatctaacacgggtccagccttctcgtaattcagatgctacgctaaatactagttattccaataaagtttggtacaatgccaacgatttttgcaataagtaccctcttttgcattctcatcctgactagtttggttcagacttgacaattgacaaaaccggatcactattcacctttctaatctaacacagcctatagggttcatttcgtcctaaccctttttgttcgtttccattcacctaaattcatctgtttacagttttcacgcccgacaaatttggaccaagtttgagaagtttcacaacttaggtagcaaacgactctttggtgttacttattagtgtcgataagaagacgaacaaaacattgcatcgcctgaattggatcggttgggagaagtaaacggccttaacgacgatcacaaggatgcattgctctcaacccaaatgtatagcactgattaaattcagttcaattcaaccacagttaaaaatttactcatgaacatttcgacaaaaaaaaactcaagaacaaacgaaatttacaattcgcttttctcctttaccgattcagagatgagcagcttgtcaaaaataacaatgtgaagttataaacatttaccgattcagagatgagcaacttgtaaaaaataacaatatgaagttataaacagtgaccaaaacgccacatggcgaagaagatgtcaacctagtgctaaaactgccttgatagattgtagtaagagaccaagtgactacagaactagagtagtagctgcatcctcatagcagccgaggaaacaagcaattcgcaggactgaaaactggactgccccgtgcggaagaacacctcaaatgtcagaacatctcaaatgtgtaaaccaatctgagaaaccgaaaggttcgaccgcttcttcaaccacccagctcaagtggctgaccaaaaaaaatgctcaaatggcaccaagaatcccgcagaagttcaagaatgcactgcaacaactgcgatcattaccacagtattttgctgaatgcccctactaagaaaaccctccagtctgcgacataagttctgtacaaatgattatgattcaactataacgatggcctgcagaaggttcccggtattcttatgctggcaacataagttctgtctataacttgagtcagattaagagttcaggggtcttcttagcccagcttccacctgtgaaaaggaaaatgtcaaaataatgtcccaagagtaaatgtgattgcaataatcttttgcataaatacatcaacatagcattcatgaagtactactaagtacactgatgccaattggtagaaagttattccgtcaacatgattcagcaaggattactgaagtgtcagccatgaattaagtatgatacccattccacattctgacagatttatcaactaaaatccgagaactggaaagtgtggtcctccaactgcacatgaccagatatccaaaatcaactaaaatcaatagaggcatcagggacccatatcatcataggccataattatggcttcgtaccaacataatgggtgctcatgataaattgtatttaagacatgtagaaccttcatcaatttgcagaatcaaacccaacttaaatgagacagaaaatgttcttcctaaggacattagaaagccagggttttcgacataaatgatgggattgtagaagtctaagaatgtgttaattacattatgattaaaaatcagacatagacttacatcattggccacaaaagatctactggcaaaagatttaagtcgtggagattgacccgcagatgttgatccactatcattactaccactttgtttatcaccctgcagacagagaagtcgacatgaatctaaatatggtagacttcaagaattgatgacacagacaaagacatatacttgaagcactgaaacttttaaaacatttaattttgtggtatgaaactaatatatttgtggtatgaaaattttatcgctagacatgatagaaattctctcatgatattataattcgaagttgtatatcaaagactgacaaataaaatatgtcaagtaaaaaagcagagtagtgcatatttaaacacctacacacaggaaaatattttaagaaaaaattaggagggaatacctgatgagtgcatgtgttgtttcggacatccgcgaaaagagaagaatagtaggcaggatcataaatagaaccacccaatatatcatcagccatggaatttcgtctaactgaacttgatcttgggctcaagaaactatttcttccatcatagtttacttcatgatatgttggggtgcttgatgaaacccccagcctatacatctggatccatatgaaggaagacaaaaaccttactgaaaacccaataatttgcatccacaacgctagtttgagtgataaaacgaaaagttgaccatacttctcttcaggagtaatattcctgtataaatataatattagattaaaactctgtacaatatcaaaatattctccctgtatcttaaaaaagaagtgtattggcaaatatttccatgtccatccaatagcaagcataacaacaaacttatgttttcaggttataagttgatgcaaggcatggaatactagaagcaaccaagcgccatcacacataaatccaaacaggtttcatcatacaaaggtacttccataacacacttaattccataacaaaataatgcaaaatctacactggcaagtggcctgataccagtgcaattgtcacaaaatgggaaaaagaaaatttgaaggattcccttaacttccaaaagaatttgaaactatttctcagcacaaataaatgacagaaacaagggaatcaagattggcacaacttgaactagaatgagctccaaaggatggtattaggatgtgtgtagcatggtttgcattttactacttttgccccatcacacaaaaattaaaacaggttatgaactataaaatatagtggttgattcattgcagaagacataccatatagcatgtgagaagagaataaaccaagcaacatcaagaacaatagcgaagaacagaaggactgcatatgtccgaccaagtgtctggctgctactctcaattgcaacaacagcaaagagcccaattaccaggttgatcacaagaacgccattgaacaatgctccaagtgacccaatcagcgcacaaccaatctgagaaaatactgagaaattaattatgcagatgaaaacttcagtcttcagtaattcagttttggtgtgcaaacccctatttcagcatgataagcattaaagcagcatgatagtagaaggaaccaaatgtaaaagcaatcagtgaagataagcatttagaatgttaaaccatgatgaccttggaaagaagatagtttttgcttggaatgagagattcagtgcagcatctacaggattaagtcgtattcggtcaaaagtaacttgctgctaacactgtaagcatcaagaagatgactgccgcaattaaaaaaaaaggaggcaaaacaaggacataatacaattatggaagtaacattaaataactcctagattgaagcagaaaattatatgttcattatttcctaaaatgctacctctaacatagaccaaaaatttactcaaatgctaaagttcgctttacatcataaactcataatagagcaaaactaattgctttgcaagacagccatgaagtcgtcagaatctactcaaacatagaaatattgcactagttcacatcaaaataaggtatatctcctctttttcaccatatttgccaaagcccacaatgtacaataccaaaatggaacaaactacaaaatctaagaaaaataatcattgatattggacccttcaaaccctattgtcaagtacaaaagctctctgatatcatttaggccttgtttggtttggaagggattggaggggtttgaggggggcataataggtgtggtacaaaccgaatatctcccttggggattaaccgaacatggccttagttggtcagagtaaagagtgcaaatataacaactataatctccacaagcattttgagagaagaaaaatcccaaaacgcggactaaaaatattgagtgagaagcaggtgagtaggtgatgcttttcctgaaacattggggattgaatctaacgagtggcaaggcccataatctgacaagcaggctacctcaccagaattggggaaattcgcagtcctagcaaaatgacggcattgaacttcacacttcaccccaaaatcagatcgaactgaaactacacacttctcctctctttcttcgtttgattcacgcagaagaacgaaagcctaaacctcattgaaccaaacaccccaattcgccaacacaatccagacgccgcgagcaccaaccacaaatacaaattcggcgctgccattacgccctaacgccgcccgcggcagttgcctctaatagataggtgccacaaaacctagggcacgcgctcaaactctctcgcctctcggttcgcaaaaacaacaagcgatctcgtcccgggggaggcgccgatccggtagatgagggggggaatgcgcgcacctggaggtagatgagggcgagggcgagcgactggagcgcgtcgtagtcgcggaggaaggagcgcagccgcggcccgatcccgatcccgagcgccgccgggcaggggcagcagcagcagcaggagcgcatcccggcaccacgccgagcccggacatgcaaaacctcgcgggcggtggtgcgtttggggggtggcgcggctgcttcctcctcctcctcctcctcctcctccggcggtggcgagcggcgagcggcgtgatcggcggggaggattcgcggcgagggggaagggaggcgaggagatttcgcctgcttcggcttgccctccggcggccgatggttttttttattattattttttgggtgctttaattaattaattcggtgacggcgaaggaggggcaagaagacgtttgcgttgcgttgccagatttgtttgggaactaagggtgtgtttagggggtgtttagttggggaaaagtaaatttttgggtgtcacatcgaaagtttgaccagatgtcggaaggggttttcggacacgaatgaaaaaaataattttagaactcgcctggaaaccgtgagacgaatcttttgagactaattaagccgtcattagcacatgtaggaggttactgtagcacttatggctaatcacggactaattagttttaaaagattcgtctcgcgatttcctccataactgtgcaattagttttgctttttatctatatttaatgattcatgcatgtgtctaaaaattcgatgtgatgtttttgggaaaaaaattttgggaactaaacgggcccttagttggggaaaaggaaatttttgggtgtcacatcgaacgtttgaccggatgtcggaaggggtttttggacacaaatgaaaaaactaatttcagaactcacatgtaaaccgcgagacgaatcttttgagactaattaagccgtcattagcacatgtgggttactgtagcacttatggctaatcacggactaattaggcttaaaagattcatctctcgatttcccccataactgtgtaattagtttttctttttatttatatttaatgcttcatgcatgtgtccaaagattcgatgtgatgtttttggaaaaaagttttggggaactaaacgggccctaattcggtttgccttcgctttattagtggtttccaactgagagactgttggtgaaatgaaaatttttgggtgtcacattagacgtttgaccagatgttagaaaggatttttggacacgaatgaaaaaaactaatttcgtaactcgcctagaaaccgcgagacaaatcttttgagcctaattaagccatcattagcacatgtgggttactgtagcacttatggctcatcatagactaattaggctcaaaagattcgtctcacgatttacatgcaaactgtgcaattagtttttctttttatctatatttaatgctccatatatgtgtccaaatattcgatgtgatatttttgcgaaaagtttttaggtaactaaacaaggcctaactaaactggatgaatacccccttgctgcagaaaattaagttactgtacataatatatataaataatatgtaatttgattatcaaaaataaaacaatttgatataattttaagcctaaaaataattgagattgcatgtttttaagagagagaaagaagagacaatttagaccatagatatatcatctaaaggttagaaataattgagttgatgtgacttaataagagaagagagaaataacattaactatacttagtgaggatgaactatataagtatatataagtatataagtatatagaattagggtttgcgaagccatggttccgatgcatcactacatcacctcatcgagtgctacctccgtttttttaaatatatgatgttgttgaatttttgtaaatgttttcattttattcaaaatattttacaaatataaaaatattatttaagttatacttaaacaatatttgatgataaattaagtcataataaaataaatgataattacatataatttatgaataaaaaaatggtcaaacgtgtcttaaaaatcaatggcaccatatattaaataaatagagggagtaatacatatgaaccagggctaaaaccagcggccccatcgtttggcacgaggaaaaagcgaaacgatatacttgcaaattaaaaaaaaatatgaataaaatttttatatacgtgttcttatatcgatataaaagtaaaggctgaaaaataaactacaataaaaaaatcctaaaattaacttcaaatttatgtttgaaaattcaaattttggctgataagcccaaacaaaaagacgaggctacaatacattcatatactactagccaggataaatgtcgacttggaggtagcgatgatgttatatagcgcgatcgctagtacgcgcgcactcgccggcggcgtgcgtttcaggcccacaaggcctagcgccggcacgcacgcgcctccttccacgctttttttttcgttttctttaccgattttttttgttttttcccacttttttatgattattttttaatctttagcatgctttgagtttgaaagttttaaatttttgagttgaaaatttttaaatctgaacttgaaagttttcaaatttttcaaatctggattttaaagttttcgaatcttgagttgaaagttttcgaatcttaagttgaaagttttcgaatctgagttgaaagttttcaaagtttaactttaaaatttaaatattaaatcaaattttttcaaatctgacttaaaaatttttaatctgttagtaaaaaaatctcccgaaaaaagaaacaaaatcttgagaatcttccctaattagttattagtgttaagtgttaactaatactatagagtagttatagtattagtagttatagggaagtgctcgctgctggcgcgcgcgcgccagctagtagcccccgttatataggaatacactggtcctacctctttttctttttactcttgtcccactcaaaatggtttcatcatagattctatgatcatccaaagaactgattttacttagagggcaatgcacaattgataataagtagtaactcagttaggcagaataactagaagtaggaatcaaggttttttttttatttatatacgatactaaggcaacgggcaatatgttgtaaaaccttcctagtggtaatcttatcagcagagaaatgtgccaactctttattaaaattagggtgcataatttattttgtgtacaataaagtcattgtcgtctaattcccattataactcaattatacaatttatggtagtatttctatatatactgtatatctacgggcctaattggcgacagaagtatgtacacgcgtaagcactaaataaagccgtattgccaatggtcctgctggcagcttaacacgcattacagcgtgactaatctgacgctagctagtccaacttctcgaaccttgattaaaaaaacacttaacttctcaactaattcacttgcaggattcgacaataatattcaatctaatcgaacagcacagctgtgtgaccatgtcatcatcatcgataaaagttgcctaaggatggttagtgactagctaggcaactttgtagttatagtggttataataagagttgtttagaacaatagactatcttagaaaggaatttagtaggattagacagagaaatggctgtaggcaggggtcattgagcctagagaattttagagaatttttagagaatttttaactaaatattagtggcttttcgttgtaattttctgtcatatgtgggactcaagcttaagctgccctgtacactgcgtgcatctttagttggtgtagagatcaaaacttataatttctttgtaaaagagaagatatattagatacgaggttatttttctctatgagcgcctttggatatcgtacaaatgctcattataaattgaattttcattacggataaagttcattggaggaaactaaaacatcattgcccccaccccatcccaccccaaaagaagaaacattatgtcaaatctcatggggaagttttctcaaaagttcaaggcagtctcgctctctctatatggcaagtctagtgagccatacttaaattagtttatcaacctatatgttttagttttctttcttttgtttagattcactaatatttatacacgcatatgaaacacatagatgagtccatatatggctctatttaataccaaaaacaccttaaagaatgtacagtgaaattttttggaatacccaacagacattcaaaggagcaaatgcaccaatgatatcatccactaaaagacatgagacctaccctgtaggcagggccagccctgggcctaggccggttgtgcaactgcctagccccagggccgtgctagggagagcgaggcgctgctttgtctccgcgagatcgaatgccctgtctgagtcgccctaactccaactccacgtctccacctcgcctaaccacctccacgagaccgcgataggccgacagcatcacaacggcacgtcgagtcgcccactcgccttgcctgcctagcgcctgaaccctgaagcctgaagggtgaaccgctgattcctgaagctgaagtactgaactgctgaaggtggtgctaatcaattagttcaatatatatcaattttcatcatttcaattaatggttattgttgtataatttactagaatttcactatttcagatgttacaatgttacctaacaaatatttgtcgggtgctcagtaaagaaacaaaagaaagtgagaagatcaattaattgatctcttattaaggtatttatagtactttgtttccatggtgttttttaattatcaattatattatcgttattatttatcgagaataaattactatattgcaacttgcaaactgattgatttatgagcaattttatagtctttgaggaggtaccaaactttacactaaatttttgatacctcatggtacctcctcaagaattatataattgctcttgatttattatttatcatattagaaatgtttatttctgttatagtatatgtgtttcataaagtatatattagaagtaaaaaaatagccttaacttgtcaagggcccatgctaccaacctcgtatagggccctcgaaattgttgaaccggccctacctgtaggagtaaacccatcacgaatttttcactttcttgtcagtttccctagaagaacaatttctatgggtatttttctgagggtcgaacataaaaaaaaatccactgtcgtcaggtttttttcaccaaaattctgacgtggaactgcaaacgtgaatggtggttgcaaaataatgttagataccagttttagaaaaaaaaagtaattaacaggccagttattatggcactcccaacccataacactagacatggttttcataaactccacatcatcaagaaactagtactagacgctactcttccaatgcaaacaccactattacatacttcaatttaatgctacttatctcacatgatgtcttggatgttgtgtagaacccatgtctcatgcaagatatggtttccttccctttcctcatttattcacttgccacatcattttttatcctatgtagcaacttatttaatgctatggacaccatcctagtcattgggtttgaaatgcccttagtggttaccgggcaaatgtttgaatccgaaatcttaaacctatatttttttttctgtgcaaaatgcatgcatttgggtaggaggaatccttcacgacaattaaaacaggtgattttattaagcacaaaccaaaaacaactcttttccatccactagattaggatcactctatatgcccccaatcccccgttaggtttcttgccgtgggatctattcacttaggttcaagtctatcacactgcacgatgctcatatctatgcctatttattcttttagtagagactatgttcttaatactccatccgttttaaaatatttaacaccgttaactttttagtacatatttgaccgttcgtcttattcaaaaaatttgtgaaatatgtaaaattatatgtgtacatgaaagtatatttaacaataaattaaattgtatgaaaagaataaataattacttaatttttttaataagacgaatagtcaaacacgtaataaaaagtcaacggtgtcaaacattttgaaacggagggagtatataccaagcaaaagtcttttagagatgtttacaagaataagatgtgtgtttgagtgtatcttcatacggatgagtgtacttccaagatcggttttgcaatctcccaaggaaatattactcccaataacaaattgcagaccagagatgaaaaacattttcccattatctaacattatacataattgcaacaaaactctaatagttaaaactagagctgttaaattaagtttcaaccattctaaaggtaggaagtaagagtaagtttcaaatcaaatacggaaattgaacagtttctcagataatctcttgagtatatattctagctttgatccgagccattcgtctcagatcggacggtcaggaaacgtccatgcagtttctcttcaaatatagtagccgccaaaaaagctgggaatctccagctcgtccagcccgcgaagcacctcgtcgtagtcaaaccagtcaacatcttccggcgccgcgccggagacctcgccggagaagccaccatgctgccggtggtgatcatgatcctcgccgccgtgttgctcgagcaatggcggcaccggcgagtcctccgtcttctgcccttctccctcgacagtggcgccattgccgtcgcccaccagctgttcgagctccggcccggtagtgacggtatcctcgccggagacggagaagtcgacggcggtttggtcggcgctctcaggctcagggcctgcgtgcgccgccgcgctctcggcggagtgcgcgtgctgtggcggcggcggcggcggcggcggcagcaggatgaacgacggcatcacgacgtagcggcgctcgcgctcgccgcggagcgcgctctcccatatggaggactcgagctcggtcagcctggagcggccggccgcggcggcgaggcggccgaagtccggcgcgacgtgcctcacgacggcgacgagcacggccaccttctcggccttcgcgaggcggcgcgggctcgcgaacggcacgggcgtcgccatccgcctcccgcgcaggtgcgccgccacctcggtgccccaccacggctcctccgccgtcggccaccacggcggcggcggcggcggcgtggcgccgctcttcctgtcccgccgcgccaccagcggcggcgtgcactcctgcgccatctccctcatcatgcgctccagcgtgccgttgcggagcctgcagagcgcggcggcgagcgggacgccgccgccggccaccggcgccattggcatcgccacgtagcagagaagctgcgcttgcatggtcaccggcgacagcatcaacggcgcgacgccaaccatgggcatggccgccaccgcattgcgcgccacgccgtgggtctgggagagctcgtcgccgggagcgcgtcgccggcgcttggcatgctgctggtggctcgaggtcgaggaggaagaaaccctcttgccgctcgaactgctggccattggtacagtgcttgattaatcctgaatggacacatgatttaagtttcaattattaataataatttgctttattaccagagcaaattaacaagcaatattgatggaaaaaacttgccctgtcaaaataaaatgatcaaaatgtaagaaagggtgaggcatagtatattttgatgtctgaaatgatctccttttaatagaatccgttcagcattttggaaaactaattcaattctcttcctcttagagtttctcgatatgataagaatgtttgatcttatcatatattttgatgtaatctggcacaatccgtactttcttctgcatagagttcttttcagcaactcgtaataacaattttatcatttttcgtcagggtatgcttttttatcatttttcgtcagggtatgcttttcgaacgtttaaacaatttatcaacatggaaactgaaatttttgtcaataatctcataaagaaaataaatagctggtttcctgccaaaaataacaggagggagaactttacaggctaattaactaagggtctatttgggagctttggcattaggctatattcttcgtcaagggttgggaacccttcccgaaaatgaagcaacagattagcatgtgattaattaagtattaacttaaaatttttttaaaaatagattaatttgatttttaaggaaacttttgtatagattttttttaaaaaaaaacataccgtttagtagttcataaagtatgcacatgaaaaacgaggaagtagaggttgggataagagacttttgaataaagccttacgattctaagaagtcgtttgagggcctaagacatatatagatagatgccaacagttttttttttttgaaattttcgcaggggggagagattccccacgtgaatttcattaaactggaaggggacaggaagaagttcgaattacaaatttagagatcacagggaggaagagaacaattctttccacgaggaaattacaattctttcgcagttatcatgtatacaacttttatcgccaactgtaagcatctggtgcagtcatagaaaaaaaatgtgtagtttcctacccaaaatacaaattattacttcatccgtttcacaatgtaagtcattctagcatttcccatattcatattaatgttaatgaatctagacatatatctatctagattaattaacatcaatataaacgtgaaaaatgctagaatgacttacattgtgaaacggagggagtatcagctatgggacattctatttccagagccagcgcgtccaatgtgaaatggtttggttggacaggtccgatgccacaaaaggatatgtgtttttagaccgagcgtgtgtattgcaagccacacaccatgttgtcatcacaagataacttttacgcacaattatattgtaatcataacctgactcctaaaacatgtttgcgatgactgatgaacatgaaaattatttgttcaaaacttctcttgaaagggttattttatatggttttgcatagtttagagatatctggtcttttatttcggtaaagtcgaccaacagcatagtctaccatatcttttctagcatctaacatttgagaagctcatataaagcaacatatatatagttcattttcttagtgttttaaatcatgtttttgcactccgtgtttttctacattcatggtttctatgtaaaagaatatgtacttgctgaaaaggcttgaaactgtacataaggtcccaatgataggattaactagcaaacaaagttaaaaaatcggcagattttaggagaaaagccattttcaaatgtaaccaaaatcttaacttcatcatagacaaacactactcaaatctttagacaacctcatacctaattacctagaatgcatgaactatttactcgaagtgaaaatcttaacacaaaagatgaataaattgtgtaccttcaagatgatcactcagctgccatcttttcattagagaccaacagccgctttgttagtcttgaagacatagcactcggcatctggaaaacttgtagtcaggtgaacgatggtaatggtcactgtagtcctatatatagggaagagggatgcaatatgagttggaaacagaaaccatggattggtacagttcttccatatatagaagatgaccacgaatgccactatatgcaataattacttgcgaaaacgtatttgatatttccaattttaaatatcccaaagttttacatttgataatgccatggtggcaacatttagagagagggtaggcacatcggtgtcggcttgcaaggggaatgttgaatagttccacattggttgtcaaagggcaagtgacactactggaaaactgatctttgctaggtcgtcccaaaaccacaatagtcccagttataaaaagaatcgggatctttagtcccggtttaaaaccccatagccattctacgatctttagtcccagttggtaacaccaaccagttcatcccctgtcagtcccttgtcagaggggcggggatctttagtcccggttggtgtcacaaaccgggactaaagatcaccattttatcccggttggtaagtaaagatcctagatatttactcccggttggtattaccaaccgtgactaaaatcacgcatagtatataatccttattccctatcctctccgccacaaccggcctcaatctcctcaacaaccggcctctcctctcctcagatccatctccctctcctcctccccctcctcccatcccggccctctcctccccctcctcccttcccatccgatgcccagcgagggccgcctcctccccctcctgccttcccgcacgcgtcaggcggggccacgcccggcggggccgcacgcaggccgcgcacgggccgagtagcgagcggcggcaggaggcactaccagcatccattcttttttttctttttttttacaatttgtgattcactgagatgtataattttgtaatttgttgtatggatctgagatgtataatatgtgatgtatttgatttgtgtgtaatttttttaaaatttgtgatgtatttgatttgtgtgtacaagtaacttaagatttgtgatgtgaatgttttgggatgttactttgatttggggtttgatttgggaatatgcatcccactcgatttgggagaaaatatagggattaaactctggctaaaaaataatgaaaaaaaaagaaaaggagacctaatgggactgccgctaccctctctttagtcccggttggtgttaccaaccgggactaaagatcgatctttagtcccggttatttcacccaggactaaagatagcgatttttagtcccggattcgtagtcccggttggataaccgggactaaaggggggttatgaaccgggagtacaaagggtttctccaccagtgtgacctaatatataagtggtgggtggccctcacctcattggctatctttaggtgtggaaaaaaccctttaacatcctacaatttgtatcagagtcaagctagttcaacatctctagtccgatggacaagagtgtcaaggcctgatagaccgtgggtgcttgcagggctcgtataccagaaggaccattggtgtatggtgaaggaggtgaacggctgagagacaccaatgtgtaaaggggaagattgttgaatagtcccacatagggtatctctcgcctcattggtagcttttagggtgggaaaaacccattatgatcctgtacgtccactcgcggtccgaccgttagcctaaaaatagcttgataaagcttgtataagaaaaagatgttttcttcaaaaccaaccgttgaatcgagctcaaatctttacaaataaactagacaaactaaggaacaagttcgccgcatggattagcaaactaataaacggtttaagagaaaacactctcaagccaatcgtctcagaaatttcagcaaatctaaacaaaacataaaacgtaagcaaattcaaatctagcaagaaccaataaacgaaaccaccaatcgtcggtctggtcgttggaatttagaaaaacacgtctcgatgaaacagatgtgtttacaaagtgcatctaaagcactcatctcttaactcatgaactagaatcaaagcctcaaagcaaaccctaatttttctttccccaaaatcaatgtatcggctactaacctttacaggtactttggacccaagatgaagttactttggaagctaccaatccccctaaacaaacacatttcctgtggttagctataagagataggattcaaaccacaaaacatctaaaacaaaaaaaaaactgggagggatgtgagttttgtgagctctgagccactcaaaatgcacatgttattttagctgccctatggcatattttgtttggtgttttgctagagacagttttggttgggattttgttccaccatctttttatcatttttttctgtattgatgaaagttgatgatagctctaataatagtttgagatatattgatgtttctggcggcggtaatctggtagctatggctgaccagaaacgatatgatctttagagataagttgtttggcacgcctctaactataatctaccgtgtgatctctctaatgcaacagtggaagattctggggagataaaaggacggagtatttgacctcatcgttgcttgaggggacaaaagtttccacccgcaagaagtgggatgatttttttttcttcaaaagttgttgtcatttttattcccgctagtctagttgtttagaccctttgagatgtgttgtttatggttttaacatctttccttctctatttggcatgcgtaccttttatactgaaacaaagctaaaactataaagctggtctccccagcgaactaattatttttgctttctataaaagcagcgtaatgccttctatcaaaaaaaaagttgaaaagatgatgatgagaaacagcataaactttcaactaggtgaagtcagaaacttagaatcaaaataatgtcaataatcctgacacatagacttgttccgtaagagtgtgaatatagataaaaaaaacacccccttgtactcacgaccaataatgccattggaaactgtaagagatctcaaactgtagatagcacatgtggaatggctccatcgaatgaatttgagcagcttaccgggcagagatgaagatgacccaaggcgacatccatctccaggctgcaggcgctcttgatggtgaggcaagtatcgcggggccagcgacgactggagaatgcgcgtggatggccacgaggagctgcgccgcactcacagctctggtgaggtcttggggatgaaacgatggggacgagagtgaaagtataatatcgaagaccgtgtagaaaacttgcgtgcttcataatttgggatggagggagtattaactatgatctaaaatagcacactagctcttgatggtgaggcaaggtgttgatgcgaaaaacacacactggcctgggagatctgcttagctccagtgcaggtccaaaggttggtaagatgcgggcgtgccagtcagtttgatcctgcaactgataagatatacaaacagcagatcaataagccgatcggctgtcaagccgatggagcaattccagccgatgctgataccagccgatagcgatagggttttaagctatcggctatatgtttgatgtagagtcttaacacttgatataaataaaggcgatcggcttataatgataactaacaaaaatatagcaatataatccagtagagaccaatcggctaataatatgatataatagaacacaagtattgatccgaaggtcaaaatatacatcggctggagatccgatgtcataaaatccacaagattagatagatcaatgaaacatttgttgtcatcggctaaatccaacttatatgtttatgcaatccttataagccaatgcaacatccagataacttatcagctagcaccccgataaaacattagcatgaacctattggcttaacaagacttatattatcaacaacaatctagtggtcgaacctaaccgatgcagcacgagattgtatatgataatctaatactcgatgagccgatagatctgtctaacgtgatggatataacaaatctatttagagcaacattgtgattgtagagatatatcggctaagatagaagatcggacctaaccgagacagtcccaactaaaccgatgtgtctctaaacacaatgcaattaaagatagaattgagatatcaggtaggcaaatatatcaaccaaaccagagcgatccaagagatcgaagcgatgcagccttgaacaacaccaacgtaaccggtagattcaccagggccggcggaacgtaggacttaccccttcgccggagatcgaactgaatcgatgcagccccgcgtcaggtgccaaattccgccggttgataagtaaaacctcaggaatgagggtggcgatgcgccgagagtagttgtattgatcgagagattgattagaatgaccctgggtatacatatttatacccatagggagatactagtccttgtaagacaagaaagaaactttcctaaagataaaaggaaaacataaagtccttattggacactaaacacactttcctaaagataaaaggaaactaacaaactattcctaattaatagataacttgtcataccgcatcctcattgaactcggattcttctggataaattttctttaattgatccgactccaccaagaacacaactgctggcgatttaacgactcccatcggccgattctaaaactctaaaaccgatactgactctaggccaatgatgacttcgggcttaccaaattttggcgttaacacaaggatcccggggccagcgacgactggagaacacacgtggatgccgacgaggagccgtgccgcactcacagctctggtgaggtcttggcctcttggggatgaaacgatggggatgagaatgtaagtataatatcgaagaccgtgtagaaaacatgcgtgcttcataatttaggatggatggagtattaattatgatctaaaatagcacactgatttgcatttgcctcgtcaaatgtttcttgattttgaatagaaacaatgtagtattaagtactcactctgtttcagattatattgactttagttaaagtcaaactgcttcgagtttatctaaatttatagataaatatagtaatatttacattaccaaaattagttttattaaattaataattaaatgtatttttataataaatttatcttagatcgaatatattattatttttttataaacttaatcaaacttaaaacagtttgactttgaccaaagtcaaaatatcttataacttgaaacgaagagagtattagtttaatgcttgtaaccagttcaaagaggtaatcacaaagtacatcatgtttagtccaaagattttgcatacaaattaacttctttacaccattcatttacatccattttggtcaaatgattacataatttaagtatacttaaaacaataaaatgtgtatttttttaaaaaaatatgtattcctaaaacaatggaatgtgctttttaaaattgattcggctcatatcgatgggagaggtttaggccctatttggggagctttagattctaagaagaaactgtttgagcttccgagaatctggaaaagctctgaaacccagcttctccagctttttagttcatttttcagaatcctttgaaaccctctgaaacccagcttctgaaacccagcttctctagcttctggcttcttggtttatttttcagaatctgaagctgtggactgtttggagcagcttctagcagaagcagcagcttttgggaaaagatgcagctgggaaaagctcccccaaacagggccttagcctcacatcgctcagaggtttagcattacaccacaagcatgtcctttcatgtcaattttgataccacttgggattccaaaataccaacttcaataatttttccctcaagctaaatactactccctccgtttcatccgtttcagattataagactttctagcattacccatattcatatagatgttattgaatctagacattatctatatgaatatgggtaatgctattatctatatgaatatagataatgctagaaagtcttacattgtgaaacggaggataattgacaagttccaagtaacatgtcgcggaaacatccatcatgctgtaaatccttgtgcaaaatgaacaggtacaaataatatccaaaagtacggaacattcaagtgaggtatcattacaaaaatattggactcgccgaagccacatgccttacaaaaacagattgaaacagtgcttcgtcctacatatgaatgagatacatgccatagctcctagtcagctccatgtcttaaaggtccacgtatcaagcatcaagcctacaagagcagaacagcgaagttgaaaaaaaaaagagtatacatagaactttgaaaaggcactatctgtgcaagcacagtaccagaataaagtctagtataacaattgaactgagaatgaatagttttgtaccttgctagcaatgttgctggacagccaatccaggccctcatacaaaccctcgccagttgtggcacaagtgctctggatgtacctgtcagaaagaagaccaggttgagatccagagtaccatgggaaaaagtgaagcagtgagtaacatgaataatggcaacatgatgtgttacaatcgaaacaaaggatagaaggaatttcccctagtctataatcagttatcattgagcatcacactatatctacagaaaggactaaaaagaaaagagcaaggatccaccagtaattcgtatttaccagtgacgctgacgaagggaatgtaatccaagcttatcagtaatctcagcagcattcatagcgtttggaagatcttgcttgttggcaaacacaagcaacacagcatcacgcaactcatcctgccataaatccaattaaatttcatcagatagggttgcagaaagttgttagcttatcaattggaatatgatattttcacagttgctttgttaattattatgtacatcgatcaaaccagaggcataattgatcaaataagccatatggtacagcgatagcaaaaaaaagtgacagagaacaatttacctcattcagcatcctgtgcagctcatctctagcttccacaacacggtcgcgatcattgctatccacaacaaagataagaccctgtgtgttctggaagtaatgcctccaaagaggtctgatctgtttttgcaagcatttacaaagatcaatcataaggtgagataacatatgtcaacattttaaatattaaaacaaatcaagacataggacagcttaatgtaaacaacataaataactaggaaaccagatgctaataatgacaaagataaatttaattgaaggcatcaaataaaaatattggtcaaaatatggctgcagttcttaccttgtcttgaccccccacatcccagacagtgaagctaatgttcttgtactcaacagtttcaacattgaaccctataattcaaagaaaatcagttagcttgaaagatacaaataaataaatagaaaaggagataataccatagcacaaggagtcaagaacataaaaggatccaaatgttgaatagtttaaaatttaaaacctaaatagatgcctaataaagttcactccgacaatttaagattcaatcgatatcctacatgtaaagttgaagtcttaaatttcataagaaacagctcccagcgttatgcaatagttcaaatagcttttcaagtaaaacaaatgacaagcagacatctctgcctatcaagtgtgctagtaaaaacttagcattcccatggtcatggaataggacatttcgtctttccatccaattaggaaatttgacgtcaatacagccaagaaaacctagcgacaacaactctgcagaactaaagtccattctggaaatgaactctaacagcacgcaacaaggctaaagaaattggcatatacaatgtacagaaagtcagaaatggaaatttgatgtttatacaaccatgaaaatagcagcacgaactaaattacattctggaggcctcatcgtttacccattggctcatatgccactgcaaaagaattgaattttaaaacatgattttgaagttgattttgacgctttttcaatgtacctttttcctcagtaatggcttttaagttgctaagaacatataagtaaatatctacatacaaattattttctaatcactaataagacattacggcttataataagtcataggcaacggatggggtcctggatagaacacaaacagcaagcggcaaggccaaagaaattggcatattcctatactactttaaatgatgctagtggtggcatccgagtccgcctccaatgctacgagctgacatgtggtgtctaatcaattaactctatgctataaacttgtaattacatgcctttttcttttggatatagcattatatgcctaatcaattaacaatgctacaaacttgtcattttttgcttttgcttttgattttatttcttacaatatccgtcgcatcgcacgggcatttagctagtaatataacaatgtacatacagaaagagaaacgcatgtggctgaccaatggtggggatggtggtgacgatctcgccgagcttgagcttgtagaggatggtggtctttccggcggcgtcgagccccaccatcaggatccgcatctccttcttcgcgaacagccggctgaacagcttcccgaacgccaaccccatcttcccccctcctctctcctcttttttcacctgcaaatccatacgatcccatccgttaaaatccaaatccgccacgagatccaacctccctccccccacgccctaacgcctcgaaaaccagatcaaatctcgaaacaaatggcgccggatcttcgcccccacgcatcaaccaacgaaatcgaacgcggagaaacggcggatccagtagaatcatcgggcggcggatggatcgccggagaagggaggggcgggagagctcacctgatctgatctgcgatggaattcgggggctggggggtggaagcggatggatttgggggggagggaagggaagagaaggggtggtggagaggagcggagaataatataaggatggtgggcatgggatggagggcgtccgatcttgggatggacggctgagatcggtctccagggaaatttggtggcacgcacatggagagcggagaggcaggaagcttctgaaaacgtgcgaatttctctatacggactaaaaaattttctctccgtccaataaaaaaacaaaattattactggatacaatgggattcttatttcacacgcgctagacgagtaactagtgttcggaagatcggttttgtaggaccgtgatcgtgaggatcacggtacctcctccttctgtttcctcgttaatgtagtgggcttataccaaatatatatgtatgtatccatatacgacatcctattgtgggtataaatacaatagtgaggttgagggcaaagtaatacttgtaacagagagagaaacatcgataaagttaattgccctccactttcgaacttgccctccactttcgtgtccgtgtgttcgtgtgtgcttgttcgattgttgacaacgtgaattctaacacgttatcagcatgaggtgctcttcagacaaggtatattgtcaacatcgatatgttctaatctcgttctatagggataatgataaacttactagatcgttttctattattttttttctccgctaatcgttcgatcgatgggttgtactacgtggatttgtcccttatggcgcacgtagcaggagagtttgcggctctccaccccatgcacgacaggcgtatggggttatcccttatacaaccgatctatcgaatgagaagcagttatcgctatagtccgattagatctgttcccagcctttgcgctgggtttcttttcttgcaaacaaagacacgtatatcgtacgccctagatgcgcgaacggatcagacaagccgctgcaagaacgacggtttagaactagtgatacctcgaagggcgacgctacgttcagggtgtaatcgcgatgcacatgagaagaatcgtgtacctggctaacatgatcaccgattccgaacgagtcggcccaaatcctcatgctagtgccgccgtcgtcctgaagttgacgacgacgaaaccgagtcaatgacgccagcatgcgccgtcgtgcccttgccgccgccaacacgcgttgccggtcacccccttcaccgatggccgcagaatcgtgccatcggctttccatcgtcggttcgcccttgaaaagccagccgacgggtcttcaatcgaccgcctgcactcgccgttgacggccgccgcccgcagagacgctgaggagaccgcgtccgcatcccccgccgccggcacgcacggcacacctcccgcgctaccgcacgcgactgggatgggggtcgaagccgccgtggcctcccgctgccgatagctctccgcctcgccagcccgcatgccgaaccaaactccccggcgcacagcaaggagctgcgctagccgaacgccggatatgcccgtagccaaccacgccggcgtcggtgctgcttgtagcctcaccgccgctccgcctctatcgtcgaccccgccgcgctgacgagctccgtcgaccccgccgtgacgacgagccaccgccgcctcgctcgcatgagtcaccgggaaatccgccgccgccgccgaattggggattttggggctagggattcaaccctagccatccgaatcggataaggtgtggctcccctttgttgggctgcaccgtgggccaaggccattagcaggccaacggccctgacgggccggctactaattccttgaatggccggttcatggaggtgggccgaaaaagattttggcctataaaaggagtcgggctcgaatcgaaatttgccccgaaaaacggcaaacttccgaatattttctgatttcatgcggatttggaattttagcggaataatccctcgggattatagaaattacggggaacactataattttggttattctgcattattttatgccgaaacagagaagatgtttaatgctttttctttgtcttagccctcgattttctatgtattaagtgttcattagttaatttttgaatcaaccatagaatcctagagacatggtttttaggaaatgagctctcataatttgaaatttagtacacaccagagagcatcatatttatggtttattttccaagctgttttattttttcaggatactatttaatgggttagtaattcagtaattactttggtacctaaataaataatagtacagcaattctgagaaatgttgggagaattatgggaatatattgacacagtactaaatttagataaccagacaatttactatttgcacacttgtcatgctcttacttgcagtacttattgaattttgcatgactaatgtaggaaaatgactgatattgctaagagagattttgctgaactagcagtcagcggcaagaattacctgacatgggcactagatgccaaaatcatgcttggtgctaagaaactcctgaactgcattcaggacccaactattgcaacatcagctggaggagttaataatttaccaacttcagccgagaaaaatcaggcactgcattacctgaggcaccatttgaatactactctcaagaatgagtatatgactgaggaagatccgaaggtcctttgggactcactgaaggatcgctatggccatcaagtaaaggctttgctcccaaaagcaaaacgtgagtggcttcacttacgtttccaagattacaaatctatggagcaatataactcagttcttcaccgcattgtcacttgtcttaagctatgtggagagaaaatcactgatgctgacatgatagacaaaactttgtccaccttccatgccaatcatgtgaatattcagaggcaataccaccaggctaaatacgagaagtattctgaactggtctccgtgctcatggaagcgcaaggagaagatgagacacttgttgaaaatcatacgtctcgccccactggaagttcagcagcacccgaagcaaatgctagctcctttaagaaggggaaaaaccagaataaccagaacaaagggaagaatttctggaaaaatggtggcaaagttaacaagacatctttcaagaagaaaggaaatcagaacagtaagtctaagaagggctctactagtggtgaatatggaaagcaagatcaggtatgcttcaagtgtggcactaggggacattggtctcgcatttgccgcacccctaagcatctcattgagctttatcaatagaagcacgggaagaagaagtcagagcatgagtcacacttcactgttgagatctagaactcagaggagaagatggctgccatgcatatcgacaagaaggtcgacgagaaggcagtggttgcaatgcacatcgatgataagatggaacataatgcagcagacacagagctgaagctctcagatgatctcatggactctgatcagttatatggggacatttaagtcttccaatttgtatcttagcttcctgcattacaagttactttaaattttagactatgtaatagactaaagttaggtgatttttcaagtgtgcatttagtttgtgttcctagcagaactatagtttctgtaagctccttcagagcatggttatcttaataatttagttaactcttttagtttaatatattctccagatttttatttttctatcttaaagtgttatttttactatatggtcatgaattgattatatttaaatgctttatgatagaacagtgttacgtactatggcaatggaagaggagatgtgtctagtagactgctgtaccaccaatactatctttcgagataccacgtatttccagactttaaagaaaaagactggtcaaatcgctaccattaccggaagcaatgcacacatcgtcggagtgggacgagcaacagtagttctcccacatggtaccaagatcattataaatgatgctctattatatccagagtccagtcgtactctactaagctttaaagatatccgtgctaatggttatcatgtagaaaccaaagatgagaataaactcgaatttcttctcataacgaaattagacggaaatcgtaatactgttgttgaaaaactccattccttgaaatctggcctgtactacactcatataaaacccgaaaatgttgcactgaaaacaatatttaaaaatcctgagtcatacagaatatggtatgacaggttaggacatctaggtctagggatgatgagaagaatcatctcaacttcaaatggccataatttacgaagtaacgatttcccaaaccaagaagattttgtttgcactgattgtgcaacagggaaattaatcgttagaccctctaatttaaaggtgaatgccgaatcaccagtattcttgcaacgaatacaaggagacatatgtggaccaattaatccaatgtccggatcattctagtattttatggtattaattgatgcatcaactcgatggagcattgtttgtttactttctacaagaaaccacgcttttgcgcggcttatttcccaaataatccagttgagagccagtttcccggataaccggatacaatccattagaatggacaatgccggggagtttacctctaaggtatttaatgaatattgcatggctttgggaattaaagtggaacattctgtaccacacgtccacacttagaatggtctcgccgaatcattaattaagaggattaagcttatcgcacctaccaactacatgttggggacacgctgttttgcatgcagcggcgttatttcaaatcagacctactgcataaatgctgtatcccctatgcagcttacacgtggatatgcaccaaatatttcccatctgcgcaaatttggatgtgctgcatacgtccctataccgccacctaagcgtacgtcaatgggtcctcatagaaaattgggaatctatgtaggatttgaatctccgtctatcattaaatttttagaaccattgacaggagacctacatatgggtcgatacgctgattgtatatttaatgaagatcatttcccggcattagggggaggaaagtacctacagaaggtcgaatgccgcgaaattgagtgggaaactaaaaatctcctacatttagatccacgtactaaggaatctgaccaggaagttcagaccataattgatttgcaaagaattgcaaataatctgccagaagccttcactaacccaaaggggatcatgaaatctcatatacctgctgtgaatgcaccggaaagagtagaaatacctcatgacgcagaggaaccggttttcaaattaatttctacatctaccccaacttttaggaagagggggagaccaccagttgcacacaaccaaactaaagtttctaggagacgtccttcgaaacaaaagattggacagaataccacagcactagagaatagtgaaggagctcaccaggtagatgagccacctacagtgatatgcccggatggcaatgaacccaatgagaatgcgcgcacaattgcgggaaacaatgaagatcaggaatgtgaaagaatagaggaaatatccaccaattatgtggatacaagtgaaacatacaatagagagactactattgttgacatatactttgccggaaagatcgctaagatcattgatctggatccagaaccaaagtccatggcagaatgcaaaaagcgttcagactgggtcaaatggaaagaagcaataaaggcagagttaatctcgcttaataaaagaaaagtattcggtcctgttgatcgtacccccatagggatatcccctgtaggatataaatgggtgttcgtccgaaaacgggatgagaacaaccaggtggttcggtataaagcgagaatagtagcacaagggtttactcagagacctggcatcgatttcgatgaaacctattcacctgtaatggatggaattacattccggtttttaatatctatggcagtcaatttgaacttagaaatgcagttgatggatgtagtgaccgcatatttatatgggtcattggattctgaaatctatatgaaagttcccgacgggattcaagttcctgaagaaacaaaacgcaacatatatagtgttaaattgcaacgatcattgtatgggttaaaacaatccggtaggatgtggtacaaccggctcagtgaattcctagaaggaaaaggattcatcaagaatgatgactgtccctgtgtgtttatcaaaaaaatcagaacatggattttgtattatttctgtatatgtggatgatctgaatatcatcgggaccacacaggtgattaaggaagctagttcttacctaaagacggagttcgagatgaaagaattaggtaagactaaatattgcttaggtctgcagcttgagcacactcctgaaggggtattgttacaccagtctgcatatatccagaagatattggagaaatttaatatgaaggattcatatccgacgagaacccccatggtagtaagatctctagcagtagagagtgacccatttagaccacaggaaaataacgaggaattattgggacctgaatgtccatatttaagcgccattggagctttaatgtatctcgcgaatggtaccaggcctgatattgcatttgctgttaacctacttgcaaggttcagttcagctcctaccaaacggcattggaatggtgttaagcaaatcttccgttatttacgtggcacacaatatctcggtttattctttagaaaaaatcaagatttaaccatggtgggatatgctaatgttggatatctgtcagacccccataaagcattgtcacagactgggtatatgtttctctgtggtggtacagccatctcatggaagtcgacgaagtagacgatggtcgcgacatcaacaaatcactcggagattatagcattatttgaagcgagcaaggaatgcatgtggttgaggagggtgatacaacatgtacagaatacatgtgggctgaatatcacaccaactccaaccattatttatgaagataattcagcttgtgttgcacaaatacaaacgggttatgtgaagacgagtctcactaaacatatatcacctaaattcttctatatgcatgaattgcaaaagaaagaagaaatcaaggtgactctcaccaagactagtgaaaatcttgcagatttatttactaagtctttgccaactagtgtttttgagaagcttgtgcatggcatcggtatgagaaggatgagagatgtgcccaaatcagggggagcacttccctgactgtattccgttgatattgatcatgcagatcagtacatcattcttgaagaatgatagagttatccagtagattagcttatggttgtactctttttcccttaagtgagatttctttgaagtttctcacatttaggtttttaatgaggcaacagtgcaatataagtagcatgtactatgtactctttctcctattccttttctcccactgggtttttggaaggagttttgatgaggcatatatataacgcggtattcgcccaaatgggagtgttatgaaaccgatctcccgaaggagtcggatttgtaggaccgtgatcgtgaggatcacggtacctcctcctccttcttctgtttccttatgaataaagtgggcttataccaaatatatatgtatgtatccatatatgacatcctattgtgggtataaaaacaatagtgaggttgagggtaaagtaatacttgtaacagagagagaaacatcaataaagttaattgccctccactttcgtgtccgtgtgttcgtgtgtgcttgttcgattgttgacaacgtgaattctaacaactagcacaagcgcccccccaccccccaggccactaatgcgcacccctagtccactgttcactgatgtttctatatatacgtataaactttatatatatttatataaattttatatgtatgtatataaagtttatatatatgtatgtaaaatgttatataaagtggttttttaaatcataaacactttattaaaaaataagagtttagataaataatcctaggacatcgtcgaataaatcagtttaaagcattagaatcaaaagaacagctaacaaaactaacgaaacaaacctcacaatgaaaccaaacaaacagtagatgagcaaattgacaggggatctgcggcgttgccacagagttacatccttggcctccttttgacatgcactccgcttgacaaatcgatgaccaccttctgctgccaccataggaacaaacatagctttgctgatgaacagtagattttcgtgtgagcttcactagactcagcaaaagcatatccatggagtttgccattgaatatgaggatctcagcctgcaatcctgccaaccaaagttacacatttgattcatactcaacccgaacgataaaccctctatggttactgctgctaggagacaaatagggctatgatttccaatagtgaactccaaaatgaaacaagcccgacactacataatggcatgagaagagaagaaattgaagaaactctaacataacctacttaggggtgggcaaaataagaccgaaccgaaaatcccgagactgagaaattcagtcagtagttaggtctcaaccaatgaaagactgaaatttattcggtcaattttgttagtgacctcggttaaacgaattgatcgatataaccgaattttgatatgtgatgtaatgcatgtcatgtgaaattgagaactaagtgcatgatgcttttggtttattcttgctacttgatcctatcttttgatatttgtttggtgtttggtgttgcctattatcttgtatttttgtgatatataactgtcaaaagttgtctaaaagaggttcagtgctgtcaaaatttatcattgcaaattttatctcctggaactggcacagttcggttaggactaagactgacaattttgcgttgttatttttcttcactttttaatgaccgaactgacaactttgcattgttatttggacttcacttttttatgaccgaccgtgaccaaaattttcgatcgaactgaatactcaccctaaacctactgacgaactatgcccaacccgaaaacctaatctagtgaggaaggtgttggcaacttttttgacaagtcgacaagcacgatcgcagcacctaaacgctttgcggtgatatggagtcgccaaccacctcgatctagccaaaaggccaaatcaagatgggtttttgtagaaaatagctaaaccggctatcggagccgatttagagatcaaaatcagcctctaggccgatttagatcgatatgaggataaccacccgtctcgtgggaaaacagaaggttttcaggacaagcctacaaagaggtgtcacactctcgcagcggtggcggacgttttacgacgcaaaccgacaaagatggactaaaactagggtaaagtagaaaacatggctgaaaagtaatgataaaagaaaaggcgattcaagtagattgtatgtttggggtattacaattgaaccggtcttgtctcttaaataggggttagtctctctctacatgcctttctccatgtccaactcaggatagaaaccaaaagaaaactcggaacatgccttcccaagcaaggaaacccgagacccaataaaaacagactcggagcagacccaaagaaacccaaaacatgcctttccaagcagacccaacgaaaacagactcagactcggaccctaacggtcagaccggccacatacctgcggtcagaccggccacatacaagcctccgtctcagtaaccttactactttgctcttgtttatctttgtttatctgtgtagatgtttgcttaaggccaaagggtgtaacttgcagggaagttaaaaggtccagacgatttaggagaggttacattcggttaaatttcattatacgagagtacgagacaatcgccaaacagaatatatcttaatggctacacataaattgagccttacatgcaaagatcctcacgggaacacacgctcatcattctaagataacaaaaaaaaaatgactaatgcttgtataagcatacgcatgcatagtcctcagcaccatgtctcaggcacacagacaaaggccacaaaagagaaacagaacaactgttttcgtcgattccaggatccagagaatgcagtacgtattaggaaagaattgaactgctaaacatgaggcattcatcaaatcctatgagcagcaatatatgttttgtagcaaaaagctggtagaatgtgtagtaaggtattggacaggttcatcacaacatgcccacgggaacatcatactgcaaatccttgtgcaaaacgaccacaggttggggtaggtacaaataatacggagaagataacgatggagtgaggtatcattacaaaaatattgggcttgccgaagacacctaacaagattgaaacagtgttcgtcctacgtatgaatgagatacatgcatagctcctagtcagctcgaagttttacggtcggagttccaagcctcaagcctgtgcacaacagcaaagaaaaggccaaacaagtatatacattagaactttgaacaggaaacaattttactagcctattatcggaataatctccagaaatgacagaactaaaatgataatgaggtaccttgctagcaatgttgctggacagccaatccaggccctcgtacagaccctcaccagttgtggcacaagtgctctggatgtacctgtgaggaagaaaacagatttagatcaagaatataaaaccatgcgtcgcattctagtttctagatgcaggatataatgaatacaagagtatccaagggaaaagtgaggcagtgagttacatcaatggtaaaaaaaaactatgaatcacaatccagatgcaggatacaatgaatttaaaatagtattgtattcgcttattggagagcttcaagctatatccacagcaaaaacaatatataagggcaagaatccattggtggtccttatttaccagtgtcgctggcgaagggagtgcagtc

SEQ ID NO: 10231 - DNA, 2942 bp, Oryza sativa
tatgttttatcattgtatataagttcacaataaagtaatgacaaaagtaaagtaaacctaataacactgactattgttccaaaaaaattacttctcccattcggatagtataataaatcaataataaaattagtagatttgtagtgttcatattttgtcccatttgactttctcttcatctcctctctcactcaactcatctgtcttataatttttaactaattaacaacataatataaaaatgatcaataattggaaagctaaataattatgattcttatgttatatttgatttttagtttatttgaattgttattttatttataattaaataaataattcaagatccatatcactcatatttcactttacaaaaataaagaaatacacaatttgagcatacacacctatcctttgcatgctaaccaaatataaaaaaacagagctttgtaaaaaatgacaataagtattgttgactaaatctcggcaggatccaccacataccatgtcttatacggaaactgacctcgagagagttatggataaggaaagacaaccagagttctccatggaaacgataaggattactcggattgtatccatattggtttccctagttctacttggacaaggggacacctatgggtataaatacaagcccccctaggaggacagggggacagacatccaccatgaagggatcaacatccaacacaatcgacatagaagccacaacatagaagcctacatactccaagacaagccgtcggatatcgacttcatggataagcacggctaataccctgcggtgtctgcggatactgtcaggagagacaaaagcgctatctctgatctcgccgggcacggattcgaggtgggaggctaccttgttgttgactacgagtcagatcgtcagaccgccatgtcaacaacagttagataggctaccccaaacattgtactggtgtgatatcatgaataagagcaataccggcttcggccaacaggatgtagagttattacctgacaattcaggggcccgaacctgtataaaaatccctgtctccatctcttttacctcagtctcgcatataccctagcaccgacgatccccataccatgcaaataccagaaccacgacatcaaacatcgacacatttaatgcctcatgcatgccggtgacgacgacgacgatctggacccgacgatgacgacagtgcaggcaccgagagctgcgtcggcgggaggcggcggcgcctgcggccagcgggaggaggcgagctcggcattgagagaggaggcgagccggcgacgagagaggaggcgagccggcgacgaccggatctggtgggcgccggcgagagagggtgagcggcggcggccggggagagaggaggcaaggcggtggcgggagagataggaagtgcggcggtggggttgccggcgagagaggaggcgaggggctgccgacgaagacctttggcgaggggcggccggcgatttcgagaagaattttttttcctttttctcctttcccttttatttatttctgtttttttatttctatctagatttttttagtagattgatatttgaataaattgcacctacggtacaataacttggcaggtgggtgcgatatagtataagaacttgagaattgaacgtccgaatgcaacaacttgacatgtgagtgtgttctagtacaagaacttaacaatttaatattttgatgtatcaacttggctaaacatatgctaggtgagcttttttttacgatgtcagtatgttattgcatagtaatcatatggatattaccttataatattaaatttaatctttaagaattattatactacacatagtagtacaatttacatccaattacctttaagattttttttgtggtcttcaccttctcaaatatcaactgaaatataaaaatttctacatccagtttagttgaccttcagttattagttattaggataaaaatataaatatacttatacaaatatgcgctagtatattttcaaaataagtacttaaaaattgaatttattgaaaaaatactccaaataattaagttgtcacataactttttaatttattgtatcaaaatcgtacctatcttgcaagttgttgtatttatacaatcacttataaagtttttatactaaattgcacctacctgccaagttattgtgctagaatgctaatttcttaagttattataccaaattgcacccacctgccaagttgatgcaccatggatgcaatttactcttgatattttttgggtgagaatgtggaggggtatactcaccacctctaatgaaagggtgattgcaaccactcatccatcccactcccccaaccaaacaaaaaaaatggattaccatatccactttcatccctacaaccaagggtgtgtttagttcacaccaaaattgaaagtttggttgaaattggaacaatgtgacggaaaagttaaaaatttatgtgtgtaggaaagttttgatgtgatgaaaaagttagaagtttgaagaaaaagtttggaactaaacaaggcccaaacaaaaaactggatcgccatattcactcaaaaaaaaaactggatcgccatatccagcaaaatatggaccgccatatcccatccaaccttgaccgggagccaaacacaccgtcaggatgccacgggctccaaccttctcaaataaatgctgccttaggagttaggtctgatttatggtttagttcccaactttttcttcaaactttcaacttttctgtcacatcgtttcaatttcaatcaaattttcaattttggcgtgaactaaacacaccattacaggtctcgaaaccacgtacaaactggttaagtgtttaaaaaatatatttaaaaattgaattctaaccaattttattgaatttcgtggtta

SEQ ID NO: 10232 - DNA, 702 bp, Oryza sativa
gtttgatgtcgcgattccagtatttgcatagtatggggatcgttggtgctagggtatacgcgagactgaggtaaaagagacggagacgatgatttttatacaggttcgggcccctgaattgtcagataataaccctacatcctgttggccgaagccgatattgctcttattcaccataatcacaccagtacaatatttggggtagcctatctaactgttgtcgacatgacggtctgaaggtctgactcgtagtcaacaacagggtagccttcctcctcgagttcgtgcccggcgagatcagagacagcgcaatgtctttcctatcagtatccagagacaccgtaggggactagccgtgcctatccctgaagtcgatatccggcgtcttgtcttggcgtatgttggcttctgttgttttgtagattgtggtgggtgttgaatgtccatgttgatcgtccccccctcctagggggccttatatttatacccataggtgtccccctgtttaagtaaaattagggaaaccaatatggaaacaatccgagtagtccttgtagtttacatgtagaactctggttgtctttccttatcgggaactcctcctatattcgcaggttatttccgtatagaacatggtatgtggtgggtcctgccgagatttagtcaactactattaggtatgtggtatccataatcctgaca

SEQ ID NO: 10233 - DNA, 4038 bp, Oryza sativa
ggggtgtctcgcatattatccaaaaaccatctgatacgagatcgaagcttcaaggagtccgtcagtctagtcctccagccatccgcaggatcccggggcaggtagagggtggtcactggcacgcgcaaacctgagtccccacggctcagaggtagtggcccctggatctggcttgggcctcttgcccggaggtcgtgtgctcttgcgagcagtgctaagggtgcgagggcctccaaggaaggtgatgcggggaacaggggtctcatcctctaaaggatcagtgatgtctggctcgatctctggctcggtgtcggttccctctgtctcggagtcgacctggatcggagtctccaaactggaacccagctgtggagaaggtgtagggatcagtggagtgtgcaccaactccggaacaggtggctgtgccgctgtcgggtccactaggtagggcgttgactcggtagctagcatactagcctctcccagaagagcgtggaacgccggtgggtacggcggggtgaggaagaagtagcggtcacggcctactgctgtggaagtagaagcccctgtagtgctgatcttggctgctcgaagctgctcctccagctggctgacgtgctcctgactctctctcagctgctcctcaagagtatccatcatcccgcggcgatcgttgtactggtcagataactgctggaactggtcgccgtggacctggagctgtgccttcagtgagtccatctcactgccccaagcctggtgctcctcctccaactgaagctgctgcactgagaggtcagtcaactcagtctccagctctcccatacgtctctggtggtcgtcaatctccaacagagcctcctcgtagtagtcatctactgcctcagcccatcgtgacaaccgagtcactatcgggttgtagcagcagggcgtgtcttgaactgtgcaaactgagttgccctcctcccggaacgggtgatgagcaaacttggtactcactaactcagctcggtgaatagagctgagtcggaggaaggcctcccgggcggcatcctgcatcgcggtctctggcaggtctcggtggtgacgtgtctggaagctgtagtccaacttggaagggactcgggggtgaatctcgacccgagcctcccaaactgagccacactgtctcactcggtatgacgggaacccagggtatcgcagacgcctcaacattccgatgcagctcaatgacatacccctctgattgaggtaagctcaactcccaggtagcgggtgaatccgaatctgccatctaattttaagaaaacccaaagtcagttaaggttaaaaattgtttttgtaaagaagatagttaagagtaagatgaatattgtacagagttttgtaaacatagcgtatttatttttgatagtattactaaatgggaatttctcccttggccaacttagaaaaggggtggggcgccttttggtcttttcctacagtcgtatggctctgataccagctctgtagacccccgtttttataacaggaatcaatcgtgtaaacagtaccatttccctggatcaagtagtttggtacacacgaattcatagctggaataccaagtgcacatacacgagtgtctaatacgaattattacatcataggcccgcaggcatagtcttaaatcatcggaccgagcggtctggaatacatccaaaagcagaaatagataaggcagcggaattcaggcagcggcatgccattgccacaggcaacgaccgtactaagacctactgaacgccatcgtcttcatctccctcctggtagtaggcatagggatcctccgaggcttcatctcctgcttctgattaattttatatttgcaagggtgagtaccaaccgtactcagcaagccatcacagcaatgatgcacatgacagaggaattcagaggatggctatggttcttttgcgcaaagcaagttttgtaattcttttcacaagcctaagacctagcatagactgatcaagttttaataccagtattcatattaaacaatgacggttctgtccaccatccattgtgatcccaaggatagcttcccgccattgagtcgttatggttttctgaggacgtccacattcccgcctctcaggaagtggctccatcagtataaaaatcatcatgcagatcccatcccacacaagtttaagaattttagagtctagccaagtgtaatacatgtcccggtgctcaataaccgcgagcatggctattcgaatagatttggtttactcacactgcagtggatgtacactttacccgcactccgcgactgcccaacacatgagcctcgtcccaacacatgagacgcgtcacggcaaagcttttcgataacctcgcattggcagtacccgctccatgaacttaaatcctcatgcactctaggcgtccatgtttctagcagtgagaggagttctggcgctcccgggaaagagaagtctcacacacatattaaattatggttcaagttaagttctctctctcacacactcatggcagtcctaccaatggtgacaccgatgtagggcacgcctctcggccctacctcaatggctgtcccaccgtagcgcacctgcctcactcaggggtgaaccatctatgcagggatactgcatccgctcagctatctaatccgctaggtctacacccattcgagaagtacggttgtacgggggtcgtttcatgcttaacttcatggcttggtccttaattgaccggggacggtactagccttttccagataccacccaaatcctccgtccgccccagtcgaaaacagttgtttaattttatttctcctttcacaaatcatgtcatcaacatcatggcaatgtggcgctcatgtctccacatgccgcatctcaattaccttcccaaaggtaattgcccaagcatatagcatttgataaatatgagtatgcatgattctagaatagcatttctaagcaattgtcatagttgaatagagactcatacgtaaatatggttacaaagatttaagggttaacaataatcaaggcatggcataatcacaagtgggatgttcatcattgcatgcaattttatttgtaaacaaaataatttcgcaattgggatcaacatgttcaaggaatagtgatgacttgccttgctcaaagtcttgcgggtcttggccttcgcttggatccgcaactccctcgggctctatagttacgtgcaaaaattgatttgaattcgattagaattcaaataaaaatccaaataaatccaaatggaagtcgaacgcgaaagtcgattcttttatattaactttactattcgcgtactagggcaaacccaatttcgattcaaactattttgcgggtataaatgttttgttctcacaagtttttaatttaatctacccgagcattatatccatataataggttagaaatttctatcgcgagctaaatatcggacggaatcctagaattattatacgatttaatttagtctatgactaaataattaaatataatacacgggtaaaattcctagtaattaaatccgaatttctaccgtgaaccgatgacttatagagattaccaaaaataatctataataatctataagaattcatctaattgtttagttattaattatatctaaattactaccaattttaatctaatttgatcaagaaacatatttttataattaactcggaatttcgaccgaaatactattacgctcgaggaatttccaaaaataatctatgattaaccccgaccatttttatttcctaaatcctcctaatttctcccccaatttcccttctattttctccttttcttcttttctattttccctctttttctctccctctctttctttttctctcttttctctccctctctttctcggctctatcccacccgagcggtggcggtggacgcaaggggaaaggagggcggctcaccggttgtgggagcggcgaacgacggacgcggagaccgtggtgcacgg

SEQ ID NO: 10234 - DNA, 33340 bp, Oryza sativa
  unsure (1)..(33340): unsure at all n locations
ctgttaggtggtaaaagaagtccacatttttttgtagtttaagctggaaacagtccgctaattttgattagagaaggggtcattaacaaagtctcttaatatagataggaaaggaaaaaggcagaacaaggaggccactaattgaacctccaagcttttgtctaatcatcgagctaaaatgatttaggggttaaatatataaagagaggacttttgtgagtcgttaccatttcaaaatgttccatgaaattggtatgcagctcagagcagccgctagcacacatagcacacactgaatgcagctttttttttaggtgaactgaatgcagcatttttagtggtacactggtacttctatatattcacgttgagaccattgctcaaagctcactgaggatcaacaaatgagtctataggaatatatcaaaggaggattcgtccttgtgaattttcttcctaacttgctgtagtttgaaaaattcttttggattacaatcctatatctcaattccaaaggaaatttacatgtgagctcaaaccttattttatttttcctttgagaagtccaatatgcatcttctgtctttatctctcacatctgtatataatccactaatgttccagttcacttttctatgatccatctttcaaattcatgtgtgctaaattctagtgcattgctcttttcccatacgtatacctctatttttataatcgtgagtttcaaagtaacatagcatacaatctagcacatctaaatatgagcttgcatggtacgacaaaacacagggggtgaaggtgagggtaaaccataatgtggtctagatgtgatgtagatattgaatttgttgaaggccggatatcaataaagggtaccgccaacaagtatgcgtgagttcgtcatcttctagatctaccttatccgttgccgctcccatgcaccttaatatttgtacaccataccaaccaaagttggatcttggggaaaaaatcaccagggtcacttgtgttgtatacgttgtaccatagagtcaatcttgttttcttaaccgtgactaaatgatttaccataaagtttatagaagttcactgggtcattagacccgttaataattacactttagctctacccttgatatatactctcacacctattacctctccatggctcgtgacactgtggctcatgctcgtgcctacctcgatggctgactgtccataggttaaaaaaaacaactaatgtatagtagcattggcatggctggctttagtctagttttacacatctacacacgttaagttagttattcatacttttttttattctctatgaaaaagtatataatcttagaaaaccatgatatacataattattgatggtctatatcgctcattataaacctgtcacatattatttttataaaaaaaatttaaagaatgcacatctgccttaaacaatcttcgaaacattgagaccgatagctagtaccacgagactctacccccttgcttcgttatcttgaaagataatgtatctacacggttgtctctattgggctatcatatttgtacttccatatcttaaaattgttgatccatctgtatccgtgtgtagctagttgggacagaggtagtactaggtatttttgcttgtatatgctcaattgctgaaacaatctctgttttttttttgaaaggagcacaacacgggaggcccccgctggtagaaagatttgattaaaaataaataaaaaagaaaattacaaaaaaattgatccaattcaagattacatccttatctctctccttaattctaaacagcagaaggaggatgtcaccctttaagagttgcgtccaagaattcaaggaaggaattttttgctcaaaaataaaaccattcctttatttccaaatattccaagtaccatataaaaatttgtccatgaagcactgtccctgataaagggattaatttgcatggcgcgacatactttccatgctcattgaagtatcccaataaataccaagaacattccaacaattctgtgtaaacgagcattgaaaaaagagatggatcaagtcttccatagaattaactggaaagagcacataacttagatcacagtcaggaggagcacaatgcttatgacccaacatatattttgtatttagtctattcatcaatagcaaccacccaaagactttaactttcgaaattgccttgcactaccataatcagagaaaataagaaggtggctgcatagctctaattaaagttcaaagcataggatttctgagaagaatacttcaaattaccccaaatgtattcccagacatctctatcatgagacagattcacatcatttaaaatgactaacaaatagttcagctcttgaaaagcttaatgagagaggggtaaatgaaagttatcctcaatatacgtagagagaaagttatgcaaacctttttcaccctcgctttcatatcaactacttcctccgtttcacaatgtaagtcattctatcattttctatattcatatagttgttaataaatttagacataaatcatatagttgttaataaatctagaattattaacaactatatgaatgtgagaaatgctagcatgacttacatcgtgaaacagagtgagtatattttagagtaagaaccacgtgatttcatgtcctcgaaaaaaaaaagaagaaaatccacatgctaacatgccaagttcaaaagagacgtacacttgcacatacattacatttcttttctttagaaaacaacattactacattcttttcatatgccctatacattgctccaactcctgtgtagcgttgtttgctccgctagccaccacacacacacacacacacacaaattaaaagaagaaaaaaaaacgcctcaaaatgtactccctccataaagtaaatgtagttttataccggtttattgtgctaacatttggaccggttcgctatccccctttcattttctccgtttatgtctaacatttgaccgttcgtctttcttgaaatttttttatgattagtattttttattattagataataaaatattaatagcactttatgtgtaactattttttaaaaaaaaatttctataaattttttaaataagacggacggttaaacgttggatacgaataccactgctgacggcggacacctcagccgatgcagagatctccgcacgaatctccacgcctccttatccccgacccaaacatcgtctggctcgcacccgcacccgtaccaaccccgaccgagcgagccgcatacgcattccgtcgaacacctcacccgcacccaccaccaccaacctcccaccccacaacccacatccatgtgcacgcgcgccctcctctcctcctccgctatatatcccctcctctccacccctccccaccactcccctctcctcccgcctcgccgccgcaaccaccgccgcctcgccgcagcatcacccgcagccgccgccgccgccgccatggactccgtcgcgtcgtgggggctgaccccgctcgccgcggccgacccgctcgtccacgacctcctcgagcgggagaagcggcggcagcggagcggcatcgagctcatcgcctcggagaacttcacctccttcgccgtcatggaggccctcggctccgcgctcaccaacaagtactccgaggggatgcccggggcgcgctactacggcgggaacgacgtcatcgacgagatcgagaacctgtgccgcgaccgcgccctcgccgcgttccgcctcgacgccgcgtcgtggggcgtcnnnnnnnnnnnnnnnnnnnnnnnnnnnnnnnnnnnnnnnnnnnnnnncacgctcctcaacccgcacgaccgcatcatggggctcgacctcccctccggtggccacctcacccatggctactacaccgcgggcgggaagaagatctccgcgacgtcgatctacttcgagagcctcccctacaaggtgagcgccgccacggggtacatcgactacgagaagctggaggagaaggcgctcgacttccgccccaagctcatcatctgcggcggcagcgcgtacccgagggactgggactacgccaagctcagggccgtcgccgacaaggtcggggcgctgctcctctgcgacatggcgcacatcagcggcctcgtcgccgcgcaggtataaaaatcctatccagtccaatcctcccacccccaactcgtctcgattagttgttgcatttcagaaatgaaaaatgaaatggggtaaaattctgtccgccggcatttgcttcgttgctgtctgctgtaaaggttggatttggggatctggatggtgagtaatcccgagttgggttttagagtgaattggatgcccgatctggggggtttggttgattggatctacaccttggtcccgaaatatagcaatctagtatcggccgagaaacattctaatactatgaatctggacatatctttgccctattttcggatggaaggactgggttagttgggtttggtggttgtatgtgattaaactatgtggtaactttagctttatacacatatatctataaggacctaaattgggtgaggggtgttggggttgtttggaataggcaaatcttggaaggatgtatgtctctttgtcttctagcttgttttgtttattagcaattcgatacaaaatttgagtctttcagtgtgctttagtgcaattctttaaatatgatagatctggtagtctgtggtagaggatttgttttcctgtgttcggtcatgcaacttgccgagcactctgatagtggatacacaatggaatcctagttgtcttcaatcaatttgctattttgcgctcgcccatctaatttgtttgttttgggtgttatagggcacaatatattcatttgtgacaagttgtgttttgcttcatcttatatatttataaacattgttatgaaacaatagcttttttgctgagtggtaacagatctctaaagaattatctgagtggatattcctgttagccataagaatacatgtttgacatattcctcaatttcttattacgtgcaccgatgctgggatataaagggcaaaatcataagatatactgttcattcaggttgtttttctttggtgtctggcatgtctgaactgtatgatgatgtattaatgttaattttagtcctatagtctctaaaatatgcttgtttcatttatttaggaagctgcaaatccttttgagtactgtgatgtggttaccaccaccacgcacaagtccctccgaggaccaagagctggcatgatcttctacaggaagggccctaagcctcccaagaagggccagcctgagggtgctgtctatgactacgaggacaagatcaacttcgcagtgttcccgtcactgcaaggtggtcctcacaaccaccagattgcagcccttgctgttgctctgcagcaaaccatgacacctggattcaaggcctacgcaaagcaggtcaaggccaacgctgtcgccattggcaagtatcttatgagcaagggctacaaaatggtgactgatggaactgagaaccaccttgttctctgggatcttcgccctcttggcttgactggtatgcagactgtttttgcattcttcagtataattgctgttaatttttaattagtgctattaaacttgtcctaatgttggtttactcatgtaggcaacaaggttgagaagatgtgtgacctttgcagcattacacttaacaagaatgctgtctttggtgacagcagtgcattggctcctggcggtgtccgcattggtgagtgcattccccttcacagaaaatattatcatgctaatgtagtaacatcttatagtccggatcttgctgattgctatggaattgattcatggttacaaaacacaactctgcaaaatcatgaattaatctgatgcgaattgcttcgctccatgtttcactacagagcctctgtccatagatgatagttatatcgaacacaagtgctactactggacctttctttgcacaagcaagtatctcagacggattctggctggttttcaggtactcctgcgatgacatccaggggtcttgtcgagaaggactttgagcagatcggcgagttcctccaccaggccgtgaccatctgcctcaacatccagaaggagcacggcaagctcctcaaggacttctccaagggcctggtgaacaacaaggacatcgagaacctcaagctggaggtcgagaagttcgccacctccttcgacatgcccggcttcaccctcgacagcatgaagtacaaggagtaggaaaacaaaaacacacacaaaccatggtcctaccgccgctaatcgtcgaccagctgtgctctcgtggaccgccgtcgtcgtcatcttcttcctcggcacaagctggccctgtgttacggattttgtctgcccatcgagatgataggtttcataaaacgctctctcccccaccctgctgctgcctctggtttggttgccaacctcatcccccatcggtttttttcctcctcttgtttctaatttctaggagctgtgccttttggaatcatggaatgtcaagtatttgccaataatcaatccgtttgatttctgcctaccttgtgttttctgtgggattgctaaactatcaaactgtgcgaagctacgaaaaaaagaaatgctggaatttttcagagttgggtacatggatgtgccactgtcgtgcagcgcattgccaatacgccgactgctgtagattgcaacgtgacggtacgcgtcgcgcgttggcggctactagcgtttaattgtgtagggatctctgtgcggcgttaggtctcgccatggaagggaaagggagaaagccattacactagctgtacaggacggtctggcctggcggtgcccacacatgctgtgaggagcgtgtggcaccgctgctgcaaccacaacaacattgatgtgcttttcacgtaacctttttaccttacgtgccgtccttttttagaaaaggaaaactctcataactttattagatcaaagagcagttacatcgctcactaaccgcttaattgaacctactggctcctccaaccaaatagatggtggattaagccaggctgctctagcaagctcgtgagaaactaaattagcctctctaggacagtaaaacaagagttaccaatgtagaagcttcagaaagaaccacacattcattatagatcgccccagctgctgtcgtcgagaaccctccattttgcatcattgtgatgacttcgatacaatctaacttagtgatgattcgatcaacttgttgacctctagctagtaaaattccattcctcaaggcatgaatctccgcagtaatactccatgcgatcatttgcaatgctatgtactctactttatcatcccaaagaacatctcctggcaatggcatctacattcaatttaaccattccctcttatggttgacaccatcccgatctagcaatgcctatattcctcgggttggcttttcaatagtttaggggagtacaccaatagccattgccgccctcgttggttcttgcaccttctcaccatgaaccaattttctcccaccaaatataccagatacctaccaagattagaatctgagcactcacataggcaatcaaacttgctttctcatcacaacataatagatattctagcgatgtcgaacctgcttgtgtcatcttttgtaggggtacactgtactttcaaataaccacgtagaattcatgttgttttctttgagattagatcttcattggtcgagactattgggagaaggattaagggtgctttctagagagaaggttgggaatttctctcctgcacacgtaaaacgtgatgactcattagtacatgattatttaagtattagctataaaagcttgagaaattttataaatacgatttttaaagcaacttgcctatagaatatttttaaaaaatacactcaattaaacggtcgggaaacgtgtacgtgtaaaataagaaaatagaagttgaaaacatgtagttccaaacacatcctaaacaaatattactgtcacttcatttccatttctctttgaaaatccttcaaagcgtgtagacggctccccagctcatgccgcgccagtgtccgacaggcgacagttttgcgactctttaacaaacttgtttagtcacttctgctaccattgaacggttgaacctgaagtaattttattactaatcacaaatttatggccatatagtgatgatattgtaggatcgaatcacaagaactaagccaaccagaggggggtgaatggttggtatacccaaaaaccgaaaacttttagcggaaataaaagttatcctcgaagttgatggattgcggtctgaccgaaggtattgcgccggtctgaccgcctgatgaacgtcggtctgaccgatgtagatcgatcggtcgaaccgccgagaagcctgccgcccctgtcgctgccaccggtctgaccgcccgtatgccgccggtctgaccgccggtagatcgccggttagaccgccgaaacccgatgaaacacaaatcgaagaactcttaaagtagatgacgactttattgattctctctgtgtttacaaagtgcaccaacagcactccttacaaaaatttcgactaaactcgaaaccataactcaaaactcaactcaattgctctctaaagcgataccgggaagcctcacactccctctctatatatacccgaggtaggcagcctaaagcccacgaaccaaactcatactaagagtcctaaacaccttaggaaaccctctagtacaagaaaaaaactttacataaccaatcgtaccaaatttggagtccttccaaattcgactccgcatctcatacgcacacaatacctccatcgtatgccatatggaatctccatcaaccacgtgcattaactctagcctaagtatctcgcatgatctctgaccaccacagacgtcgtcttatccccaagccgactcccggtccatcaccgcaaatactctcccgaggcatcgagttagcaaacaacagtattacatacgtatagtatccatctagaagccataatcatgaaataatcacggatatccaaacaaacaacccgaaaccgaaaccgacacagcgtcggtcggtcagaccgtgagctggccggtccgaccgctcgaccaccgccggtctgaccggcatgcacagcccggtctgaccggtcacatgaaataataaatcctgcgatcacctgtgaatctaaatatttccaaaaaccacttcgtgaataaattccaaataacaaaaccaataatctccaatgcccaattgttcatcatagaataataaccaaaaaaacacctttgattttacagatattcacataaaaaatattttaccccattgaaatgttcttgtaattctaattcatgttgctcatttacatctccagccaagaccggttttattgcagttgattatctagatgattatatgtataaattaaatattttgatgaatatacttaacaaatagcttaaaacaagagaactaagcaatacgataatccacaaaattaatccagtgaaatagctgaaaagaacaatactcctaacttcttccaacagttttcatgaaaattggttcaactttcatatgaactgggaaacaaaaatccagcgaaaccttcgacagttaggcatccacaatgtgatgcaaatatagtccatagataatattatattttattcagctacctattaacattatgtaactagtccatatagagaaaacaacaaaagatatccattaagcatatggactacccataaataaataatactatctatctctatttctctctcatctcctaagagcatccacaatgtgagccactcctagagtgtcactaactatgaacactcgtaggggaactcagctcacactgggagatacccctggatgggctcctcaaaatctgaagcaacccggtgaggatactatagcccacaatgggtgtcttggcccaaagtatccctagatgaaaaatccccaaataccccttcctgccagcctactctccttttccttctcttttcttccgccctctcttctcgcttcttttcgcttcgtcgtcgcccatctcgccgccaccaccacctccctcctctctcccccgccgctgctcgcctctctctcctctctctcccgccgccgccgctcgccatccactcttcctcgccagatgtggccggagtgcgagggagattagaaaggccgccgctaccgccggagcttaatcggcgagggcgacgaggagggccgcctactccaccaccggatccatctctctctctctctctctctctcgtcgtggggtcatcgctggaggctgtgtgccgcgccgccacccctcttcctctgcctgtcaccgacggggagccacgcgcggatctggcatgccgatgcggtggtcaacagcgagatgtggccagatctggtcttcttctctccctctcactgccgtcatttgcctctccctatccctctccctctctcccatcgaggtggtcaacggcgagccaccggtggcgacagcggcggcagatgaggacgaggaggtcgccggccgccggctgtggatgagggcgagggtacaaggggaaatatcggggtagggcgccatgtccacgagctccccacgcttcaatgcagtgcctggctcagaccccccacgaaaaagtaggcaaggcgcggagggagccgcgtcccctgcgaggcgccgcgctcccctgctagggaacagatcagcctcaaaaagcgacgggaggcggacggccgtgaggagagacacgggttgaggaggtgcccattgctgatggcctaatgctaccttgtatttatatacattgtggagattgctatagttaaaatctctttacgtgggtctatctatgtggatcactttagccatggcgatgccaacgtcattgacctgcgatacaaacacactgtgcaacagtcaatttcttgtcagggcagtagggcactatttggggagtgcagcgcaggccggtgggagaaatgtgggtagatgacatttgtgtgattgtgtcggtgcatccatgtgatctctgcattaaggattggtggctgactacaggtcagcatgtggtcttcttctttttttttttaactcaccaaaatctctgttctttaaagaatctccctcgaaaaaaaaatccaaattcatgtgatatctcttgtctgtagttacaatatctaacatagtagcacttcggagtaatgctcattgttttgttactgagacactcaagtagatgtgtgaatttatgaagcaacagtgccagtcataatctattaagagtgctttctgaatttattcagacttatacccttctcttctgtacaattcagtatgttcggaagttgatacacaaactgatgatttcctcaccaagaaaaaagaggaggaatcacaccatgaataatgaattggtgaaatttgagtctttttcccctgaaaacactgcaaagcaatatctttattaaacaagaacgaaccaggtttcatcacacgactagctattaaaaaaaattgaagaaacgatgagcatccgaaaagattcaacgtgctcaattgcgtataccaactttaacataccagtacaattgtacaaacgaagaaaaggagcaatttccatgtcaattgatggcatcaaatcttatcaatgccgacaatttcaagcacaaagcagcacacctcccctgatccaagcttccttataatattatagcttgcaaccagatcttacatatacatactcataagatctttgaacatgtaaatcatccatgaatcacctacaatgattcagcaaatgcagaacataaagaagaagaaagaacagaagagagggtaaaagaaaaacaaaaaaaaaataaaaaccaagatttgcatctcaggtagccactcctgcaattcctctcatggcaagatcatccagcaaaacaagcaggcagtgcagtagtaatcacggatccacatccctgcacctggtgatggtctcgcatccccgggtgtaagggttggcggtggtcatgatcctgcagttatagtaagggacaccctgcctcgagcacggcaccacgtcgctcctcagggcgtcgtagctgatgtacctcctgccgttgctgctgctggactcccacagcatcctgctgtgagcctctgaatccatctccatctccatggccatgtccaagctcttcaggcagtggcctccatggaggaggaggaggagcaagaacagcttggtggtggtggtggtgattgatggtggtggcattgttgatggaagagggagatctctctttcttcttgttgttgtttctttgcttcttctctcactcagggtctcatctaggagtagctgaattttctctctctatggggctctggagtctggatctgtatcctgtgatgtactccttccttgatggaggaggaggcagaggcagagcctctcttgtgtgtgtgtgtgtgtgagagtgagtgaggaggtgcattcaatgcagtgccagacagccagttgtaggcacctgccattgtgtcctttctggagctgttcaatggaggagcaaatatcgaaggagagtggcccaggtttaccaggtcccgttcttttcttcaattggatgaaaattaagatttttgtgacatatttttaaaaactattaaatggtgcgtttcatacgaaagctttatattaaaagttgctctaaaatattatattaatctatttttaaagtttgtgataattaaaattcaatcaatcatacgttaataccacatcgttttgcgtaaaaaacttaatcttcatcttcaggagaaaagaacatcacctaaggtggtgtttgaatctctgtagataaagataaagattaagtgttttacgcaaaacgaggtgataataacgtgtgattaattaagttttaattattacaaacttgaaaaatatattaatctaatattttagagcaatttttatatatatataattttcccacgaaacgcaccatttagcaatttaaaaaacgtgccatgagtatccaaaatttcatccaactcttgttggagaaacgaacgcagcctaaataagttcagatttaccattggttttggatcttggggagttctgaacatgtttggaaaaattcatggtcgatttctttctttctttattgtgaagctcatttgacacattaatttggactttggggagctctgaacatgtttggaaactcatttgagattcttggttttgtgcaattttgttgaatgattgaaccataggggtggtggggttcatggtggctcagatctggaccatccatttgctaatcagtggttaccaggggagcagcagagcatccttctctcatacgccatcacgagtctctgtcgctcatgtggtcacaaatgagaaaattgtccaattgccagcagtgatgctgcttggtgtaattctgggcatgagttcagtcagttccatattttctgggtccaatccaaacactactgaagttatcaggtgctctgagagtcacaacatggtagtagtattaaatgtttcaagctttcaaacgattacatcgagttaagcttcagttttacagtagtacttatgtaaaagactgcaaactatactccgtatgtaaaaaatgaatagcggcagttaggaattcctggagaaaaaaacacaaattacaagtacgaggtgtacctggctccagaaatcgtaccaaaacctttataggagtagcaaattacggcagtcattcagcaccctggcaatctgggatgctagaaatagcaaaattttgacaggaagatttacatgcataagaagctaaatatctaatcatatatacaagattcaagaatatttacaaggcatcaggagtttcctgcatgtacttttttcagctatcatgcaacttgtaaatctcgtcaacataatcctcaacatcccaaagaaaggaaccaaatgcaatggcttcaagcaacaatctctttagggatgacggatcgagtatcactgcctcatcaggctctaggaaatctttcatgctttctctgaacagtgcccaactgtgcttctcaatgagattagaagcttcgcatgagcgcagccttgcgcataactccaaggtctttggatcaaagcccatcatgtaactcttcaagtcatgcagatcaacaacagaactcggttttgaggaagatgatatttctgcagaacctccaatggactcttcctgttcttgtttctgggtgctattaaattgtgcattcagaaactgaattggtgggcaaaattcttgtgactgagcaagaatcagctccaaacgatgccttgtagtgacagatttcagaaagtatccgtacattattgaagcagaataaatccgactaaattgcattcttttgattctaagtgttgagcgattgatcttgggaccatttctatgtacccatctgataatactggtcaagtgttccctaattaaacctagcacctcaggtccatgaattgattctagttctgcctcccttggtggccatatttgtagtcttttattgctgataagctttgatagatttggaaccaatggaacttcaatcttgaaaaatttataaacaatcaaagtgtacatgatatcctcaatagcagtctggcactcatgctccttcatttcagcaatcctcctatttgtagaagtcccaacaaatcaattaatattcagatgcaaatacaatataaagataaaaggagcaaacaatatagactttttagtgccgaatatagatcacctgcagtgacaattatgctagctacatgaaatgatttggtaaattttaagtttttaacaatgaagcttgtgactcaaaaatatcgatgcagtatcaactagaatggattaaagaaagacctgaccctccatattcttccatgtagatttactagtatattataagtgacgctcctatatgattcatattaaaaagactagaaatgacgttagagctccaggttgtctcccatcatttaaccattgaagctagcttttataatttcaagcctcacttgcaatctacaatattcacatgatttcattaacccaacctatattttatttctgtaattagttgagaaattttctaatccaacatatatgtccaaataacaggtagcttatggactgaagaggtatcacctaattggttgttcttcatcagcacaacaaaataaaatgccattctaagtgaatgctgttttttattctatcacaaaagtgcaacgttgtctgtttaataattaattaatacaatttacgcttgaaatataacagagaacttgaatggggaaaaaataaggatagcagcatgtcgacctcctgagaccactaaacacttttgacaaagggcatttgtaactaacctgtgaaggcagtcctcaggagaaccgatgctatgttcccagcggatcaaggtgtcctttctttgattagatagttcttgaagttgctttgccgcagcaactgggagtacttgtggctggttcttcaacaaaccacacaagaagcttccttcccacgtttggggctcgagtggtgcattgacactttcaaattcagagtcatcaggctttgcaccagcaactgtagtccgtggacttctggtactgcatttagatttccaattcaacatacttccctgtgttgcaaagttgatagggcagcaattgttatgacaatattctaggcgaaacacacgcacaaatcaatgatgcaacaactagattaaactaatgcagagggcatgaataaatcagactaaattcggtaagaatcaaagatgcatgttgtggctgtggactagtgaatttttgaaatatcttgtctggaaaacaattttgacggtgcagtggataggatactgatagaagaaagacgacaactgacaaataaaaaaaaaagagaaactaaagtataagttttacttcacataaacatacactctaaagctataaaaactaagactactattgagcagtaacaaggaaacactaaaacttaatagaaacagacattagaaatttatctcctttcacacatctcagtttaagtaaagagctcgaatccagtttgaaacagcctacttgagaagtaaaacctctcatttaggcagtacaggtacgtcgtaaccaaagctcctaacttccaaaaacaagagtgggaagaattgcagcgcaggaggtcgtttgctacacctcatctcaaatcaatcactccggtatgcaaagcaccgcccctaaatataaaataccacgtcatcatcatcataatcatcatccgccatgaacaccaacgatcaatgaaggcaggaaccacgagactccacgcatcccccctagtggatttacacatcacgggcaagagaggaaccgagaacgtagagaggcgggaggtgggggggggggacctgcagcttccagcgggatgaggaggagacgccgcctcggcgtacggcgaccgggcgggcgactgcggcggaggcggcggcggcgcgggggcggagggccgccatgccgtggttgaggggggatcgaaggggataagagttggatagcgtttggggtgcgtgcggtgcggtgcggtgcggtgcagtcagcggcttctctctcgctcgcacgagtcggcgacgagtggtggagagactctcgtgcgaggggtggacacgcgtggtggctgtacactcgctctactcggtggtgtgggtgtggcctgcctaccccctgcccccacacactggcacggcacattttgacacgagagcccttgtgggagaaatccaaacacacggcacaaactttttgaaggatggaaaaagctataaaaaccatcagttttacattccaccatgtaatttatgccttgtttagttacaaactttttcttcaaacttccaacttttatatcacatcaaaacttttctacacatataaacttctaactttttcatcacatcgttccaatttcaaccaaacttctaattttggcgtgaactaaacacacccttactttgttataaatacccaccactctacttggtttgaacacacggttcaaaattttcaatgatggaaagttataaagaccatcagtttggcattccatcctgtaatttatttatttttcaaatgcccaccactccacttagttttgatgtaacaaccacccagtgcgcactggcttaccaaatcagctattattgctactgtagaggtacccccagactaagctagctgagtcaatcttatcgaggtacttgtatttgatttattctttatatttcatcgatttttttaccgtacatagcaaaaataagtgagacattgtttaatctctcatcaacaattttatttatggaatctcaaaaaaaaataaagtcaagattatactcctaagggtgtgtttagataatgggaaataaaggggagattgggattagaaaataaatgaagggttaggattaaatggaagagagagaatgaatggttatgatttaaagatgtcttttggtgagtgggaaatcatttccttatcccattagccaaacagtacctaaaagtatttaggttgttttctcttggggtaggaaactttccccagctcataaacggagtggtagattagcatatgattaattaagtattagcttgaaaacttaaaaagtgatttaatgaaaacttgaaaagcaactttcttatacgattttttttggtaaaaaaatgtatcatttattagttcggaaagcgtgtgcatggataatgagggagtagaatttaggaaagtgtagtgccgaacacagccttagctttgattaagatcacgttaactgctcacaatttatgaaaacaaattgattcggttaaatatgtgtatattagggaggtttttgcaacaaatgatttatgtgggggaacgtaaaacttcaagtaattttatggggtgagttttgcaaattttcctctaaagaattagtagatatatgatctaggagacatttccctattttctccatcccaaagtatagctatctttagaggtatatatggagattaagaaaacaagtatagtgaagtggtacatggttgtgattggttgagatggtaaaaggtagctttggacaaatttaaattgtaaaaaacaattgtatttaaagatggagggagtagattcataataatattggtcctatgtggtgaacttgagaacttgatattataagaagtagcagatgagaattaaaaatgctgagtttgttagcttttggtttcatagtttattttactgtgtggagcggagtggttcggattttaaagcaatggtttactagtgtgaagatatgggtaaaacagttgtgcttgcaagactatgatcattcctactactcctatattctattgactggcgatcgaaatcaaagaaattcttggaattagattaggcctggtaagatccattgaaatcaatggtggcacactggcgataccggtcctcttttttcctcactcgatagatttcacacgaaaactccagtcctaatctaatttcaacagactcgataattttttaaaaaagaatatatattgtgttgctgtaaagaacttattgggttatcttcttttgggcttatacttcttccaatcaaatcaaaattatttcctttttgttttgaggggaaaataactttccttatgattgcaataaacttgtgagaaggactaacaccatcattcctagtcctcttgccctacatcacaaatcaaccaggaaccaacaattgtgagaatttcatgatttaaaaccgaaaatccccctttcaaattggccaatcacaaattgaattgnnggtccgcctgagctcttgatgcaatctacagatggatcaagttactgtcataatcagtattaccctttggagagaaaccattggtagcatcatctctcttttcaactttttttttgacataatcagttatcactcttaccctttcgagacacatgtacgttaaagcgatctttaccaattttaaataactgtgtgtatccataattgaaaccgaacattaaaagagaaacagaaaagctaatatttatcaaaacgtcggattgaacagagcagacatgtacagatgtaattaggccctatttctttcaacttaggattattataatctagattattgagagtaggctgaaagaaacaaacaacttattgaagtagcttattataatctagagcccagcttattataatctgataagctcatttaggtaagctttttccagattattgggtgaaaaattatccaccatgccaccccactccctatttagacttaaaaacccaataatctaggctctaataagctaggaaagaaacaactaaccgcttattctactatagattatagcaatctagcttatagtaatctaactcaataatctagattataataatcctaagctgaaagaaacagggccttacaagaacacgtatatacacttcacactttacagtgagtttatgggctacaacgcctatagacacgacatacaaacaaacagaaaactactgtgagctagcaaagctatacctatataaagaatgaatcaaatatttgatcaattgccgccgccgagcaggtaacccttgagcgctttcgcaatggcaacggcgaccctcgtggctccagggaactggccggcgacgggtccaagcagcacaaaccacaagccgaggaggacgaagaagaatgcaacaagggcatatgcaggaccgtcgatggcggaagggtctccagcagtgtggaaaactatggaggacccggcagtggcgacgaggaagatgccacagttgatcagtagtctagcggcaggagggagctggcggtttgcagnnnnnnnnnnnnnnnnnnnnnnnnnnnnnggaacgggcattggtggatcagcggctgccgggttcaccgccgcgcgatctcccgtgatcttggaggcgcttctttgtgaaggctgtgagatttcagaatcaaataaacagggcattataagattcatcaaaaacaaaattaaaccattgaaaagcatgcatagctcaaagcagggatacaaacaggcataaatgtttgatactttgatatgaacttaaaatgcacagctcacttgttaataacgttttttatgcatttggtaacctactcctaacactacacaagcaggagtattgcatatgtgacttgtgatgagataacaataacgtgtaggtagcaaatattcttcaaaatgtagatacagaaatgataatgcattgcaacaatccatagaattagatcactcttttctagcattatgcatgtaaatcgcccatggggctaaactcttaaatctatctatcctgagtggtgtttcaggatgttgtaatcccttgattaagtttcttaggttgtcttatcagtaatcactgtcacgagatttagcctggtttccttttttgaaaatgatatacgtatgaccttgttgtccggctactgtgtacgaccatggccacaatgaaaggctcagacggcaaatgtctcactccgtgatagaatctgacatgcgcaggtgatgccgtaacggagtcggacatcagtctaacgctagcgtcgtatgtatagcagcgttcttaatttttctccctttccttttctggttgttgactcttttctggtcagttcttcaaagctgatcctcccattctatgcttcttctttcaccttcttttaatacaaagaatattgaactgcaattttcagaactagcaagaatccatgacacatgtaaaccatctcaatatagtgttccccccaacagggcatctttcagtcgaagaattcaattagcatagtttcatccaaaatggggggaaaaatccagttatatcagttccctgaaattggtcttggtttccacagaactcaaccgaacccccaccctctttctagtcatccctgcgctgcgaagagaatgcacctcgagctattacgtaaacctgactgcaactattccagcaagatctgtgaatcccttcgagaagggaggcacgaatttgggatgggaaagggaatccgaatcccttcggattcgaggagaagggcacgaatggggagggggaagggggggaggctttaccgggaagccggcgtcgcggttatcgaggccctcgccggagaggacgtcggggggcaggatgccgctgtcgtcgtcgtcgcagtcgtcctcgatcgcgcggcggatggcccccgcctcgaactcctcggcgccggagctcttcgcgataaaactggtcatcttcttctcgccctcggccgccgccatccctcctatcgggtcgcgggcggtggtcgctccccctcgcgtcgtcgagcaaaccctacctctcgccgcggcggcgccggggggagcgcggtgatcgatggggatcgattgggtttggggggatctggcgcgagcggggttgggccttcggatggagcaggctgggctggggactatatgtattattgggttatttgagttggaggaagaaatggaggcattgcggacgcggtgtggccgcggtgtgaaaaaaataaaggttaaaacttgaagccaacagagtggctatctcattcttcaaattaaattttgatatttttgaatcaaaatcctaatccaacaaacttgccaaccggatgaaaaccatccgactggccaaagtcctctatgcgttagctaaagttggccaaccaaaatgacaaagttgtcttaccacgcatgggccccacacattttcccctttctcctttcctgtatgtattgtctttccatcccagatcgagcaccctccctgcgctcctagatcgagcacgaggccaccacccccttcccagatctagtgtgcgattgagcgcacggccatcgcccccttcctagatccaacgcatgaccctattgcgcgccgccaccggcgtctatctgctacgccccttgtccatcgccgcgccatcgtccactgttgtggccgccgccatccccagactgaaagttgttggccccggatcaagcgctcgatgctaccgtcgtctctccggtttccaccgtcatcaagagccctgccatcgtcgcccaatccacaccgactcctacagcctacaggttaataccctcttccacaaaaatagccaattttgttggagatgctcttattagagcaagtaatatgctatctaaactaatatggtaaggtggaggggagaagaaaagagagagtaggagttacaacttaacttacatggataaaattaggggtggcatttgcctcttctataaaacttgctcatagacagaaatttttgttaggctcttcaaccaaccgaaattaatttggttataattcggttagcactctcgattaattgacattaggaaatagacctaattatgtatcttgatcggtgttaagttgtaagttaaatctagtcaaaagccatgtgtgttgctgcggcactataggatgaacatatggaaaaatattaattatgctccacaacactcaatattgtacactaaatgaaaaaacatactccgtaccaaagaaacaaaattgattgtggataacaaatctgtgatctatataacccatgttcttcgttagggctagctgattcttgtcctttcatatatccttttcatatccacatcattacagattaaacaaaaaattccctgtcaaagtttagtgcattagccattaatgcggtaaaaggcaaactaccataataatatcgttgaccgttgtaaacatgtaagaatggttgaaaaatatagtaaattcaaaattaaaatgaattgcatgggacagacccaaatgttcgtaccaaaatgtaaacctacttgatagagtgtgttgcacttaagcaaaatgagtaaccgcacaaaataaaatcaagcaaccaatttgccaaagaaaaacacccacgagcaatctcaaatggggagaaaaacagaacatctttaaaatctgagactaactcaccaaatcaatggtatcgtgtgatcgaattgatgcatatataatataaaagtcagacaaagaacacatgtactaacattgaagggaaagcggagggcaatatgtggtttgaagtgagaagtttatgcaatagtctaactatttttatagtctaagagatagaaaaagtaactgcaatctctgaagatcacttaatgaccagaagtattacataggggaaagaaggcagtttcagaagaggaaagaaggcagtttcaggagatcaattgatcatctgttgtaatggttgcatgcatgcatgacaatagaagaggaaccggccggtgtaaagaagtgtagatgggctaggcttggtctaacattaacagaagatcaaatatggctggttgctacttggtgattaggagctaatctagacacacaagttaaatccaacggttagcataaagtaagatgatgtggctgcaccatagaacaaaaaattggtactattgattacaccagagaacaaagaattggtattgattacagttagtggggatcaattgtttaagtatactagattactatgattgatgctcttgatgagttgatgtgttatatgtgctatttaattgtcaacatatatgttctgcagagagaaaagttgctacaattttctaccacacatttcggttatgactaaagaccggaccgaaccaaccaaaacataactattcattcttgagttttttaaaaatgtaatttgatattgagttttaaatgactgaatttccttaaacatgtcatatacttgcgtgctatactccttttcctaacttatgtttcctcgtttttcgtgtgcacatttttcaaattgctaaactattaaaaaaattaggaaagttgctttaaaaaatcatattaatctattttcaagtttgtttagttaattaaacttgtgctaatgagtccttctgttttgcttggaggattagttaccaaaatgcaatgccagacattgcctaaggtttgcgttcggaactacaagtttccatcttctaatatctcattttccgtagcacgttttccgaactactgaacaatgcaacttttttgcaaaataaaaacttaagtgaaattgtttttgaaaacttatattaatccggtttcaagtttatttaagttaaaacttagttaatcatgtgctaatgagccacctcattttccgtgtatgaaagagaagttcccaaccttttctctcgaacgcagccttaagtggtgctcgaccccatatcttcttttcttgcctcgcacgggaacatatgaacaatttgtatgataaaagcatgttagcaaaattttgtaataatatcgtgattatattgttttagcttaacacacataaaaaatggatctttgggagaggacctactcaaaattgtgctaattggtcattgacacaatccccatattcttattctcaagagtaaataggcacacctatcacaaaactactggctaagcattttttacataaaaccctaccgttgggggcatgttgtatcctacaacccatatttctttgctctcctcctgccaccggttacatgacctcattccctatttccacaatgaggatgcacttctctgtgctctccgcatcgtcgctaggcgtgaagtattggcgccaacctagcatatttcctgtcatttctctgccctagcccaacagcgcagtacgtgatttaatcgatgcctaatgaatgatcaaggagacctatatgaagggagaagagaagcctgttctgaacttcgcagcaggtaataattcttttcccccacttatttaatgcagatttggctatcttaacaaaccataattgtctatatggatgatggatttgaaatttcccctctaattgcaagtactatgctataaaagtacttattatttatgttacgtagcatccactaagctatatactctgaagacatccaaataatctaccatatcttaccatcctaaaaaattggtgattttctagaaacttttgcacataacaatatataagaatatttggcattggtagcaaaccaagtaaaacccacacacttcaatcctaccaaattttggtgttgaaaggttaattctagcatcaaactgaacaaacccttaatcttttaagttgtactctctatggtcataaatatttgatggtacgaagatatcatcaaagttttgaaatttggccatcaattcatattacatctaataatttttaatgttatttaatattttttaatataatatgcttataccattttttttaagaactatgcactttgagaagttattgataacataagccttaaaagttcgccctaacctattctaaatatcaaatattttattatcactaaagagaataatatgtaattataataattttcattatttactcaattaataaacaatatgaaaacaaattctattacttaccattctggccctattgtcccatatttccgtaacacaattttaccggtataattttcatgcaataattccacccatctccagcctatatagaggttaaaaaaaaggggaatatttgcccaaccctagtaaaacgtacaaaaaaaaagcacaatatcaaacggagtctattattcctattccaagtacaaatagagtggtattatttcccttcttcttcttttattcggcaacggattctatgggctcggccggccccacccagcgtgcggcccggaccatcacacccaatcgtggccgtccacacctccgcatccgacggctcctccgccctccacgtgtccccacgcagccctcgccctcccatttctcctatataataatatcccccacctccccacccacccccaatccaacccccaatctcgccgcaatccccatcgccgccgctgcgaaagctagggtttcgtgcgattcacctcctcggcgacgaccgagaccgcgagcgatttcggagggctcgatcgatggcggctgagggagagaagaagatgatcaccctgaagagctccgacggggaggagttcgaggtggaggaggcggtggcgatggagtcgcagacgatccgccacatgatcgaggacgactgcgccgacaacggcatcccgctccccaacgtcaactccaagatcctctccaaggtcatcgagtactgcaacaagcacgtgcacgccgcggccgccgcggcctccaaggccgccgacgacgccgcgtccgccgccgcagccgtgccgccgccctccggcgaggacctcaagaactgggacgccgacttcgtcaaggtcgaccaggccaccctcttcgacctcatcctggtataaaagcccccccctctccctcccccatcgcgcccctaccttttcttgatggggattcagatctgcggttattgctagatctggatttgttttcttggtcaatagctcgaggtgcattctgttccaagctttttgggatgtatttcatccggtatgtttgttactgggttggatgtggtttccatgcatcacgcattcattcatgtcagttgtggaaatcatggttgcgtgaatatcattagggaaaacaagtgtactttgtgcagatggggtaacggtatgattctgtatcctcatctgtatggtcgatgattgtatccatatgattggataaatgtgccctgctatttgtttgtttcatactggtaattatgtaaatcaggactgcgtagatgtggtaattgatattctgcagattttttggtatgatcggttgatgtattgctaccatgggtttttattaaatacaacatttagttaaagaaatacataaagagctatgcagttttgcgattgtatatatttgaagtatgaaatatgtttctagtgccatgttgtaataaactcgtccccttctgttttgttgttaactgttacacaattccttccctgttcataaggattttgtgcttctctatataacaagcatgatatagtatgaaattgattgtttagatgcatgcttgccaatttggtagattaggtcaagctttaaatttgttcccttctgtttgttgttatacattatttcctttcgtgttggtaagaatttgagattcatatatcaagcatgatatatgtttgtagttctatgttgtaataaattctctcccttctgattgtaatgtttttctttcctgttcataagtcaattgcttttgttatgtccttacattgatgcagcctccttatgattatgttcataaggaaattagggctgttacagataatgatcttacattgatgtagtcttgtgatgcatcttttatgtatgattgactactgtattgctaaaatggtgaagcattatcttaagggatttagtacttgttctgtatctctaatttatgatgtttcaggcattgagtaattgtgtctctgtatcttcactgtgatatttctttgatatccagtaataaattcattgcatactacagtttgtgatcacaaattcgttcttctcttgatcaattcattgcatactacagtttggggtcataaattctctctgctcttgttcatgaattgtaaacagttctgttattttgttcatttattctttctgctcttttttcatgaattgttaacacttctcttgatctaagagaaatgatggcagtctcatttttttctttgattgtcacaagaatttactatctaaattaagttgcttgatggtggtggactattaacaacactgcaattttacaatgagacgggttatggggtatcagtgcatgttaaattattgcaaaacaaaatgtatcatgttttaacttgttgctcaagtgtttgtataccaacttctttctatggagggtccttttttttttcttttttgtaaaatgccgtatttgttcacatgcactgttttatttgtgtactccactattgcggatctaactttgttgtttgtttctcatcccacggtgtcacgtacctatttctagtatttctgcatttcaatttggatttgctacacactcgccttttttcttgaagtttttacatatatctgttatttctaactttgttgtttgtttctcatcccacggtgtcatgtacccatttctagtatttctgcattttaatttggatttctacacaatcatgtgctaaagtaatttgtttcagttcatagtgttctcatttctacatttatgctttcttttatattccaaagttgaactatgtattccttttgtggctgaatgttgatctgtgctttagccatagtgattactgcttcttataccatgtttatttgattctcaaatcccacaggccgcgaactacctcaacatcaaggggttgctggaccttacttgccagactgttgctgacatgatcaaggggaagactcctgaggagatccgcaagaccttcaacatcaagaacgacttcacccctgaggaggaagaggagatccgcagggagaaccagtgggcttttgagtagaaggcatcaaggcctctgatgtcttggtgcttagatccttactccgtatctacgtatgctctgcttttatatgtcgtgctggttgtaagtattttggagtccgatgggggttcatgtgcacgtttagttggttaaatggttaagttctatccaggaaaaaaagaactgatgtggtcagaactactgaacctgttatctgcattaattaatactatcaatctgcagtgaaatgctttgctgaaaagtatgtcatattttttgtgcgaccttagcccggtggagtggtggagttacgatctgatctcaaatggcatgggtcaaatatcatctctttgccgtagcgtctcttcgcctttttgcctgggctgcatggcatctcgttgcttattgactgtctttcctaaatagtgttaggttgaatttgggttgttgtttcgtggacattagtattctcaggagataactacggatcggggtatgattctctgcagcttgtatttttctctcctctcatgggtcgggttgcctcacttctatgcaaactttttttttaaatctagttttctaaatgattgatacaatctacaatccgattacgccgttttattcattttcacccttcaatttaaatctttataagcatgaccatattatgagaacaattgataatattgttaattgaaacatttttatatactatatgaaacatcggggtgtaacgattgaaacatcacttaatatttactgaaacatccaaataatacaaggtgcaacattaacaaatgaatcaacaaaatatcaaaataagtcacatccacataacaccacgtacaacaatagataaaaattgattataacatgaaaaattaaaaatgtccaacatatttggattccaactaaaacattcaatgtgcaacatatttggattccaactgaaagattctcttttcttttcacacgtgaaacatcgaatttgaacggtcgaaacatatatattattttgacgatataatcatgttagatcttgttatgaagtttaattgtaattagtacgatggtataaatagattcaagaaaagatgagtaatttaaaagaaaaaaagtatttaaaacttggtaataaaactttatcctttattacacataaggcacatggtaggttgcacgtgtgagcagaagcacacactaggctgtaggtgtgaagagaaaaaaatagaacacataaagtataagtagcatccgattttttccacaataaagtatagtagtagaccgatttaaagtattttcggtattctcattgaccgttttaacgtattatgtaatatagtagtatgtagtatcactattggcaatgagatctagtgggtgagtcaactatatgacacttccattcacacttcctcccatatatgagcgtttgagaggagataagaggattgagaccattaacgcatgattagttgagtattaactattttaaattttaaaaatagattaatattattttttaaagtaactttcctatagattttttttcaaaaaaatacacggtttagtatattgggaaacgtgtgcgtggaaaacgagatgttctctctcaatctcccaggtctcccaggaacgaacaaagcataatgctcaagtgaatcatctgctcgtgtcaagccgtccgcggtttagtcgctacagtcataattcagaatttgttctttatttttttttaaaaaaagaaggtaagaagtttgccttatactagctctgtattaattattttaatagtagatgacaacgttggttttgaaaaataatgtttggctgttcgttttattaaaaaatataaatacggtaaagtgtaaatcatatttaaaagtttatttaatgataaaatatgtcacaacaaaataagagatatttatataaatattttgaatacggcaaatggtaaaactggcgaaagtcaattatgttgtctagtttcttaatataaactggcgaaagtaacatttgattatttgttttattaaaaaattaatataaatatgctaaagtgtaaagtttatttaatgataaaacacgtcacaacaaaataagtggtatttatatattttgaatacggcgaatgttatggcgatgccaatgatgtcatctatcaaagagacgtagaggatatatatcgatgaaggagatattctgaccagaattaccggaaatggaaggaaaaaagggccaattgcatatttgccactagtttgaaccggtatcgtggatttgccactgtaaaaagtgtaattgcatatttgccatcaaaatggttggaattcaatatacttgctattggactgacagtttagataaacaccattagaagattggtttttatgaaaattaggacaagaataccccttcccatgaaattgaaagattaacacatcatatgattcattcaaaatcttgcaattgacaaccctgactacacaacagaacattgctacgaggtcacaaaatcttcctagcagttcctgctgctagtgatgtagtatgtgttggctttgttgctgctgcccaaacagcctgttaatgctgccgccattgccgcccaaaccgcctgttgttgctgtcatccaagccgcaaggcacaaccgcttgctgctaccgtcggcccaacccgtcaccgttgcctgctgttgctggcttgctgctgcccaagctacctgcaaacctgaccgccgcagcgcctgcttctgttgagaataacatctccatggtaggacaagacgttgaagcataacagatgttattctccaacccctttggagatgttaccttaaaccatgtactttacttctatctcagaaaaaaaagcctgagagttccaccctttgtaagaagccgccttttgctcttgtatgttccttgggttttttttcctcccatttctggtaattcttacttcatctgaattttgactcttgcactctttttaaggcatagttcggtaggatgggttcccaacccatctcgctcgtgttccgcgcgcacacttttcaaattattaaacagtatgttttttgcaaaagttttctatacgaaagttgcttaaaaaatcatattgatccatttttgaaaaaaaagcatatacttaattaatcacgcgctaatggatcgctctgttttccgtgcgctggagataagttcccaactagtggtagcgaacacaatctactatactactccctccgtcccagaaagaggcgatttctggaggggaggatttgtcccacaaagaagcgattccagcctaaaaaactagatattttatgtatcgcatctatctgtgggccatagtactgagggcggtaacctttctctcctctcacaccacagaaaccttcgccttgtttgaatcctccgatctattaaatagccctccggaatcttgctattaaggagtattaaatatagattactgacaaaacccattccataacccctgggctattttgctagacgaatctaacgaggtatattaatccacgatttgctacagtgatgctacaataatcatatgttaaccatggattaatatacatcgttagattcgtctcgtaaaatagcttaggggttatggaatgggttttgtcagtaatttacgtttaatactcctaaatcgtaagattccggagggctatttaatagcccggaggatccaaacaaggcccttatctcttccccttcccggaattgccacctctctctcgcgtattcctctctctcgcgtattcctctcgtctctctctcgttctccgcacctccagatgtcaaatcgaagccgcaagcttcccttcctcctgatcctccccgcacgcccctccgtgctccacgtcgcttcccctcgctcccgcttctcccttcgatgttctgcgttcaccaggatgcggccgctcggatgtggtggcagacagttgcgagggtttagatccgataaaggagacagttccggtgggaaggattttgctcggtagcaacgttcatgaaagtagggctgggcaatcggttataaccgaaagttcgggtcgggtagttcggtttttttaaaagatcggtctttgaaaatagatgaccgaagttgtccataaaaatccagaaaccgacaattcggttaaccgagctttcgggtcggtcttcggtctcaaccgagtttgaccaaacactacatgtagcgcccggagcctaggtagctggcggagagaacggcaggcggcagccgggaggcacgcgtcgccgcgtcggagccctgaagagcagcggagaagacatcagagggcagaccggaggcacgcggcggcatgggtggaaagaaacccttcaacaggcacgagcagtgcagagcctcggtggggaagaagacaacgattggctcgaggaagagaggacaacgacatcgacgagctggctcccggagggcgggacgtggtcccgtgcgcggcaaagtcggatgctccgattggatcacggccgtatgtcgccgttgt

SEQ ID NO: 10235 - DNA, 6822 bp, Oryza sativa
gggagggcagcagaaggggagcggcgaagccctgctggttcgctcaattcatcacaggtatgctcccatacatcttttgcatttgtactaatatgttatgtttgagtatatatgttgcgttttagttttagttccatatattttagcacatctgtagcacacacacgatggggacttactggtgtcgacgtggggttagtgcaacttcgctgcgttataagtttatcagtcgtctttttttttcttcacataacatgtctaattccgatcatgtttattgcagcgtcgttacgctcacgtccaggtgagacgtggttacccggacttcgtgttcgagtttgaccgtctccagccgagcgacgtcatctgggagccgtacacagaagaggccgtcgctgcgagagcaccgctaggactttcgtccttgtgcacacgcgaccaggcttactggctcaccatcctgccgatggtgttcgacattttcgttgagcctcactgcccgcagcgtgtgatgagacagttcggacttaggcaggtgtttccgggcaacgtgcagccgaccgtcctccctgccgaccactcgtgagttcggattgttcatttctaaatttttatgataattacttcattgagccatataatttacctctcttcacaggttgactcgacggggacagctagcaggcgcactttgggctccacgtgtacagcagtacgttgacgactgggtgttagctacagaggaggtgatcaacgagctcttcccacacacggaggagaactaccgtgactaccttcgttggtaccttcctcgcactcgtgcgcgtgtgaccttcactccagacgccccagagccgcacgttgccgctgtcacggacgcgtatcccacgcaccgtgaccgagactacttcgtggcggtacatccaatttgtattacttcttacaattatttcatttatcttgcataatataggacaactactgaatttgttatttccatcttgcataggctgatgccgcacgggatatcagtgccgatatcaccgcagtccaagtgaggttgaacagaggtttgcacttgactgacgttgagcagagggtgaccttcgaccggatgcaggagaagatgcgtgcggtcatgcgcgtcttctcctgtcgcagcgccgtggacgtcgtacctccagctggtccggtacaaccacggcctcgcgcgcctaccgtcggagcaggacctcgacctacggcacctatttcgcacggtactgctcagcccagaggtttcttaagttttgtttctatttttgtacgaaaacatcaccccgtcataacttgatgatccatcctcgcaggacctcgtttgccttcgagcgcccctagcttcggatcagtgcgacctacagcaccggtttcgcacggtacagttcagcccagatattagttcatttttgtttcagcttttgcacgattatgtcaccatgttttaactgcacgtttcctcatcgcaggacctcgtctgccttcgagcgcgttcgcaggcacgaccggcgcttccacgagctccgcaggggcgttcgccacctcttcgggcgcgttcgccagctcttcctctcacggagcgtcgatctctcgcccacacggtactttactttttattaatactgttaaatacctgtacgaaactgatggtccttgtccagcaggatttgcagccgggatcttcggtactggggcctcttcgtctcacgccggtaggactggtcctactagccagttctacgacgacgacttgcacggtgcagaccaccacgacgtactaggctcctctcagcttggaggagctccagaggcgcacactcaggagcagccagaggtcacacctgtacaggcaggacgggttggccgtgccgtactcccggaccgactcacgtactcccacgggcacattagggcgcagggtaggagggacaggggtaagaggcctcgtcagtagtgttctacctcttcagtccttatgtgaccgtttcttttggcttacaaacttgtaaagcagtactacttttgctattactactgcagtactacttgtgtttgtctcgtctacatagttcttttcattcatatggtgctagaacaacttatgctcacgacaacacactttcggcgctgcacggtagtgtcagatccagtagcgcgcacagtctacaacagcacacatgaaaagcggcagctcgagttatcactatcaactttcggcgctgcctgtttacataaagtgaatcacgcccacgcgtgatcgtcttgtcacatctaatgaataatgtatctcattgagttcacatatattgcagtgaaaacgacgctatataattgacaatctgaaggcaacctcttcatatcttctttcccactagcacacaacacacgaaaatggaagcctatttattggtaatacgtaatctagatttgagattatgtagaacattcttcactacaattttacattttggcagcaaaccaaatatgatcaaatgcaattttaccttaccaaatatttggtcgtgaagaaaaatttggcactaacaatccaaatatgccctaaaaattaataaaatatttgtacggtaacaaaatatttgtacggtaacaatccaaatatgccctaaaaaataataaaattgtattttaccagtcttggagattttaatcttgtatagttttcaatataaaaagatttgataactattgatatttatacaaaaatatagagcacagtacaaaatcacccttgcggagggcggcaagggggccgcctgcaaaattccatgccccctcgccgcccatttgcaggcggccccccgcacagtacaaaatcgccctcgcggagggcggcaagggggccgcctgcaaatttcgttgacggccgtcgcccgagagcgaacggccgtctgccacgtcattttcgccgccctctgggagggcgatttttaaaaatcgccttcccagagggcggtaggcgactacttccgtcaattttcaaaatggaaaattatttttgtaaaacttttaataaaaaaaattaaaaataaaaaaaattccttactcgccatcgaaatctcgattcgtagccgaacggattacgactgacgggggtcggagaagaaaattccgaacccccaccaaccttcgcaaccacctgcgtggctgcgtggtttcccatgggccatgggccatgggcaccgaggaggtataatcctgctttggttaaagaccacaacagagagactccttagctggttcaagtgtctccaatttccatcggaggaggttacccatcggacgtctaataaaaaacgaaatatcggccgcctctcacagcccttagtagcagcgcacctagcactacatttaaagcgcaagagcatgcagctacatgtgctagcctgtgtatgcagcatgtacggctactagcactatattataatgtacacatatatttttattctttgaactcttttctcttaaaatatatatttgatatgtaatttgattgcatcattagatttgttataataaaatctttataacaagatctcatatggctatattttgatataaaaaactactgaaacatcatgaaatgcttattgcaacaacagctatatgtgacatttcaaaaacccattgcaacaaaaaaaaactttaaagtgcaacatagtccatatctaattgaaacatttgtttctcattgagtgaaacactgaattttaacagtagaaacatatatatttttttcgtcagaatataatcatgcaagatttaataacaacaaatataccacaataatcggatcatgaatcgcataattagtttggaagaaaaatagttttaaagatcatgtctcaatttgcatgttcctatatacttgcatgcaagttgtgcatgcatacggctgagtaaaagtaacttggaaagagaaaccaggaaaaacaccaggaaaggtaaatcaattttagactagtatagaggaggaagctggcgtccgatgtttgtcttcccgtcggacgcgcgacacgaagcattttccatttccatctggtgttcagttgcccatcgagatattaatgccatcgataaaagcaacttcctagtttctagaaatgccattgcacaagcctctttctcccaaaaataccatcaccgtcaattcaacaccattacaaccgttatttttttttaacaatgaccattttcccctcagtgcagaatatacccagtttttatggtaaaagaaaaagagagatgaaacagtgaaaatttctaaccctaaccctagaacgatcctgatccaggcggctctcctagcggcagctcggtgcagggctcggtgacagcgatgaggcgtcggtccacggtggcggcatggcggtccatagcggcgatggggcaggacgcggcgaggaggtcgcaggcggcggtgcggctatccatagcggcgatggtgcggggctcggcgacggtccacggcggcggcgcaacggtccacagcggccgcaagggagaggcgggtttctagcggcggaagcccccaccgatggctccgtccctgctcctcctcccagagaatagctactggacctcggagtggagatggcaccgccgccgtactcgcctcacgaaccaggagcaatgacattggcctcggggtttcttctttctctttgtgctcgcttcccgccgatgtccagtggtaggttaagtttcttttggatttctcttccgatgcagagatactgagttgctgcctctgcagtggtgtttgccagttgctcctcctcgtgtggaggtgcagcgcgtccggacgaggcgaatgtgtgaaattggtttgtgaatttgatttatgtgaatttaattctaaaataatttgattgatagcaaaattgatgtctgtatttagatgctaacagaaatatggatcaatgcaaaataatgttgtgtgagcaaacaatgcaaatgatgttgtgtgagcaaatggttgcctggggtaaaattgtcttttcatacaacttaacggagagatgttaataacagtttgactgtgatggtatttttgggagaaagatgcaatggcatttttaggaagatgcttttgtcgatggtatttctgggattatggtgcttgtcgatggtatttcatggattttctcttaaaaaataatctaggaagtcggtcgatcctactgttcatggtcatgccaaccatggcaccgaccattttggatggacctgaaaacatggtagcgatctatcttctttaggcttttaaccaggcaaaagctatgttgatgcacagatgcactccaaagagtactgctatacgtacgacccagttgtacaacgatagacatgcaaccatagatcaattaaaggagagcatcttcatatgcactgtggccgtttacaactattgatcaaatccaatcgtacgtgaatcggacaattgggtcgtatgcatagaaaaatttcactccaaattatccagattattaagagatgctttgccgcacacaatggaaaatctctttatccaaaagacaatcggatggattcatgtacaaaacatctctccttcagagtgaatcttaagatcacacatacatattcgactaaaattatgttccaagatgcaaaaaggtataatttagactacattgtatctgcagccagaattgcatacaacctaccaaacgcaaactacatagcgatgcaattatcaacatgcccgaccttacaagtagcaccatctagccgatgctaagtgctttcatattcggagtttccttctcttggacctcccttagaatcttgtcacattcatcttcctcttcctcgttctcttctggcccctcctcctcttcctgcatttcctcttcatctgatctgtaatcaatatagccatcgccgaatgatttgggtattttctgcgcttcttccatgaaagtcatgatttctccactagtttgggctgagaaagtagggaaatagtcattctttgtgaagtagatagattgtgcctcttctgtgagctccctcgggaaattcttcaagaaccatggatggttctttatttcctgcatggtgattctctatacaggaaaagaaaagagctcatcgaacttgagttctagagtaagaccacagctcgatatggctcattcactagtatggtttaccacatgccataattaatcaccacatgaaaataaagtcacttatggatatcaatatggaaaccgagataaatgttaacttgcgttcattaccttcgatggatcactgacaaagattcgtgatatgagttctctgcaatcagtagatatgtggacttgctgtggtatctcatattgaattgcttttattagctgcaaacgaagataagccgccggaattcatgagtgtaaacaagaccgcaaatatattcacagaaatgccaatgaaatatatccatgagattataggactgagctatcaccttgacggtcttcataatattcttgggatcatccttgtcttcaatgagtaggcccccacaagcatgacatagagagtaaccccacacgaccatacatctgcaagctacaatataaaaatacacttgtcactaattaattaactgtgctgtctaaaaaacaggatgtcacgcccagaaattcccgaatagaattccaagcaaaatgtgcattaaaacccccgtcgaggaccggccggggtacacaaacgacaaagtcgacatacagatccacgtcttacaaacattataaaagt

SEQ ID NO: 10236 - DNA, 7353 bp, Oryza sativa
cggcgtccccgacccccgccgtgtccgtccagagctgggcggagcgcgggtactcggtggtcaccgtccagtgccgcgaccgccccaagctgctcttcgacgtcgtctgcacgctcaccgacatggactacgtcgtgttccacggcaccatcgacaccaccggcgaccaagcgcaccaggagttctacatccgccacgccgacgggagccccatcagctccgaggccgagcgccacagagtgagccaatgcctccaggacgccattgaacggagatcactagaggtatatcgaagccaaatcgacccaaatttccaacaccaagatgcaattcgttaattgatttggaagatgacgctaatgtgttcgatttcttgggtgtttcagggagtgagactggagctgtgcacgccggaccggccggcgttgctgtcggatgtcacccggacattcagggagaacgggttgctggtggcgcaggcggaggtgtccaccaagggcgacatggcctccaatgtgttctatgtcaccgacgccgctggccacgccgtcgagcagagcgccattgatgccgtgaggcagagggttggcatggactgtctcgttgccagggaggagcaccggccgcagctctaccagaaagctgggccgcgcgacgccgtcgatggcaatggcggcggcggcggcattgggctgttctaccttggcaacttcgtcaagaggaacctggtcagcttgggattgatcaaatcgtgctcgtagacatgaaaacaaaatggagaatccaacaagaacacaacaaattcagtcgagacagcttgttcatcttgcttgctgctactgttgtacgtacaacattctgaaacacaacatgaaaggtgcagaagtggctgatgaaatctcaggcatgtcacattcggatcaggaaacagagattgcaagattggtgacatacatccattaatggagaatcaagatccatggtagccaagcaagagttgcccaagggaggaggaacaagatgatactagagtactagagcctagagcctagcagtagaaaagttgggagagctatgtacatagggggaatttgatgctgttagtggtactagtgtgtagtgagtgcattcatgatgttcttaggtagagacagtagacaaacaatggaattccaggacggttggttattctgtactgtgctgtttttctgcccttctttggcaaaacaaaattctttgggttcgttagctttgcttctttctttctgtctgatgcttaacagtgtgtgttaatgcttttttcagctttgctgatggattatgtgactactactactatggtaattctgatctttgcttttgagtagtgtgattaagtggtggtgttgatcattaggtgtagcttgcaagggaaacaagatgcctgacttgggcctgtgtgagatagtagtagtaactggcaatcacagcaacaacagcctgttcttgcaacattgtcttttccttttgtggtatgtctgaggttgtgattgcagtggtgcgcaccagtgaggcccagtctagtttccaaaaagtttttcccgaaaacatcatattgaatctttagacacatacacggagcattaaatgtagattaaaagaaaaactaattacacagttagggaagaaaatcgcgagacgaatcttttgagcctaattagtctataattagccataagtactacagtaactaacatgtgctaatagtggattaattaggcttaaaagattcgtctcgcggtttccatgcgagttatgaaattaatttttttcattcgtgtcctaaaaccccttccaacatccagtcaaacgtccgatgtgacactcacaaattttcatttcgtgaactaaacaggccctaaagttactactattcatgggcatatggacaatgcagaattgcagagtggtaaatgggtacaattatattgcatggaaaaggaaatggctatatatgtatacaacgtttttctttataaaacttttacgacatgctgtgagtatgagtaaatctagattttctgtaactcgcatggaaataaggtcacacatgaatttcagaagaaacaaggttttttttcccaatcatctgtaaacaaggttccaaacaagagcctaaaccatgttcctttcttgaagttctctcccaaacaagaatctggttgccatttagctttcagaatgcccagtagcaaccatggcatgatttggacataagatttgatttggtaaaccagcaaaactttagctttgcctgaaagtttcggagtttcattgcaaagattccattagtcaaatgcctgatactgcgaaaagcaagagcttgtcccttttcagatatcagcatggctcatgccatcatgcgtccttgtttagtgctctcaatgctctctgaataaataaaaattcagatcagcagccggttttgtccaatccacaaccaccaactgcaattaaacactcaactaaccaaacaaatcctgttctgtccatgttgtgatgacctaattcttggttaaagaaacaccaattgattattcctcatgaactcagctctgatctgatcagatgggagagcacatacgaacaagaacaggcatctgcatccagcagaaactccaggccgtttgcacggcttctcaagtgtggcatctccatcaaaaccggcggcagagcttggtttcatgtggttgtgcagctttctaaatttgttctgttttgttgttcttcctagcttgtccactactgttgtcttgtgctcatgctgttatcttgatcagtggctcgatcaaaatggctttcttggctctctgccatgtgtatcggtacaggaggagtcaaagatggggtcatctgatgagacatgaactgaaggacatcacttgtgacaaattggtgctgacttgtgttcatgtctgaatgctagctagcagcaactaggacaattgttagtccatttctgctttgttggacaagaactctttcatcttcagacatggcaatgcatcgtactaatccaattcactgtttgcactgtaataatcccccatgcatgttctgcatcagggtcagattgggagacatgaaaatgacagggagcagttccagtttgctacaggagattgtactagtctgaatctgaaactttggcgatgtcaatgtggtggtatccctttggtttcagacttttgagtacagacaattacggttcatacgagtaattagcggcaacaattaagcgcaacatatgttaataataagcccactaatcagtatctgactaattaaatctctgacaggcacggagaaatctaaattgacgcctgaatgttaacacccttaacgactaatccctggacatctgcatctgcatctcagacagcaaaggagaaaacaacaagagtgtgagctagggttcgtcgcatgcaagcattcgtcgtcgtcgtcgtcgtctacctcgatcttgacccatctccggagctttcgcttgctgctgctgcttttggatccttgctgctgttcctcttgcggctgcctgtactttcctggctagctaggtagagtagctggctatctttaggctttagctgtgaccagccaatatcatcagatagctagattagttaaaagattattattagtagttaattaagcatgatactagtactagtagtatatgcattggggatgcagattaattagttgattagtgatcgtagctcccactccccaatgtctccaattccaaggaccaagaaacagacatgtctgcgagttcgaggttgctgaaccttcaatcccggcagcgtttttctgtcgtctcggctaatacgaatttaacacaaacagcgccttcgcttccactccaaactgcctcctgcaactgcaactcatcctgtagctgtagcagtacagaaaattcagaaagaccctgcaaacatctgtctcaagctcaaagacttttaacgaatatatacgaccaaccgatcaaaagaagatttttaaccagttcttcaaaccagcaattcaaatgttacttgcaaaataacctcaggcatgaaggtcattaaaatcgtgatcttaaatcaaaatcgcaggtctctaaataggatcgcaatcacataaccttatacataataatcgtagattctacttattagaatcataggattaggtctcttaattaggatggtaaagtcgaatcgtatgacaaaacctagtagtatattttaacaactatcaactactcctgtagttagttagtatgctgattaaagattaagcatgacagaaactagcacagattaaagctagttcttcaggacttcaggagtgtctgaaccatgattaacgagggtgtgttacttattgtacggctctgatcatggctaattacttaactaattacttgactagaccactaatcacgtggccgcatgagccgctgattggtcagcctcttgcatgcatgcatgcatgggctgtctggttggcgccttttcatgcacgcagccttgtctctctcacatggtcgcccttaagaccgggaagctgtctgaattctcatgtctctcttcactgacattgcttctgcttaaaccttttcttgttgcagctgctaatttaatccatccatccatccatcccagcttttgttgctaagcacgcacttgatggctttattagcgctaactctagcttaattagctttcttccaccgtgggctaatcatcttcacaacgactctggctctggcctctctttttgaccggtggtgatgatctggagaagaacatgtgcgtgccaatgcagtgcgaatcttggcgtgaagtttcgtcagctgtcactgacatgtgggccccgagtatcagcattgtgtttggatgtttcacctgaagattacccggtcctagctgctgaacttctgaagattaagattcagtagcccaaagctagcttcttcagtagaacttcagtgaagttgggcccactgtcagtcagagaagaaaagaagagagcattcccatatgtacgaagattaacaacatgtgtacagtttagacaacagttaattagagtgaaaaaaaattctaatgctaatttaataaggggtacaccaggagcaaattaagtggagtaatccaacaaaatgaaaaagaagcctagagacacacacacacacacacagaactaatagtacaattctgcaggtcgactatagaggatccccatctccaataagaccgacatggtgttacaaggaagcagggtagcctgatgcttaaacagtgactaatatcgggacagctacagcaattgcagttagactcttctgcctgaagatggaaaacctactggaactcagatacatcttttacaagtcagaaagaaatgaagccatctttggccgccaccggcgatcatggtgtgcggctgcagcagtgacagaccaggaatttcatggatcctggtcagttcatctcagtttcaggctccagaggcggtgaccttcacatcgcccgatggtgttctcgcgctgtcaggtatcgactgagcaggagatgcccagctctggtctgggttgtatgctgaggttacgatgtttgttgttcttggggcgacggagctgtgctgcccttgctcgctgctgtgcgtatcggtactagagattggaacagcaggaggagtctgtgcaagggcgggtgccgcttccaccctaggcttcttattcttctgttccatttgatagcttggtaggaagcttccgacaacaatctggaatccaaatgtatattagatggcatttcaatcacctcaacacagataaatagtacaacaaatggaccgtgtttgctcgatttatcagacaaaacatggaatgcgtttctgccaaaaatgggatccattcagatctcaattgaaggtaagaaaaagcacctgaacaggacttgctgccaccagaaggccagcaactccaccaccgacaacacggccatctgggctggcaagagaaacgctcatcccacctgaccgactccgtgttccgctgttttcagtaggcataaacgatccagacaaagatagcaactcaaaacgtccctacaataaaaataggggagatcagctgggaaccataaggccaatcagaaaattttcatctttagacaaatatacgaaatcatgtcatggtagatctgaaacaaaaacaaaaaggcatgtaaagcatcgctgtgtatgtcaagagtaggtctacaaacctcgtaagttaatgtgccacccgaggaatcaggttgacgcagtgtaacgtttgatatcacaccattagcagatagaatacagatagctcgtggtccttgttgagaaaatgatatgaccttcatagtcacatcctgaattacatgcaacaaacatcagtaccacatattattaagactttcaaaaagaagaattttagaaaataaggagcatagctataactatgcaaatatttgcaagaatagaagcattttaacaggcttgaaggccaaaacataatacatagagaagcatatccagtctgataaacaaaattcgagcatatccaaaattcatatcaaggtttgcagcccacctaatctaagcaaagcagtaaaaactaaaacgcctttcatctgtttatgtataaaacatgatatagcataaaatgtttcaaaatacataaaatgatgcaagtaatcacactatgttgcagaaaagcctgaaaccatatgattcacaaccataaaaccttcaacaaaacagtctgaaaattttacttgctctgtagtacagtattattcaatcaaattcaagtaaagaacacattcaatcattgtcaacaagaactcatacatcttgatcaattgaacccaatgtaagatgccagtgaagacacaagaaaacgttgatttttacatacctctccaggagcaacagtgatgatgtgaggagtaaaattcgcaccagcagaacaagccaccatttcacctgccagtacacacaatggttaacaaactgacggcaggtaatttcgaaacgaggtaaaaatgctcaagagattgcaacaagcgcaacgcgactacagcagcccgcggacatttccatgacactgaaatttcagtactttatgcattcatgatgcttgacaacgctagcatgctccaatccaaccattccagctcgtacaacctgccagaaagaccagattcgccaggacatcgcggccttttcgtgttgccatcagcaacggcagaagcacaacagagacagggatgatgattgatcgaaaggtaccgg

SEQ ID NO: 10237 - DNA, 2970 bp, Oryza sativa
ctttcttttaatgcttgtcctctcgatcgtaacgatatcgcgagctggatttgcccgcggctatgtggtgtgtaatagtagtggaatgtaaggctaggaattcatgtgtgggttgggatctgcattgggatttgttggtttggagtgcctgcgttgctactgattcagagttgttttagagctttcccctggatagggttttgaattcctgtttcttttgcaaggagtcgagtatgggtttcaggtaggactacttctgcggggatgggtttagacaaaccgagtgcagttcagcttcatgatatgcggattgatttggttgtatatgtgctgcttatttcaaagactctggttttgtctgagtccatcggacataagggctttggatttctatattaggcaattaggcatgttcatactgttacgcataaggccataagtacaataattgatttcgtatacatatttgagcaggctgatggtgattttattattcatcattgttcccattgtgaagattagctcttttgtttgacctgcctgccttgtgctagcctcattctttgcacttggtgtgtttcccaacatctttaccacatttaacatgaaatgatcctagaacgcaaatgaagattaacctactagtcctagtcaattctttttcaccgtcaagtaaatcacatgcctcgttaacaaaattcagtaattttcaaacaactgggaaagttccttgaagatgtttccttgtattaaagaaaatgtacttccatgaagaccacataacttctcaatctaggtttcgctggaaagatgatgccatatcaataggataccatgaaaagttccattgcttgatgcttcttacggcttatgcttattgatctgcaggagggaaggaacaccatatggccacataaccctcaaaccggatggagttactgtgtgatgattccttcttggatcgctcagacacctgaagctagtgcgactgctgacaacttcttgaaatccatagttgtgagtactgcttatattatcatcacgttatttttgtcagtcaatttggattgacgtacagattggaaatgttgtgtctctggtattaccgctatgctacaacataaatgtgcttggagtggattacaagtgagaaaaccttgttagaccaataaaaaggacaaaagaagttcagcacttatcaacgaagaactgagcttctttcaaaactatctcatattgggtagtggatgccaactttctaatgtattacctttttattgttctttcattttgagtaaatcgtgtcactttccaatattccaccatacttatcaaactagtttattaggctgctggactcacaaaactgtacttttctttaaatcactaaagggtcacttttggttgttagcacactgtcctgactcttaatgacaacatggcgtgttgaggcatacccctgtatggggtgcaaattttgttgtgataaccaatcgctgacgtgcagtacactagaggtgattctccctctccgcacaactgcctcacttgtctcagtacacagggggtttgagttgggggtgagagagaactatgtaaggccaaaactcatgggggacaagtgcaaatcacaatagccatggctgaagtcattaactcacgtgcagcccatgccacaatggtgtatgccaacatgacatgccataggaagtattgtgctaatgattcagggtgacctactggcagaaatatactttttggtgttttggtaactgtggtgcatcttacctctcttttggctcactagtttagtcgtgatcgacgggcaagagacacttatgtaattctgttgcatatatcatgcaattcctgtttgttgtgaactttgatactgttctgtttatgatctcattttaatgcccataaaggacagttttacaggatacatgttggtatacaatctccagaaggcatcagctctagccacggagttcttcgaaggtttagtgactttctaaagttatcttctgatgtaagttgagacacctctttgctattttcttctttcacatgccaagtgtctttaaattgtaccgaccttctttcctgagctagaagcccactaacattttcagttggaacatacctttcaagaacaacctccagtgatttttaaataagaataatcccctatcgtatcctgagtggtctgccagattaatttatctggcattaaatttgaaaatgtaatcaaacctttgaattggacttgcatgcctgcaagtcgactctgaatgcacaattgcttgcttctccagtgacttccgttgcaacttaggatttttggtgcattgcatcacacaggtagtcagacttcagatactttaaaacatactgttattataaatcttgacttagtgtatacggtatgcttacctgggccaaattagtttttacagatttttgcatcttccgctggtgacttcataatgaggacttcaccttttgcaattttatggtttctataatgaatgtggacattttggaagtctcatcttggatatgattctgagaaaaaaagattattactttccattcgacctctaatccaatatcatttcttcattctaagattctcccgtactgcagcttaagcaggaatttcccagaaaaggaatcccccctgctccaccgaagcatgccttttcaagaataaattcaagcagggtgcttctagaagaggttagccgttatgtatattgattaatttttgctttgttcgatgtcaaatactacattcagttgtgcttagcctttttgaccggtggttcttgaaatgttttgtttgcagagaaggaacgctttggaggagtggatgcaaaagctactttctgacattgagttgtcgagaagtgcacctgttgctgcttttcttgagctggaagctgctgcacgctcatgtatgttccg

SEQ ID NO: 10238 - DNA, 16774 bp, Oryza sativa
  unsure (1)..(16774): unsure at all n locations
cacattggacctcaggaataacaccctttcaggaagtgttccttctggtaattatcattaatcattaaacaaaaacagttttaatagaaaatgaagagtttaaccatggtgtcatcagtaattgtaattagttagttttgtgtttcatctgagtagaatccattgattattgtaggcctgaagaaactgaacgaggggtttcacttcgataacaattcagagctctgtggagctcactttgattctctgaaaccatgcgcaaacggcgatgaagacgataatgaagaaggcagtaaaatggctcgtaaacctgaatcaaccaatgtcaagccactgcaagctccacagactatgaatgtgaacagagactgcgacaatggcggctgctcaaggtcatcgtcgtcgtcgacgacgctctcttcaggggctattcttgctggaacaatcatcatcatcggcggagcggcggcgtgcgggatatcggtgatctcgtggcggcgccggcagaagcagaaggtcggcggcggcggcacggtggagagcttggaaggacgagctagtagtagcaatgcgtcgtcgtcgttgatcaacgtggagtactcgagcggctgggacacctcgtcggaggggtcgcagcaggggctccggctatcgccggagtggtcgccgagcgtgaggtacaacatggaggaggtggagtgcgcgacgcagtacttcgccggcgcgaacctgctcgggaggagcggcttcgcggcgacgtacaggggggccatgcgcgacggcgcggcggtcgccgtgaagagcatcggcaagagcagctgcaaggcggaggaggccgacttcctccgggggctccgggcgatcacgtcgctccgccatgacaacctcgtcgcgctccgcgggttctgccgctcccgcgcccgaggcgagtgcttcctcgtctacgagttcatggccaatggctccctctcccgctacctcgacgtcaaggacggcgacgtcgtgctcgactgggccacgcgtgtctccatcatcaaaggcatcgccaaaggtacactgtacttcaccgtgctccgtttggtctgaaatatttaacgtttaggaaaaaatttggttaaattgttgagatttaatcatgaattttatatttttagaatttgtagacaagattcgattgaaatgttaaaatttggtcatcattctcatattaaaaaaattataactaagatccggttaaaccgttaaaatttggtatgaatttattttaatatgaaattgatgaccaaattttaacggtttaacggatcttatttatattttttgcttttgaactaagaaaataagatgttatttttgtttttaatctaagcaattgagaatttagttatagtcagaattttaaatgtttgacggaatgtacattgttctgaacgctagtaagagtttctcttttctgtttgaactacaaatttgaagtttttgtttcgtttgttcggcgttgagattgactgatttaaatttgaaatggcgaatttgttcaggaatcgagtatctgcacagcagcaaggcgaacaaggcggcgctggtgcaccagaacatctgcgcggacaagatcctgatggaccacctcttcgtcccccacctctccggcgccggcgagcacaagctgctcgccgacgacgtggtgttctcgacgctcaaggacagcgccgccatgggctacctggcgccggagtacacgacgacggggcggttcaccgaccggagcgacgtctacgccttcggggtggtggtgttccaggtgctgacggggaggaaggcggtgtcgtcggagctccgcctcctcngcggcggtggcggcgcggagtactccggcaagctggacgacctcgtcgacccgcgccttcgcggccggttctccaggcccgaggccgccaagctcgcgggcatcgcgctgctctgcacaagcgagtcgcgggggcagcgccccgccatggccgccggtctgcagcagcttggcgccacccagtagtgacagcgtcaagctgccattgtcactgtaggttcaccttgtattattagctaggtgcctaggtgttgtaggagctagctagctgccattgtcgttcttccaagctccaccttcggttcctttctcaggaactcgatcgtttgcaagttagccattgttacatttgccagaattgaagaggttactgcatgattaacactacaataaaattttccatatatgttttctttttccaaacacaaacatacaagttcaaattcaaactatacaattaatactattgactcataattttattttcggaattgctagaaatatggcgccatatgctacaatcgatttttttttcagccacttagttacacctcatttacaccccacttacatatgtaattagtatgtaattttcgaatttacatatgtaattttagtacttacatatgtaattctgagacttacattgtaaatacactaaaattacatatgtaatttagggacttacaatgtaaatacatgccgactattttttgataaaaaatatgacgccataaatatagctacaccctttatttttttaacttatatatttgtgaaatgatatactccctccgtcccaaaataagtgcatttttgtactatattcatgtccaacgtttgaccgttcgtcttatttgaaatatttttatgattaccatttttactgttattagatgataaaacatgaatagtactttatatgtgactattttttttagttttttcataaaattttcaaataagacggacggtcaaacgtcggatacggattttcatgactgcacttattttgggacggatgtagtattacatattgatctatcttgttgaagatttttttagtgatactcaaaaacgaatggacgtactttcccaaataataaagctacaagtaatgtactcattttgatggagtaactttgaatctggcggttagttcgatcttcgtttgatgaaacttgagagccaattgtgcgtgctgacgagggcgacgagaggaagccgagatctttgtttttttttcttttttgcagtgtgccggtaaatcagggcaatgtgcttggtttgaattggttttgaatgcgctcatgcggcgtgcatgtaggatgttgatttcggccatgatttgaatgccaccgtgacgaggcattgaagccagtggcccagggatttgattactcttcttgcaggttgacgatctactgtgccacactgccgctgcaggggtagagggtagtgtgtttgatgatgagagaattgagaggtcagaggaggcgcttcagctctggcattaaactctgacgaacatgcatgttcagattcagagtgcagagtccactagtatttcggaatgtaaaaaacattaagcccagtttagtttcaaactttttcttcaaactttcaactttttcatcacatcaaaactttcctacacatacaaacttttaacttttccgtcacatcgttccaattttaaccaaacttttaattttagcgtgaactaaacacaccctaaatcccctcgaaattttggtgaaaacttttggattttgaacacattattgacaaattcaggggaagaaaagtaggaacttatctagctggaaacacattgttagcaactttttgtgacaagtcaacgagcacgattgtagcacctaacgctttgcggtgatcttaaagtcgccaaacacctcaatctagcaaaagctaaatcaagatgggttttgataaactaaactggctagcaaagccgatttagatgaaactatggataactacctgtctcgtgagcaaaatggaaggtttttaggacaaatctacaaagaggtgtcgcactctcgcagcgacagcggatgatttacagcgcaaatcgacaaagatggatagactaaactataactagaagtaaaagaacgattcgattgattgatagttgattgtgtgtttacaattgaaccggccttttcccttacatagggggtggtcttgtcctctacaggctctcctccaatccaactcaggatagaatccaaaggaaacccgaaacatgccttctcgagtaaagaaacctcgagacccgacgaaacggattcggacttggactctgccgatcagaccggccaccagtctgaccggcctactggtggcggtcagaccggcctacccaaaggaaaaccggcagaactccaaactttggcaattttccctattctattcctaggtgtcaaatttaggtgtaaacacacatcctacccaaacccacgtatatataaacccaaaattttgggaatttcgattggacggagagcgttcagtagttgatgaactgggaatttccacatgttctgaattgaacccatgacgccacatcaaattttgatttaaatttcaatggcaaattgttagcccttgattgagtggctggtgctccacgtttcccgccaaaacgtgcaacgcggcgcgcgccatcatgcacggatcgcgtggccaatgggaaatttttccccgtttccttcggatcgcgcgcggccactccaccggactccccgagctcgctagctcctccggccacccatgtcgctggcgccgccggccgccagggtgcacctgcaggaggtggcggtcaatgtcaacaagagcctcttctgcttcgaccacgactccggcgccacctcctccggcgtcttcgccggcgacgaccccctcaagttctacttccccctcttcctctaccacgtctgcaccgtcttcgccctctcccgcgccatcaacgccctcctccgccgcgccaacgtccccctcgtcatctcccagatcctcgtacgttcgcgcagcgtcgtcttcttctccgtctccggcaaagctcgccggcgtttttgattggttgatttctttttcaatgtgtaggccggcacgcttcttggcccgtcgttcctcggccacatcgcgccgcgcgtcggcgagctgttcgcgacgccggaggggtgggtgctcatcaacacgatcggcggctacgccttcacgctccacatcttcgtcatcggcgtcaagacggacctgggcatgatccgcaagtccggcaataaggcgatcgccatcgccgtgctcggcaccgcctcgccgcacctcgccatgtacatcaccggcctcgcgctcaaggcgcgggtgccggcggcgtgggcggcgtcgttcctcctcacaaacctcaactcgtggtggtcgctctcggcgttcatcgtcgtgtgctgcacgctgcacgacctcaacctgctgtcgtccaagctcggccgcctcgccatgtccgcggcgctcatcggcgacttcgccaacaccttcgccatcgccggcgtcacctcctacctcctcgcggcgagcccttcggagaagctgcagcggatcggcatcgcctccgtgatcgccttcacgacgttcatcgcgttcatggcgctcgtggcgcggccggcgatcctgcggctgatccgcgacgtgccggagggcgccctcctcaccgaggcgcgcctcatcgccgtgctgctcatctgcctcacctgcagcttcaccggcgagctcctcggcctgcacgccacgtacggcccgttcatgctcggcctgatgctccccggcggcgcgccgctcggggtgaccatggcggagcggctggaccggctcgtcgccggcgtgctgatgccgctgctgttcgcgcagggggggatgcggctgaacgtgaaaaagatcaccgacgcctcgacgtgcgccctcctcgagacgttcctcgtcgtcggcgtcgtctccaagttcgtcgcctccatcatgccgtgcctctacttccggatgcccgtccgcgacgccgtcgtcgtggggctcatgatgaacttcaagggcatcacggaggtggtgtacgcgtcggcgttcgaggacgcccaggtgctcgacgagcaggtgtacgcggcgttcatgatcaacgtgctgctgatcggcgccgcgtcggcgtcggcggtgaagtacatgtaccacccggaggagaagtacgtggcgtaccggcggcggacggtggagcacaagaagctcggcgaggagctgcgcgtggtggcgtgcatccactcgcaggacgacgtcgggccgatgctggcgctactcgacgcgtcgtcgccgacgccgatgtcgccgctctccgtctatctcctccacctcatgccgctcgccggcctgaccagctccgtgctccggcacttcaagcacggcaagcgcaactgcgtgccgtcggggaccaccgactcggagcgcgtcgtgaacgcgttccagttcttcgtgcagcagcggccgccgggcgcggcgtcgctggtcccctacgtgtgcatcgcgccgtacgccaccatgcacgacgacgtgtgcgccgtggcgctcgagaagcgcgccatgctcatcgtcgtgcccttccacaagcgcctcgccatcgacgggtccgtcgagccgacgtcgcacaacgccggcgcgatccagccggccaacaccaacatcctcaactactccccctgctccgtcgccatcctcgtcgaccgcggcagcctctccaccgtcgccgccgccgccgccgcggccgacgggttcccgcaccgcgtcgcgctctacttcctcggcggcccggacgaccgggaggcgctggcgctggcggcgaccatggccgaggacgcgacgatcgggctcaccgtgttccggttcatgctgccagcggacaggcagagccgcggcggcgagggcgacggcgaggaggaccgccgcgacgaggcggagctgcaggagttcgtccggcggtgggtcgacgaccaccgcgtcgcctacagcgagaacatggtcggtggctccgacgagatggtggacgtcatccggaagacgagcccggcgttcaacctgctggtcgtcggccggcgatcggagagcccggagtcgccgctgacggccggcatatcggactggagcgagcacctggagctcggcgtcctcggcgacctcctgacgtcgacagacttcggatgcagggtgtccacgctggtggtgcagcagcagaccatggcggcggccggagaatcctgccggttgccggagttgcctgcaaagcacaaatcagatgaacctgtctgacaaatcatgacactctttatctctagttgtaagcatattttactgtgttgtaccactaacatcttggcagctagaatgcaatctgtagcaaccatgccttcctagtcttttctatgaacacgctaatatgtttataatctcatgattggatcaacagactaaacagctcagatagcaacaaaaacagatctactagtagagtagtaagtctccaaagagagttaagagcaagtaccattgcttagtccagcaagtgacagactgacagttttggtcacaaagagaccaacctgggtaaagtgcaggttttcttttcttacatttcccgtgtagctctgcatgcaagctgagcatagaaacgacacaaaagtactatactaacagatcatttgccaaggtgagcacgagttacatttgttttgggtggaaacagtatgttgcatatactactggggaactaagtgcggcgggaagatgtgttctgggtgggcctcttcgtcctagaagaactggcgccacgggattgaccagggccaggtgctggaagcgtaagcatctgattcccatctcggatgccagaacgagcagttcctgcattgttgtgaaagatcaagaatttgtgagaacagagctataggaatcaagttcatttgtcaagatttgattagaaatcaagcccgaaacagaagttgccaagttccgactcaaatcacgtacataaaataaaaggcatgatttatggacacacacaaccaagatcattgaaacacgataaaaatcaccatcattccttgattcaaaaatctctggacacatccattctcctgcaattgtgttgctctgcaattttatattggtccaacctttattggtcctgaacccataatttgactcagcaaattctattaaaaaactgccctttctaatgcatattactagtaatactaggtgattcccgtgctttgctgcggaaattcctaaataatttttaattttttttaataatcaagctaaaagtagaaaattatattagttattagcaacacacaaaactaatttgtcaaactatgttaagagagaaatacatttagtatactttatatgagattgtagatgaaatatgatatcctacactttaattatatggatgaatatatatatattaaggactataaaaatggtggatatatacatgttaaaaatttttgtgaaaaataatgtgaaggaagatgattggatgttgatttgtagaattcaatgaattatagattaagcttgcataaattttgcatgtaattattgctagtggatgatgaggtggcatgtttgcatgttgagctttaaaattagtgggttataactttatagtaagataggattaggggaagtatctagacaaaccgtcctaccatggtacagtgatggactgataattacaacattcaagagtttctttcagactattgatgagcggatgcaccaaggtatgaccgatatgggttaaggccttagggtttagacattagtaagtacactttcccattttgagaaatttgatcgatagtagtagataagttagcacaaaacagacaggctgtctgtagtagataagttagcacaaaacagacaggaaccataacttctattcagtgtttccagaaacacacattacatattctactacagtattacacagtgcatatgcagcatgtccatgtctgtttgtgcatgtgagaacaagaggatgtaccagtgccaagcatgttcactctgggatcccaaccagacagattttgcactgcatttctctgccacgattcctcaaatcgagcaagctcatctgtaataaaaggaaaacaacgtcagatcaactcggctgaggatggtaaaggttccaggattagaaggggctaaaaccttcattcaagttgtgcaaagtttgcatcgtgtcaacgttcccatcagaactcagtttccttgtcaatgaatggccctgcaatgagagaataataaattttattcatggaaaaacagctgaataataactttaacaacactcccaatctaattggaaggaataaagcaggttatttatctgaattaccaagtaccttattgccaattccacgtgaaatcctgtgagtggctttaccagtggtcgtgtctgcttccttcctttcttcaaatgtaacctagagatatagaagaaacagtaaacactacaactttggaagttccaacagaacaaataaataggtgaaggaaacaaaactgctaagattacttactccatctccaccagtcctcctagtggctgaagacgtgtaacaagctccatttggaccgccatacgtaacagttgagctctgaaacataaatgtatgaggttgtggacgcgatgtgctggctctggcataccccctttcaaactgctcgtgcctagatcttttattatctgctaaaagatttttaacaacagtacatggttggcaacaagcccatactagaaaacgaccagcagcataaaataaagtaataaaccaaccttcagtatcttcgtcaggatcctccacatatggcatttgggccatccttggatgcttcctagggttatcattcctcttctcatcttctttattcacatctgcgccatcctcatcatctgaagatagctcctggattattggccctctcggcctgcttggttcaggagcttgctgaaggaagcctccagtattgctcagtccattgacatttccatgaggcccaaacatgcttgacccaaagctcccaaacatgcttggctgtaacaagctaggtcccatcatagcaccgaaagggtttgtgaagaaaggatcatcaaagggatttgccccaccaaagaaacttgacattaggctccctggttgtccaaagctacccaaacctggaaaggggtccccaaaaccgaagaaaccatccctcctgcctctccccccttgcatcttctatttttgaggtaccctgcccagttaaaagatattcattatacaaaccactatgttatatgatatattagacgaaatcattaggtcgtcaataagtaggatctataagaaaaccagacatcatacaatgtgacttttggaattagcctgcacattgtaggcatgcagctttttttcattgcaaggttatcaataagtaggatatagaagaaaacctgacaccaaacaattctgaatttttggaatttgcctgcatgcttgagcactaatctatctgttctaatacaaggttacacgcccacacgacacacatgtgaacgtgatcccttaacacatggcaaagtatacagaggactattattacttaacatcatatagtgaaataaatacacttatgaaagattggttgaactctaaagtttaaacagaaatcaactacagaatcaaacatagtgaccagccgaaaaaaggcacgctcaatgacataaagggattaaaggaaacaaaacagcaactaatttatctcatttatccattatggtccattatagcaagtatagctacaaaaatttccctggcacaccatatccatatactcctaccaaaaaagcagagaagttccctcttcatcaattttataccaatcaagcaacggaaattgctagttagccatgcattactgccatccgaccagctagtatcaactatcaagtaggagtatcaactatcatgcgtcatttcaccatgtaatattccacatgggaaaaaagaaggccctaacaatcgcggacactgctcgggctcggatcgcttcaaaatctagcaacctaaactagctaacacgatcgagagggctaccagcaacgcgatccaaaactgccgcggaacacgagtaaaccccaacactaacagcaacaggagggggggggggattcgcacgtacggactcgtggaggaacggaaccatccatccatacctggagcagcggcggcgcggcgatctgatcggagcgggaggccctagcttccgacgagctcgcgatttgggaggagagagaattgcagaagcaaaaagctgcgcgtgtggagagagagagagagagaagaggtggaagttgaacggcaactcgggggagaagagagagagagagagagagagagagagagagagaggcctcgagacttccagaagcggattcttctcaggcctcggcccattaagaattcttccgtcctatgggcccattgaaaaattttctttttcccagcccatttggtctcacgtttattcttttctttttgttttctatctagcagtgttttacccttttttggtttagggacgagcgaccgcgggataagtttaggcaaattttgctaaatttgaactaaattctactcgaatttactgtttcaaatttgaattctcaaaaactgtgttaaatatgttttcgtcctacgtcgaaaccttgaaatttcgcgtttttcgaacctgggacacgtgggtatacaaacttatatttgaggatttctccatatgaaattccagatgtccactatgtagcttgagatgctaataaccattatctactctatcagaatttttaaaatattccccctaaaaaagaattttaaaatattttcaatataataaaaacggttaatatttcccgcctctacgattagacacacaaccaatgaattctgtcgcgtaaacttctaatcagctgcactacaaagtagctggaatgttgcatctaaaggtcgacaatgatacgtaggagtatgccaaactctgaacagtagcatctgatgagcttttaagctctgaacagtagcatccctgaactctgaaactgctggctgctgcctttgctggtaggctttattaaggcttgtttttgtcggtcatcatcaatgccccaatcttagcttagcatctgccgcgcacattcctgcagccaagaaagcaccaagcatggtggtggcctccctcgtgcagcaatctccgaggctgcaggaatcaggatcctcctcctcctcatctgcaactctgaataatgcaagatatgcttgcgcttttggcatctcgcacctcatggctgcaatcatggcggcagcatactgatcacaccatagctaaagctctcaacgacgtacaaccagtggcttgggctagagctacgggagtagcttctttgttaggccatctgtctccatcttcaacatccaagcatatatcctacccagcttttcatgcgtacaagatatatatgatataatatgctcatagtattttgctactataaatcatctggtcagttcagattagctgtgtacatcagggattgaaatttcgcccccaccagcaagcacatatctcacccgaaattttcggttttattattgtattttttttaatttggtcaaattttatttaaattcattccaaattaatcaaaatttcaaataatttcggttaaaaaaataccaaaatttcagacacccccaggtaaaaaaacatattttgaaattgaaaacctggtgtacatctgttttaatgtagaggcccgggttctaatctattttctaaaaccaaatctggccggttcagacagaagttcagaatttcagatcaagcatgctgcacatgcatgaggtagctagtatgatgatatatgtgtggattagttagtttaactcacccagtagtagtcttttattgctactactaattagcagtagttagctacaaagtgttcatcaactacaggtaggatttgtggaattttttcttcggacaagagaacagctctgaaactgaaagtcctccgactccgactgacagtacttatctctctgaatcaatcacactggagcatcactgatgaactctacaagtgtcgatggccatatatttatttattggccttatttatttttccatgagactaagcttagctaggtgtaagtataattaagctaaggtagctaacaagaggtagttcgtttgtcactaaaaaaatactatcagcttccgttaattaaggagctaaaagcatgaacacatgtcagtcactggcagttcagcagatgcatgcgttctgcaactcaattagtgggcctctaatctacgctttttacgcctaaacaccagattaattaatctaattaaactatgagctttgctagctaggtcgaaaaagatggtggaatatgcccatgcgagaagagcccaataatacagacaggcgcatgcacaaagcaagtggacttggataatgataataacgtatttgggtaagcttaattagcttaatcactttggttatatggtttcttaattagggattagtgttgataattaggagcctttggaccacacatgtagtagagcatgtggtcactatagtgcgctggaagcgtgcagcaagctcctacttcgatgtgagtgtgttggcgtgcacccattagagccaagaattttaaaccagtttttctcctgtaaatttctccttggtgattaattatgatttggatataatttaaacgcccttttaatctcaccatgggcatctgccttcacttcactaaggcactaacccctgcaaatggagccttgttaatatatataagctgtgggaatcttctccaacaaatgcagatggcactactgaactgaacactgtgtttttcttttgagaggtactataatgaaccaaatatatataattattgtcccaaattagagcataaattctgtttggaatgtgattgaaacttggagcatataattgtactatgatcttttaggataataatattattgtgcttttcccccttgtttttatcctttcaggaaagcttatatttatcgatatttcttatggaaattaaaaatagcaagaataagagaagttccttatccatatctacatggacactttgaatagatgtgcaaacctacaaaatagctgatgagcttctttcttgggctgtttgtgcttttgccatttgtttcctcatgatggaccctcagtttgggttacatttagctttgcaaacaacttgtgattaagtggtgcttaatgcttaattaaccatctcttttgtataggaaaaagttaagtagggagacccacttgcccatcacatcctttaagtacaaaatgccttgcttttggttgcttgcttgtcttcccatgggttaacagggtggtggagtacccatgatctaatctcctttttcttcccctcttttatttattaattttagattagttagatagatagatggtttagggggctagaagttggagtaaagcatatgtcattggtctaatcttaatcaactaatccaatttctttgtgtgttgctttgctttcatggattgttgaatattgactccacagtgtttattaattgctaccattatatttataaatgtttccatcctaatctagcatacgaaatcttttttgttttttgtgggatactaaatccatatctttttccatgcttgtcttgcaaggaaataaaaagtttaattaatactggagaatatatttgttatcatgaaaaaagcaaattattgttgagtgttggtgagctgtccacaattgacttttttgggatgcatgcatattaatatgcgaatgtgtctaagtacatataatttgttctgattaaaaatagcccgtgttttcctccttttgttttaccgactactacctctcttcggtaatgcactgaacagcatgatagttttttaataaaaaactttctatatacaaatttcctatcaccctgttctaaattcatttaatttttttctaacatttaatttattggtttgtacccttgaaaaattatgtatctattgagcattctattccattcagcacaaaagaacaccctttgagtcaaggatgaatgtagtagtatccactatccagagaccaaatcctggaattaatccaatgcttatgagtgatgaatcatatatagtaaataaaaacctaaattgtcaggttccttttggaccaaccgacaactaaagcatatacattgtcgatctcgaattgaaatggtcgtcgatctagctaactaggttcgacatgccagatttttttttggcacaacctacaaagtgtcaaagcagaaaaaacattgtactttcatgtaatatctaaacggtcgataagatccaaatgtaattatgtgatgctaaagaaattcaagaaataatttgtaagaaatatagtttgtctcgtcttttctaaacacgtaaatataacacaacaatgggttggatttttcaaaacttgtccgatgttggggcggtttccactttttagttttgaaatttctcaaatttgtaaaaccatttggaaagaaactcatttgtaaactctgtatgttgttcttattaggccctgtttctgttccatgcatgtttggacacatgcatgtgatataactgtaaagaaaaccaaatacacagattgcatgtaaattgcgagacaaatcttttaagtttaattgtgccatgatttaacaatgtggtgatacaataaatatttgttaatgacagattaattaggcttaataaatttatctcgtggttttctgacggaacctataatttgttttgttattagactatgtttaacacttcaaatatatgtctatatatccaatgtaataaccaaacctaaaatttttccgcaactaaagaccttagtcaaagcaagggcttgttcaggatcactagctaggttgttaagtttaatctgttgaccaccatacaaacagcttaattagctttcggtatggacacaagacaaacttactagcttaattaacttaattaacctaacattaatttgactctctctcctctctttgactctctcatggaggcatattgcctaatcatatggctatgggctgtccatctcagctttcttttgctcttttgaccgccgccctcctgcactgcacaatattccagtacagtacgtactatgtaaaagccactcctgcactgcatgccaatggatttggatcacgcgtgtacgtacacatgcagcccgtgtatgcaaccatgtagtgccactaccttgcatatgctcagctttattttgacacgttccaacgcacaaaagacacaaaagctatggccacacaaacatgtactagtacacagcatgcatggagccgtagaagagggatataatggagatagagcagcggagaaaagccgtccgttgttgtgatatgatgtgtatagtcttctactgtacgcagttatgattgttgtttctggttttggtcgtaatgtgtcggtgacatgggaccggaagtatcatgacttagagacttgaggcagacacgatcacccacgtggcctaaccccctcggggggggggggggggtcgggcccgagggtgatacggccgcccttctctttgtctccccgaggggtcggaccgctcccgtctcggccccgagggccgaggcgccccgaccccttgtgggttttgcgccgcgtatatggggtaggtgagcatagcg

SEQ ID NO: 10239 - DNA, 9104 bp, Oryza sativa
attttctcacaacatttactaactttgctcgcttcgtatctattctttcctcccaggaaccaccaaggagatgtcaatatagagaatggatagacaccagaagggttctaactccacctagccgtgttgtgcagcttgaactaccagagcaatacagggttactaaagcgcggtttgagagagagagggatcctcacgtaggggttagctattatcggacaacttggcatactgaaatttctactgtcatgcttccttgtcccattactacatcgtcgttgtgttcaactattgcactacctccctcctagttcgaatctaatatcatctatgtaaccgcaatggaaatagttgtatcatgttcaaattgtactactatttcttcatgttacataattctccttgtttaaatccatataatgtttctacgaccgagactgcgataggactatatcaattctccgagtactaatacgtcaaataagttacaaaataatatcttacttaacatatgaaattacgaaacaaccaacttcaatacatttttataacaatattaacaagttttaccaataaatacttctttaattattattaacataacatagaaaaattatttggcagtactttttgcatctgggtcccttgccgccctctaggggcccaaatgcaaaaagtacgagccccaagctctttatgggctgccaaaattgcatttagccccttgctgcccgggctaaatgcaattttggccgacggcggcagacgacgcggtcgacccgccgtctgccacatcagcttgccgcccacctctggggcggcagggtctatttttgtaattttttttggccgatagattatttctgtaaaaattaaaaaaaatctaaaaatgaaaaaaaattcggtagaggcgaggctccctcgcactgtcgcacaacacatgctcatgcctgatctagcgggcatgtggaatatacgagattgacatgattatggctgacataccaaaatttttgatagaggacgtgcatggcatgcgcttgcgcgcggatagtggatggacgaaattcccaccgacaaccttacgtatattttaagtaggtatagctagataagagaccagctcgagggatgatttcaaaaaatccatctctttccatattcatggaggatgagaacccttttgctgtcgatctcgccgagcacaacgacggcaagctcgttgtcgccaaaagaaagcaactaattaatcagacacggaggcacccaccgaacaccttgatgacgatgacgacgtgctagtgtgtgggtagaaagatttagtttggtggcactctgtgaccaggatgacagacacggtagctggtgttgatggcatcgacatatatatactgacatgctgtaacgacattgtgatgcatggtcttgttggatataggggcattttgcccaaattgtgaagatctaacaagatcagtgtaacacgccagtacccacattcccggagtgctactccttgaaagtctccaccgcacttacggacatccatatgttaggaaacctatgggcttgggcccatgaagtcccagcccatgaatcgaagaaaaggagaagaagcaaaggaaggagaggagcatcgccggccgcgccatggaggctgcgacggcgatgccgtccttaccaactccatgccagatcactgcgcctcgtcggctgcgatatgaaatagtatacaaggaagaacgatgagaaattgggggagggagagtcgatggcaccatcgtccgcccctcgtcggccaccgcaggtcatcccgcgtcgccgccgcacggccgcacccagtcgccgcctgacctcaccgcccccgcgccaccccgcacggcgtcgtgccatgagccgtcggctcgccgcgcctcgcatggacgcatggccgccgacgccgagcccgcgcgcagcccgtgcgccgacgccacctggccgtggcgccgccgaggctagccgccgctccaccatgacgccgccgaggctggccgccgcatcgccgccgccacgccggccgtcggcctcactgcaccgcgccccgacccgtcgccgcacgacaggtccgcgccgtacccctacacgccgccgcgcgccgccgccggacgcgctctgcacgacgccgcccgcacggccgctgccaccgcgccctcgccgccgcgcgccgccgccggacgcgctctgccctgcgccgcccgcacggccgctgccaccgcgccctcgccgccgcgcgccgctgccggacacgccctgcacggcgccgcccgcacggtcgttcccgtcgcgcccccgccaagcagcgcagccgcggccccgcatggcctcgccgcaccgccaccgcagcccggccgccgcgccgctgccaccctaccgcagcccggccgcggagctgcccagaccggccactgccacactgccggttgcaccgttgaccactgtgcgccggcgctgcttggccgccgcgcctcccgcacaaggcaactgcggagtcaacgggaagagaagaaggaaagaggaggagaaaaggaaagaaaaaagaaaaatggaaagattcccgtgattttgcatgaaagcccctgaagttttgggaaactaggtgcatcctcctctgcataggaaatcttgccttttaaacccttaacttttcaggaaactcacaaatagccctctgtatttgggatatttgtttgaatggcattcggaatttgcaaatatcaccggaaatcatattctcgcataaaaagagaccacggacattgacctttgacctcgactttgcatgtgccttttattgctgatgtttatgattatgaaatttatttatcgcatttacgattattgattatttgtgatgcttttattacttttagttaatatcgttgaagttgaattttgtgtaccattatattgcaacacatgtgcattttaccggcatttaatttgcgcatattttttaataacgaaagatgacaggcatcacgaattagaaaatttgcaaaaactagaatatctctgacatatttatttaatgtcgaaattacgatagagcgagaaactctatggtaccattaatctaatcgcgacatgtgcattgactcgatgagtttgatctagcatttcaaatctctcgtcagtgcctccaagctactctcatgaatgagtacgaatgagcgcgttagaagattatggaccctatctctcgtagagcaagtactatgagcaagagtgggtatttttcgactatagttcactgagtaaatgacccagagagtacggtaatacggtgcaccgaatttgcactgaatactgtagaaactcttaatgttctgcccgaacgcaacaaaagtcgcacgcaaacatcactagtgtacatacaaagaagtatgcctaactagtcgataatagaattgcgtaacgtttaggataatgttcactacaagagcattatcttccaaaaccaactagcacagttgataatgaattcaacacgagcagctagcccggtgcacttacctcaatgagaaaagaggacaaggggggagtaaaacacatgtcaaggtgaataatctatgaacatgaaaaagaaaaggacaatcctaatagcacactcatcatgaattgagggggagagctcctagcctattttcatgactatgggcatagaatctcctatgctagataggataagccctgaaatttatgtcagagtgccatagctgttgagcaagaagctcgctatgaagttaattgaatccgatgtaccagaatactttgttgaatcaatacacttcgtcatcaattgttgcaatttttgaatagagcattgcatcgaataaatggttcttgcccaagcagagcacacattttccctgcaatagagaattatttccagtataaaatagcatatttaaggcatttactattttgttgctcctttctagcacatagttataatgctttgaattttgtgtagtgtccaaacataaaagaaaaatgaattgtggtccgcataaccacaaataacactttaagagaaagagttatttccagacccatagaactggaaatattatgactgttgctagcagcaagaactgaatttgtcggcctagaatgcgccacagtcatattacctatggaacaatcatgcactttatagaagcatatattgtccgtcaacccctttgaactctctaaaaagtgtgatgatttgggctacacccttttagcaatggattttcagctattttcggtcttagaattataagaataaatattacaactcgtatggtcatagcacatatatgcataatttttctaaatcatgaagatttgtgtgcaagaatgcaccgacaggagatcaatgcataaactgcatatagttctaacatccttgaaccggattgcgaagaatatatgtggctcccatttggtactatatggataaatgcgcttccgaagcagcaaacatccagtgtctcttagacaccgtgtctttgccaaaactgatccggcaagatcacgtgaactccaatagaactcactaaatcatcttcagaagtccacgaggacaatgctagcattgcatttgatgattgatgaattggcagcacgaagtaccaaatattcgcataagcggactaagtataagctatgaatcacaatatttcctatatcattgttgtaatacctgcagtagaaaaggacatgtagtcctgaaagcagcggacacgtattcagaccatcggcatgaacatccatcctgcaactagtgctatcgcatctgtttggtttatgtgcatatcccactatcataatacgttgcaaaaggctctctccgaaagtcggaaaccttttacggagatagttatgaagcctaaattccttgacaaataagtattatttccagtcatttagggggagagaatgaacccctagataggaaatgtcaggaaatatgatagtagaaagggactaatgcatgttacaccgcactagtgaatgcagtttgcataaagaattaaaactgccaaatcactttgtaaatacttttgtgatttcgaagagtttgactaagttgcatgaatgaaatgcaccggaggagggtgataccaaagaaagtaaaggtacccctcatcttgtctagaagcctcgaacaaagaattggacaagaaacttcggatcctcacacccctaaagtaaccggagacgtctggtgaaaacagggcaaaagggactatcatactcaaagtcacaaaaggtaccctaccaaatagaaggggagccagttgagatctggcaaacggtacggaacctccgaataggcgtaccgcaccttcccatcaaggaagaaaactagctgttggagtgcacactaacgctggtacatgcccacatcaagaagtattaagcaagaagaagaagaagcatatgaaaaatgcatctcctcgtatatccatggatacttgcatagagtctcatgaaaccaatagaagttggtaatgagattgattatgggcaatgtctcctttagacaacaaaactcaatggtagtcaaccaggagttgaataaatgaactagaagttgaaaagaagaactcaacctgaatattaacaagcattgaagatgttgaagatagaatcaatgaatgcatttcaggagtttggattggacacttgcataatagtacatgaagaagtattaggtcccgaaccaacataaaagaatagaataaaccagaaaagaattgaagaaaacaaactcgttcgttttgaatttgaatttgatttgaaatatttgaatccaaatcatgctgacgcttgcagctaaaggcatgcgatagatggaagtctagtacatcagtccaactgcacttagaaatgttcatggtgcatggctttggaatagtcaattatcgccaaaatgggacggaattcctaaacatgagtgtcatagcagcacatgaatacttggctaattgaactaaaccgaactaagcatcattgaactactcagagccttagcatggctttgagagatggttacccgcgacagcaatcgcgatttgaaaactatcttaacccccaccatttatgaaattaaagtagcatatgttgcacatatgagttatgtgagaagcaaactcactaagcatatgagcccccaaactcttctatgtacatgaattgcatagaagcaacgaactaagtcatgtggaagtcttgcagattcatccactaactcattatttacatcttcccttgaataggtgtgcctgagaaatcggaataatgaaacttagagaaatgcaaaattcagggggagaatttcgctaactcatttcagaatcttgatatagaaaatcaagtacccaaaatcaatctagaaagattgaatgaagaattgggtgaattgtactctttttcccttggataagttttcccagcagtttcttatcaaggtttttaatgaggcaatttgtgcaacattgcaagcatatgctatgtactctttttccaaatttttcccactgggtttttgtggagttttaatgaggcatagacatcacgcggtgagtgcccaagggggagtgttaggaaacctatgggcttgggcccatgaaggcccagcccatatacactaattgggcccacaccgaaaccttccatatatggaggaaggctatataaggaggagaggggtgctcatttgtacacacttgtgcttgaggtgaatagaggaatgaatgaaaagagagtctcgcccctacattttgtgtctcctttttgtagaattacgggaccatcttggactacttcgtgtagcaggagggttgcgtaataccataaacatcaacgataatattcaggaaagaccatatggactatcagtctatcacggtagcagaaaacaacttatgataaatctaaacacgatgtgagctagtctaataccaatgcgaaactaagattaattttaggggttgctatatgatgggatgataccaatcacagaatcacatattatatatggtacttcatagatatcaacttgtgcctacactactacaaacccctcataggtagtggcttatagatattgcttcatttacacgtattgacattttttcaccttcgcgtagtgaaaaaatatagaatgggtagatgctggttctaagaaaaaaagtaccaatattatttataccaattttttaaaaaaaaacagacacctataatatactataggtgccattcagttaaaaaactggcaccaaaaatatattatgtctcggttttataaaaaaaataggcactaatataaccgagccgagccatccatagggcagaggtttttttttagcccaagtcaacaatcgttcttatcatttcgcccattttccccttcgctctcaccccttctctcgttttttctcgcccgcacccccttgctcttggtctcaccctgccacccccttcactctccactgtcctcctcgacgtgcagtgtcacccctaccccaaatcgcgtcggcgcgccttagatctagttggacaagcgaggagaacgacacaccagatggtgaggaggttgaggaagttggcgaaggcgaaagcaatgagcacgacggcatcggagcggcaccctacatctcataatataacaacctataaccggatgagacaaatcttagtattacaaaactagatagacactcaaagtttatggtctttaggacattcaaagaatgtgtatttgctataggattaccacgaaaacatagtgaatagctataagaaagtgtgttagggttatggataaggcatacttcctattcttggggtcgtgagatatacggatatgttataccctcaagtatatgggaaggtacctctgaattgaggaaatcggatgatctataaggaaatcgtctctccggatagaaggtgttagagttctattcagagaatataaggatttttgtgatatcgtgtgaggacatgtatctccaagctatacttgaagaacaagataatatacggtataaatagagaatccccagaaggggtaaggcatagaatcttagtgcaagacacccactatagcagaagcaatccagaggacttgaagccaactcgccgataggtctcgtcaagccgttctcgacagggatctcgtcggtgatctcaggattatgttgttctctattatactctatggttttcttcataatcccatataaactggaatagggctattatctcacaaggggtctgaacccgtatattctttgttccctgtgtgcttgatgtcgtatcatgtggatccccatatcaacgtaccccaataccctcagaatacggtcagtgggtaccacccccccccctcgacgccgtgaacgtgttatttttattatctactttttgaaaagacaagtttgtccaaaggagtgagaatggactggatcgatcaggggggagataagggtagggcaattaaggcttgcgctctaggctgatgaccaaattcccattaaaatcttatgcaaaatactgtaaaaagctgaagatataaagagttttgctaagaacacatcaactcagctctgctcggccctagacgtgatcaattgttggctccgccacttagatcgatcatgggagtaagaatcatctagatctggttcgaacaagacccaatcaccttacaaaccgatggacgcatgagcaaattggtactttccacgctatttctttcttcatttatatcggatataaaataatgtgtttgatgttcagcagctaattaccatattttcatggtatcacgtaacacatattccctctatcccaaaatataagcatttttagaatagtgacaagtcaaacatttttaactttgattattaatagaaaaaataaataaaatcaataatgtaaaaatgatgttattagatttatcattaaaaatatatcataatatgcaactctttttatttaaaacatcttacttttatagatattattaattaaaatagtatctttaaaactatgtagaagttaaatat

SEQ ID NO: 10240 - DNA, 3497 bp, Oryza sativa
  unsure (1)..(3497): unsure at all n locations
tcaaatgtcataaaattagaatagacatacaattggcgctaatattatggatttgttattcgtgattcactgaaatattctctatatatgtttgcggatcttagagaaaagaaaaacaattatgcttcgtcattgataaaaaaattaaaatcaaaatacaatatcaactatggattaataaattgaatattgataaactctcatagaggaaagcaccctaagaaaaactccaaaaacttgagcttggcaacttgggcgaagctcaaggtatggtggagcgtgcacatatcgtcgttgcagttgcaaaccatccccagcctctccaggtcggccggccgaaccacgggctccttcacgaccaacttattgacgacggcgatgtcgcaccggatcgcgaacccgtcatccttgaggtaccacgacttctccagctccttcctaacgacgaacctgtcgaacccctccgtgaccccggagtagaataccctcgtgaacctcttctcgtgcggttcgcccaacggcagcgtcagcccgtagtggtgttgagggaccaggctaaaccggacctcggcctgngcctgngtgatgtggtggagcgtgagggaaacaganacnaaacccggacacgtnctcccgtttgggtagcagaggatgccttcagtgtgggccgccacttngaaacttgaggactcgacgaagtgcccaccatccgtgcatgggggcgatccgcgtgtatccgtcgatcttgagcatatggcatccggtggtcgcagtggtgctgactgtagacacggttacatcatcctcagttggcgccatgagatagatggcacatgggtcgtcagacaacatacggtggtgttcgatttgtttgtaaggtacgttggtagggttcagttaattaaatatatggagaagttaaggtagatgtcggcctgtagttcgtctcggataagagccattttttgggactgaataagtattactactacatgttggatatcacggatcgttgcaaactcttcaagtctctgtccggttcgtaaacgaacaagggggagatattactgatttcttaagttgctatgaaaagctagtaaaaactaatgtgttaatgaaaaaaacggaggaatatgaaaaacataatattctgataggaatgtaagtataaaatagaggattgcaaaacacaggaaaaacataggaatgaccgtttgattggaccacaggaaaaacacaggaatttgaggagagataaagactaaggatttcttccatgaggttccacctcttgttaaaaatcctccaaaacttatatgagaagaggcattccatagaaatttcataagattctatagggttcattcctttgattcaaagaactttgtaagaaaaattcctatatgaataaaattctctaaaattcctatgaatttcctttgaataaaagggggccttagtatgaatcatattaatgtatccactatagcaagccaccaaaaatttgtaaattctattcccgtgcttcaccttgtcccgttctctttccctgccctacttccctcctaatgtaaaataattactcttacttttacatgaaaatagggttccatcgctaccaatcccctctctcgtgccctccactatcactcccccactccatcttcttgctgtcatgtccaatcacgcttctcctctaaggttttaactgcgcgtcctaaggttacgttgggttagaataatttctcgtttatcatgagcacatttatcaaacggctaaattgaaaaaaaaaattatatatgtattttaaaaaaacaaataaatttgtttctcaaatttattatagttaatacttcctccatcctaaactagagataaaagaaacaattattatcaccccatttgaatcatcccaattaatacattacataaatataatagttaattacatatgtcacatgcattgaattatgaaacattaaaaaaatagttatgcattatatttttaaatagagcgagtacttaaataatcgtaagctaattgatattctcattttttccgtgacactaactagctaacttcaaaagctagcaaactattctcatgtcccactcgttcatagtgccacacaagatttcaaatttataaaatataatgtagaaaaagatcgggatattgcgtcgcagctggccctttctttgtgttggagaataggagccttttgtttgggagctcatgcctgcagagaagcagagaatttgatacattagtactccgacttcaaaaagctcgataagcaaacatgttaacacatagtattaatttggagttatgtcacataaaagctttttcgtaaaatgaaaaaacaagtagcacgaataaccttcaagttatctgatttatttgtcactttgttctccccagtttgatggccaactttttcatcaagggaggcatgttctgcaggaacatcaccaaatatatcatcgatactccaagcagcaataatgctcccatcttcactgatgcgtttctttaactctttctgcacggatggtaaattaatcaacgagcacacggcatgcgcaattttacagttggatagttggacaagacaagaatttcagataaaagctaacccattgatacatcctcgcaaggggcacgactgcttcacggtaatcgaaaaccgacaactcggtaaacttcagccacagatcttgcatttcagaacgaacctgatcaaactgcaatgcaaaaaaaccgtgataattagagcatataattgtcaaaacaagaatgaacacaaggagagaacagtaaactgaaacgatgctcaaagtttcagacctcagagcttgataaatctttaggacaagccctcaacttcttcttgattctgtcaaggatctcagctaattcactgcatttcctcctcctcatctctgacagggtctctgatttcattccaccaggaggtaggtttaacactagctcgatcataccatctatgctctgaaactgtaacatctcatcgtggcatgaatagccatcctgtgatgcattctcagttttaaattttccacacagttttgtgtcaagaaatgacttcaaattcacccatagatcgtccgggtgcttattgcgcagatgttccagcaaagatgcagtgtccaggaacttcttgcctgcacattggcccgaagatcgcgggcaaatccagaaacaccatgaaccgtgtgtcttggagaagcgccgcgcttcggagactgtgttcgccgcgatttggtcgatcttgctgtagtgttcgcgcagttcgtcgatgctgacggagaggatctgagattgcttctcgctttccatggatgcccaatcgtgtacggctaacaagacaagcttcttctgaagatcacagagttgtttcctgagggatgacaccatgtcgccgtactcttctccaatcgcaaatccgagggggatttcctgcgccgccgg

SEQ ID NO: 10241 - DNA, 13713 bp, Oryza sativa
ctggtcatgtcgtcagcagacagccatgttcccacgtcgcgcctgcttccggcggaagtggaggtaggtatgggtcgtcccatcagaaggtcattcggacggtaaccatacaagtctccgtctgtttatgaaaagataggataagtccccacaaaaaagagagagatggtgcatgtggtatccccttgaggtataaaaggaggaccttgcccacttagaagggggatttttttttttcggatccagaacgatcagagagggagagagtaagagctctctggttctccagctcttttgtagcttcttcatacatagatccaccaaaacacaggagtagggtattacgcttctcagcggcccgaacctgtatacatcgcccgtgtcttgtgtgtttccattctcgcgaaccttccacacacagactagaagcttaggatctcacccagggcccccggctgaaccggcaaagggggacctgcacggtctcccggtgaggagccccacgctccgtcatctggcgcgccaggtagggggctctgcgggtatttttctaagctctcgcattctttcgtgtgcgccaagcttttcctgttcagcccaatggccgaacaagcaaaggcgcacaacctctctccgagtgttagcggtgacgacggggagccgaacccacgccgtcgagctcgtactccaccgccccctccacgccaaagtcctaggcaggaggaggcgctcgagagggtcgaaggatccgcgacttcgacatccacgggtgatggggaagggcggcgagatggggagcgtcgcctcctcgtctacggcgacggcagcacgccccagggcgcgctccaagctgcgggcgcgctcctacgtcacccgcccgttgtccctgacctggagtctccagcccaacgttggctggacgacgtggccaacttggtcatgacggcacggcagcgcctaggtgctggtgggcggtcctccgccaccaagacctctggcgctgctaccaccggctccgtgtcgtcaaggcggagggcgcggcgagcggcggctgttgctcgccattcggccgccactccttcgtcagcgcctccgacccaggaagatctgcgtggggggtcggatgcccgcatcagtatcgagcgccggcgtaatggccgacgtgctgcccacgcaacggagggcgcctcctcgtccggagtgtcacatcaacacggacgcggggatcagccctccgtgcccccggttggtggtgtcggctgtagagcctttgtggcgagccttcggaacgtccgttggcccccaaggttccggcccaccatcgccgaaaaatatgacgggagcgtcaaccccgccgagtttctccaggtctacatgaccgggatcgaggccgccgggggtgacgacagggtcatggcgaatttctttcccatggccctgaagggacaggcacggggttggctaatgaacttgccacccgcgtccgtccactcttgggaggatttgtgccaacagttcaccatgaactttcaaggcacatatccgcgcccaggtgaagaagcggacttacatgcagtccaacgaagggatgatgagtcacttcgctcatacattcagcggttctgtcaagtccgcaacaccataccatgcatccctgcacacgcggtgatctacgcgttcagggggggtgtgcggcacaaccgcatgctcgaaaagatcgcctccaaagagccccagactaccgcggagctttttcagctcgcggaccgagtggctcgtaaggaagaggcatggacctagaacccctccggttccggtgtggcagctttggccgcccccggatctgttgctcggacagggcggcgtgacaagaggaagaagaagaggtcagcccattccgacgacgagggtcatgtcctcgccgtcgagggcgcttcgcgggccacccgaaaggggaggcctgcgagcgacaaaaagaaggaggccggcgctcccagtagggagcgcccaaccggcaagtggtgcatcgtccacaacacctcccttcacgacctcgcggactgccgcgcagtcaaaagtttggctgagcggacgaggaagtgggaggaggagaggaggcaggagcgccgagagggcaagtccccggcggttccttccggcaatcggtgaagtaaggccaagcagaaggcccccgccgaggacatcgatgacggcgatgatgacctaggtttccaagagcctggggccaccattgccactctcgatgggggagcgtgtgctcacgtttctcgccggagcctcaaggccatgaagcgagagcttctggccgcggcccctactcatgaggcgacgcgccgggcacggtggtcggaggttgtcctcaccttcgaccagaccgaccacccaccgtgcgttgcccggggaggacagatcgcaatggtggtttcccccactgtttgcaacgtgaagctggggcgtgtcctcattgatgggggagcagccctcaacatcctttcccccgcagcctttgacgctatcaaggccccggggatggtgctccggccgtcccagccgattatcggtgtgacgccgggtcacacttggccgctaggtcatatcgacctcccggtcaccttcggtggatccgccaacttccgcacggagcgggtgaactttgatgtggcggacctcagtctgccctacaacgcggtcctagggaggcccgcgttggtgaagttcatggcggcagtccactacgcctacctccagataaagatgccgggccccggtgggcccatctctgtccatggcgacctcaaagtcgcgcttgcttgtatggagcagcgcgcggaccacctcaccgccgcgtccaagcccgagggaggcgacgagaggcttggcacctccgcccccgccgccccgaggcagcggatagtcacatgcgacgaggtcccggtcaaggaggttgccctgggcgacggcccgtccaagaccacatggattggtggtcttctggacggcaaataggaagacgcgcttgtctttttcctgcgggtaaacgctgacgtcttcgcatggagaccggcggatatgcccggggtccccagggaggtgattgagcaccgtctcgccgtgcggtcgggcgcaaggccggtccggcagaaagtacggcggcaggccccggaacgtcaagccttcatccgcgaggaggtggcgcgacttctggaggccggattcatccgcgaggtcatccatccggagtggctggcgaacccggtggtcgttcccaaggcgaacggcaagcttcggatgtgcatcgactacaccgaccttaacaaggcatgtcctaaggacccttaccctctgcctcgcatagatcagattgttgactccacagcggggtgcgaccttttgtgttttctagatgcatactctggttaccatcagattcgcatggctagggaggatgaggaaaaaactgcattcattacccccataggaacttattgttatacgacaatgcccttcgggttaaagaatgcaggtcctacttttcaacgtactactcgaaattctttgggtagccgaataggacgtaatgttgaggcttatgtcgatgacttggttgtaaagacgcgcaaccaagagaccttactctcggatctagcggaaacttttgagagtctccgctccgcccgcataaaactgaaccccgataagtgcgtgttcggtgtacctgcgggcaagcttctcgggtttttggtctctgcccgaggcatcgaggccaaccccgagaagatacgagctatagagcggatgcgcccccccagcaagcttagggatgtgcaatgcgtcaccggttgcatggccgccctaagtcggttcatatcgaggctgggagagaaggcgctacccttatttaagctcctcaaacgctccgggccgtttacttggacggaggaagctgaacgtgccctcactcagttgaaggcgtatctcagctctcccccagttctggtcgccccggagccaaatgaacccttgctactctacttagcggcgaccccgcaagtggttagtgcggcgttggttgcggagcgcgatgaggacaatcctcattccgcgcacccccaccctgtgctggcttggcccgggagagagcagggaggagaggcccccgagccgaacggtggcccaaggcccccgacgaccggagcaggccctctgcccgcttgttagacggtgccaggtgcccccgacccccaggatggcccgagggccactgcgggaaggccgcacctatcgccctctgaccccgaggctaaccctgtgccgactcgacccgggagagagcagggagaagaggcccccgagccgaacggtggcctaaggcccctgacgaccggagttggccctttgcctgcttgtccgacgacgccaggagcccccgacccccaggacggccccgaggccactgtgggaaggccgcccctgtcgtcctccgaccccgaggtcgtcggcacagaagacgagtgcaccccgcgaggccgcttggacaaagagcgccccagggatgtggcccctagcgaagaggatcggccccaccgaaaggtgcagcggcccgtctactttgttagtgaggccctccgggacgccaagacccgataccctcaggcccagaagatgctttacgctattctgatggcttcgaggaaactgcgccattatttccaggcgcatcgggtcacggtggttacgtcttaccccctcggccaaatcttgcataatcgagagggtactggacgggtggtgaaatgggcaatcgaactttctgagtttgatttgcactttgaaccacgccacgctatcaagagccaggccctcgccgattttgtggcagagtggaccccagcacccgagcccgtctcagtccccgaggccagctcgggcccctcgcagctgccccacaccgcccactgggtgatgcagttcgacggctccctgtctcttcagggcgccggtgcgggggtcacgttgacctcgccgagcggagacgtcctcagatatttggttcgccttgactttcgggtgaccaataatatggcagagtacgagggactccttgcgggactcagggtggcagctggactggggatccgccgcctcctggtgttaggcgactcccagctggtcgttaaccaggtctgtaaggagtaccggtgctctgacccgcagatggacgcttacgtgcgccaagtacggcgtatggagcgccattttgacgggatagagcttcggcacgtgcccagacgggataacacggttgccgacgaactctcacggctcgcttcctcgcgagcccagaccccactgggcgcctttgaagaaaggcttgcccagccgtcggcgcgacccgaccccttaggggagacggacgcgcctgacaggcccccgatgcccgtcggagtccaggcctcgggacccgaggggagcgctcccagctcccttagattgattgcttggatcgctgagatcaagcatacctcacagataagactctactcgaggaccgcgaagggagtgaacgcgtccagcgcatctccaaacgctacgtgctggtagaagggaccctctatcggcgcgcggctaacggaatcctcctgaagtgcattcctcgggaacaaggcgtcgagcttcttgccgatatccatgaaggcgaatgcggagcccactccgcctcgcgcaccttggttggcaaagcctttcgacaaggtttctattggccgacagctctcaatgatgcggtcgacctggtccggcgatgcagagcgtgtcaattccacgccaagcaaatccatcagccggcccaggccctgtagatcataccactttcatggccatttgctgtctgggggctcgatattctgggaccgtttaggcgggccccgggcgggtttgagtatctgtatgtcgcgatcgacaagttcactaagtggcccgaggcttatccggtcgtcaagatcgataagcactccgcacttaaattcattaagggcatcacagcccggtttggagtgcctaaccgtattattacggataacggcacccaattcactagtgaacttttcggcgattactgcgaagacatgggcatcaagctctgcttcgcctcacctgcccaccccagaagcaacggccaagtggagcgcgccaatgcggaaatcctcagaggccttaaaaccaagaccttcaacatcctcaagaagcacggcgattcgtggatcgaggagttgccagcggtgctctgggcgaaccgaaccacgccaagccgagcaaaccggggaaacgcctttcttcctcgtctacggcgcggaagcggttctcccatccgagctcaccctgaggtcccctcgggccaccatgtactgcgaggctgatcaagatcagcttcgcagagatgacctcgactacttggaagagcgaaggcggcgcgtggccctccgagccgcgcgctaccagcagagcctgcggcgctaccatcagcgccacgtccgggcccgatcactctgcgtcgacgacctcgtcctatgccgcgtccaaacgtgtgctggattgagcaagctctcaccaatgtgggagggtccgtatcgagtgatcggcgtcccccggccgggctccgttcggctggccacgggcgacggcacagagttgcctaacccgtggaacatcgaacaccttcgtcgcttctacccctaaagggggatcaggtgttaggttttgggctcgggccaaccccgcacccccctcgggcgtgcagggttggccgggggctaccacatatgcatattcttatttctcttatatctgtatttcaataaaagcattttcgatttcctaaaggctgtatctgtgctgttgtttccttttgaaggatcttgacttgaaataggtcactcgtgttcaatcctgccctcgggggctcgggtcggctaaaatcgccaaacggggcccagaaccgagccgtgccccggggtgtggtgaactccgggggggaatcggcaaaaacccacaatcgggtcacccataaccctcggtcaccatgctcccggcctggccagtctcgacatgtggatctccccaggcgctagccccgacccgagccatttgaggactaggacctgggcacgagcccttgttcaagccaagacacaaaaggaccgcggcacaggcatcctcgtctcatacacacaacaaatagaattgacacaaaaaatttcctctttatttgattgcagattaaattagtctatacaagaagggggcccgaaggcctcggaagaagaaaagaataaactatttaaagattggtgggggcctgggggctcattccgatgcacccgggtcgccagcctcgtcgccactgtcgcccacactgccgtcatcgtcctcctcgtcggagttgagggcgaacgcgagccgaggggccgaaccctcgaagctgtggacgatatggtcggcggcgtcccggacctgcgcgcgcgcgccatcctcggtcccgggagggaactcgtccagcgccgtccatggggagaagtcgggatccctggcttggtaactcgccagtacgagctccaccgctccttgggcgagtcccggctatctccgagaagcgctgggcgtggcccccctggttggcggcgtacttcgcagtccgcccgccccagaggcccgcctgccggccggcgcggtctagacgggagacggcgtcccgaagcatgccgggccctacctcgcctgccaagcggagggcctcgacctccccggcggacgagtctagcgcgccctgcagatcggcgatggtgtgttcggcagctgcgaggcgggcggttaagtcgctgtcgcccgtggccgccccgccgctacgcgcccttgcatccagctcccttgcctgcgcctcgagttcagcggcccgctggttcagtgcggccctctcggcgcaggcactttccagattgcgacgcgcttgttcctcttgcgcagccttgcggagggacaggctgtccgccagccgttgagccgcggcctcggcctcctcgagagctcgctcccgctcggtgagcgcgtcctcgcggaggcggagcgcggactcttcttcggcataggcggcttcgtgcaccgccagtgtgactcccgaatagcaacagcggcctcgcgatccgccaggtccctctccacggcgcaggcacgctcttccagcgccatggcacgggcctcaagggcttcttcgcgccgccgggatgccacctcggtctccgccgcccgccgttctcgggcagcggcagcgtcaaggaccccccgggcggcgtcgagctttttccctagctccgcctcccagctcccgtattgaaggcggagggtgtcctgcgcctcgttcatcacggtggtggcgatgagggcagccccccgctcctcctccacctccttggcgatctcccccagcaccttccgacgggcttcgagctctgagacgtgccggcggtgtgccttgcggcccacctccaccatggcctccaccgagcgttgcccctcttcgacacgcgcccatgcggcgtcaagctccgcccgctctgcttgcagggcctccacttgggcacttaacccgtccaacaccgtggtgtttgcgacggccaaggcctgcagaaggggttctgcgctcagtgaagcaacggaaggcgtggggaagagccgcctcggtgaggatgccgcgtggctcggcccgccgatggacgtgccggactcagggatgtcccccggacctggcttgtcctgagcgtcgcccgagggagtgggcccaagcgatgcgcccgcggcctcgtcgcgagctgccttggaagtcgtcgccgcctcggcctggcgaagtctggcctcctcccgagcggcttcttcagcttggcgagctcggacggccacctgggcggcctcctcggcttcccgtaggcgatccgcggcttctcgccggtcagattcccgcctccgagcctctgtggtcgccgggtcctcggcctcagactggccggacttggaatggcgggagggacgcgacgggatctcgctgaaacagaagaaagaccagaagacaaacaagatggatgagtgaaaactcgcgttgaggaaatgaatacggccacgatgggcgtgggacgaacctgcgagggggtcggttaaacgaccaccttggaggggaaatgaggtttccccgggatggttctgtcccccccatcttgcggagccgttttttcttccgctccccctcgggctgcgacgtcggcgtagccccctccgggcgcctgctgctggcacgcgccaccccgccccctcggggaggagatgggggaggggctccttcctgcttcctcttcccccgggcgtcggcagggcggccgctccccgggcccccgtcgcggggcccagaagcacgaccccctcccggggtagattgttcccccctgcggctcccgcccgcgtcatcgtggcctcgaggagcccgctcctccgacgccccgaccgcctgcatgatggtcaggatggaggcgcggtctagatcgctgcagagggggaggactccttgaggaatgagggatgcctccacggaactgagattcagcacccgttggaccactatcttgaagtcctcaggagcccagtcccatctgaccccctggtgggtcctcatacagtcctcggacccggtgtactcccaggcgccccaggcgcgccgctggagtggcgcgatccggcgacgaagatagtcgccgaacaccatggcccctgtgagcccctgggatcgcaggcccgctaggcggtcgaggacggcgtcgtagccatctcccagatctaccggcgcccgccagttggaggcctgcgctggaggctggctcggaagtcggaggcgcgcttcgtcggcgaggggggtgtagaaccagtcgctcttccagtcatcccacttcttgcggaggacgcagggaatgtagcggttcagcaccggcccccgcggctggaagtagcaaccaccaaccaccgacggcggcgacaccggctgtacggtgaagaaccaccggaacagccgaagggatgggcgcaccccgatgaacatctcgcacaggtgcgcgaagatggccaatgtcattaccgcgttgggggtgaggtgcgccatctggagatcgtaaaactccagaacatccatgaagaaagaagaaaatggcggaaccagccctgccatagcaaaagggaggaagaagacagaccgccccgggtagcgtggcgccgggcatccctcgcccagcgagactatctcccggccggtggcagattccggcatgaagcggcgcggcagcccggcctgtctctcgctcacgatgcgggaaggcggcagcacgctaccgtcaagcggagcggagccccatgccatgacgccgaaagaagagatgtttgagagcgagcgcgtgtggcgaaggtagggcacaggaaacaaggagttagggcgcaagcggcgaagacaaggggaataatggcgaaaggaaggaagcaaatctcttcctcggcgactttatacccttgccaatgctgtgtccggctcctcgtttctcgcgcccactatcttgccccctcgtttctcgcgcccacgcttccactaatcccattcgcccatttgcggtgcatgaggtggatatgcggctgtggcagtcgagatggaacatctcgtgcgcgcgttaattacgctcgccgaccgaagcgccatcaccatatctccaggaaaaacgaaccggcttgtcccgatttttagaccggccccacctgtcaccaggccttaggaagtggcgtcacgcccgaccgcttccctcgaggagggcgatcgccctggcataacgccgggggctactgtcggtgacatgggaccgggagtatcatgacttagagacttgaggcagacacgatcacccacgtggcctaatcccctcggggggggggggggtcgggcccgagggtgatacggccgcccttctctttgtctccccgaggggtcggaccgctcccgtctcggccccgagggccgaggcgccccgaccccttgtgggttttgcgccgcgtatatggggtaggtgagcatagcggggctcacctaaccacatttattgcggtttggacgagcgcgtcacgccgcatgtaacgcagtgcagcgcgctcgtttatccggtcagtgaccagtcacagaccgattagatcgtgggttaggtggcgacaggcggtctgacgcacgcctcgccccatcccgtcaggatgagagcctccaagcactcgtccctagccggagccggcgtgttagctcctggagatggcacgttggtcccggtcagatatataccaggcttcatcctaaccattacaagcaagacattgtatgaagaggggcgaacatgcagattgataaactgacgcgtggtggacaagaatgaccgatttgtgaccggtctgacactggtcatgtcgtcagcagacagccatgttcccacgtcgcgcctgcttccggcggaagtggaggtaggtatgggccgtcccatcagaaggtcattcggacggtaaccatacaagtctccgtctgtttatgaaaagataggataagtccccacaaaaaagagagagatggtgcatgtggtatccccttgaggtataaaaggaggaccttgcccacttagaagggggattttttttttcggatccagaacgatcagagagggagagagtaagagctctctggttctccagctcttttgtagcttcttcatacatagatccaccaaaacacaggagtagggtattacgcttctcagcggcccgaacctgtatacatcgcccgtgtcttgtgtgtttccattctcgcgaaccttccacacacagactaggagcttaggatctcacccagggcccccggccgaaccggcaaagggggacctgcacggtctcccggtgaggagccccacgctccgtcataatggtttcttcttttcctttccttttgttttacaagtgttcgtactaatttaaacttgtttggactctaacaaatacaacaagataaggatatcataattaagagtagttactttgtgcttgtgagtcggcttttattctctagtggagagtttggcgtattcattgtgtttctatatttttgttttgttgttttatcttgcacaacatgttgggcatttggacaaaagggtggatatgtctaatgtatgtggtttgcaaaaacttataaacataaaggtggtagctccaaccaccatattcttttcataccacctacattaggaatttcttcatggcttgaaaggatttattttttggaattctctgccaaaaaaattgtacaaaaaatattacatcaaattatactagacaaaaaaaatccttgttagatagagaaaaaattatgctgttcttataaaagatgtagcttataaatatcccctttctcagataacctctggttttggtgcacaaaatgtagggactaaaaaaaaccatcataagaagatagcaacaatacactactctaaacgatccataaaagaagctactattcggtacagctttaaaacaatacatacatcattttttctcttaacaattctcgcacgaggaaacaaacacatagttttctaatgatacttcggctaagttcttctgttagcttttccatctcgctcttattttccacgcgtacgctttctgaactatcaaactgtgtatttttttttttttgcaaaagtaactcaatacagaagttgctttaaaaaatcatattgatgtattgttaaaaaaaagataatacttaatcaatcacacactaatggatcactttgttctacgtgttcccagctcccgctaaagaacacaaccttcgtcactcgccacccatcacaagacaagttaggcatgaaatactacgacactgaactgttggaaagccggtgtgagcgtagctgctccatttcccaccggacaacccgttgaaaaaaaacccggaagattagctgcttccacacggatcggctcatctccctccctactgtcaccactcactcacactgtagtctgcgtgtctgtacgctttgacacgtttgacccgccgcaactgcaagacgacaagatgagacacgggtggcaaaacccgtaattccaacccctacccagggtcaaaccccctcgcttcaatagcttcgtggctaattacccatgagcccctcgaaattatcctatatttaatccggtattaaagtggttttcccgttttgccccccccggcaagcaaaaggcaacgggcatttttcgatttccgcattaaaaactcggccccgcttttgtacgcatcctctctctcctacgaaacaacgacaatttcggtttctttaccaaaacgcggcactaatttaataccccgataatttaattcggttttaaaattttactccgtttttttaattcgttaattaatttattaatttatgtcccctctctctcctcttccttttttgcttttagttttggctttttatttcgcccccatttccattccttcccttttgctcttgctgctcctcttctcctcgcttcgtcttcttcctcctctcgcctcttcgttgcgagtag

SEQ ID NO: 10242 - DNA, 18593 bp, Oryza sativa
ccacctaactgcatttaaagcggtctatgcaaccgcatcatgtcacatttaatgcggcgtgctgcgcatctgaccggtctgtgaccggttgaatgaccgatgggacggcgactgtgtacccccgtcctgtcagtgtgtcaggcggtgagcggcgtgctccgtcccgtcccatcataatgatgaggggcttcacagcctcttaccccagtcagagctggtccaaccactctgaactgacccgggttcccgttttctggtgtgaacgagaacctggaagttctcatccattaaatgacgaatgacaagggcgccatgcatgatttgatgggccccgcgtagcaaccgacgtgcagatagcttctaggctaaggcagaagacatgtaattaatatagagaatattttcccttctccctaggtagcactcgcagcacatgtagtatcctcttagagtataaaaggaggaccatgcctagcgaggaggggggatcggactgaggatccctgagccaaagcttgtctaaccctagcttgcataccagggattcagggactttctaagcacagaagaatcataaacacaggagtagggtattacgcttcatagcggcccgaacctgtataaacctcttttgtctcatcgtcttggaggagcctccgagatcaagatctcacacagtttcactcaccaaatcctcgaatctcacccgctgcccccggccgaactctcaaagaggggcctcacagcctcccgctagagagggtcacccctcgacaactatagtatcccccactttatcaaatttcaatgaaattattcttctcattatccactcccaatgcatttatcttttattttcataaactccgatgcaatggtttattttgaataaatgggagggaaaaaaacaaattctagaactgatggagtgcgttcgacataagcagattgagtgaaaaaaaagtctctcatttctacatgcacgcttcctgaactattaaacggtgttttttttacaaactttttatttatgaaagttatttttaaaaaatcatactaatctcttttgaagtttaaaataaataataatcaattaatcatacactaataattcatctcgttttacatattcttttcaatcttcactaatcctcttatctcaaacactcatatgttttacccattcttttcataactcacatctctcgtttttcgcataaacttcctaaactactcaacggtgtatatatatatatatatataaaagttgcttttaaagaatcatattaatctacttttcaaaacaaaataattagtaatacttaattatttatgtgttaatgagtcgttcgttttatgtgatataattactctagtttcaacaccagaaaccaaacacagcataagcatatgccttttttttttgggttcaggtgatgaggatctgcacactgttgggcgttcaatgaatccagtagggagtccggacatggagcatggacgctgcagagacagaagacagagaggttgcttgcttgaagaaggaagaaggagtaggtgacaggtagggccccaagatgacgcccagctgtcgatccacccaacaccgaccggggtccggcccccagatcagactcatcagacacctcatctctcatcccctcacaacacacgtgttccccgcgtgccattttcagacaccattgctttcgctttgcttagcaactcggcaatgaaaaaaaaaagaaaagaagaaaagaagataaattgtactccgtatttgttttaagattacactgcacatgcgcacacacatacaccactatacacgtaacatcatactcccactcttacgaatatgttcccctaacacatgctctaaagacagaaatcaacatcgtgtccttgatctcactaaaaccctattaaaagtttacttacatatgtgtaatatttgtgagcgttatgattcgaaccctggtggtggtggtggatttatgcacccataactccaccaaaacacccgggattacaaagccgtatggttatcataattatcacgtacgttaatcttttcagttttctaaaaccaaaccatagttatacctcatgataaccgccaaatgcgggatagcggcaaccccacccaaacgatttgttaaatcctgcatcgcaccactattgctttccctctcccttcctgctgtgggccatcgccggccgggcgaccaccgtcgccgacgacggcgccggcgaggtcgttgaaatgaatgcgcgcatgcagcgcagggcgcgggtatctcgtgattcgcgctagcttccttcattgattcctcgccatgccgaccgttcgatctgttcataaatcttcgtcaagcctgcagctgcagtagcagtactcctaaaacagttaaggatggtgcgatgcagcaagctggctgccacggcaatgcatagagagagatgtacggcagggatggatccgatcgatcatctgacggcgatccgacataccagccggttgatggatgtgtgcatttattgttttggctagctgcaccgcgagttgagctgcattttatgcgaccaatgatgtccaaatcctcgcacgggccgtaccacacgtcgcgcagagcactgaattattaggaaaaataaaacaatttcaaattttcactgcattttattccgagttcttttgtttttagcaagggtttggcctccatttcttttatctgaaatgagaagagacctacaaagttctctttttttcccccgagttattacggctacatatgcatatactccatacgagttattacggtattcaaaagccggcggtggcaggcttacttcatttgtcggcaaactattccagtttggaaggttcacggataatgtcagttatcactgactgaaataaacactctcttaaatttaaaaccattactcactctagaaatttatggctactacccgcccggcaaaagaaattcggaattacttcctccattcaaaaagaaaaaaaactaaaagcatgtttagcacaactccacctctcctagaggtagagcaaagccaaacagtttcaactccaactaaaatgggaatgaagctggataaaacattctcacaaaataaaatagagagatggagctaggtttaggttgtttcacagctccaccctgaacgcaactcctttagctaaatttaggagttagagttctaccaaacatgctctaatattagctatgtgttatgtccaaatacgtagttagggttaatcttttttttaaaaaaaaaaggggacggaaggcatatccaaacacatatacctaagtttgatgtttgatttttaaaaaaacacggatggattactagtgctactgatttgaaatttctgtcggacaaaactaatactccctccattaaaaaaagagacaaaccctgggtttccgtgtccaacgtttgaccgtccgtcttatttgaaaaaattatgaaaaaaattaaaaagacaagtcatgtataaagtattaatcatgttttatcatctaacactaatgaaaatactaattataaaaaaaattcatataagacagacagtcaaacgttggacacggaaatttagggtttgtcttttttttttacggatggagtaggttacaggcatatagcagcagcatttcatttcatttcaaacagtgcacaggcacagcacacagatgtgctggccggtcagcgagaccaggccggtgaaagcgaagaaacccaaccaaaaaaaaggagagaaaaaaagaaagagacggagcggccggccgagcacgccacatgccgtcggcgtgctgcctctgctgcttctactgctgctgcttgcacacaaaccaagcagaggcagaggcacggtgatcgagtgaagctggcagtgcagctggagccggaccctccaaagaaaccgtgtgctctaggcaagctgcctcctggaatagaccatcccaacggccagccagcaaaacccttcccaatccatcctttgattcatcaatgctatccatgctcgtcgatgttgcacagcagtaaaagaacacagcgcattttgtaccatgtgctacagtgcccctctcatggatcttaggccctgtttagtttacagaaagtttttccaaaaaatatcacatcgaatctttgaacacatgtatagagtattaaatatagataaatttaaaaactaattgcgcagttaggggagaaatcacgagacgaatcttttgagtctaattagtctatgattagccataagtactacagtaacctatatgtgctaatgacagattaattaagctcaaaagattcgtctcgcggatttcaggtgagttatgaaattagtttttttattcgtgtccaaaaactcctttcaatattcggtcaaacgtccgatgtgatccccaaaatttccttttccttatgtatctgaacacattgatattagtagtagtactaacgtgaatccgcagacagacaaatggacatggcaagttggcaactgaaccacactagtcaattgacttgaatgtacgtttgactcttgcatgtaaacattgcggcaatgagtttttattccgcgaacacgcaaacaaaggcatgtttatatggcaccctaaaatttttcacatcacatcgaacatttaacacatgcataaagtattaaaaatagactaaaaaaacaattaattatacagattacgactagtttgcgagataaatctttaaagcctaattgctctatgatttgacaatttggtgctacagtaaaaatttattaatgatggattaattaggcttaataaattcgtctcgcggtttattaacggattctgtaattagtttttttattaatgctcgaacatcccatgcgacaccctatataatatccgatgtgatacgccaaaactttacacctgaatctaaacaccccctaaaagtaaaaacattgcagcaatccggcaatgagtgggtatgatccacactcgctagccactaatttgctcgctccaagcctcccaatctctccaaatatgctccttttctatttttcaaatataaacaattctaatgtttatattttatatgtacaatataagcaatttttaacaatgatttcaatgcacataaatccaattattttcagctaacctcatgtgctcaagaaagtaatccaaataattcaaaattcaatcaatggggtggctgaaaaggatttttttttctctcgatcttagtttttgttaagcaaaaaaggtatatattttaggaacataaagagtaacacattcttgggttccaataatgcacgtatcgacggattaagtcgtgcatatgaagtcaatcagcgttccgaacttctgatggcccaactcacatgatgttattattttcctctcctattctccgccttccttctatcatttcattgagcgcaagcggtggtgccgtaagaaacaaattgagtgcctcgctccctccacactcttctaatctctcgcctcttctgattccaccaccgccaatagacttagctaaagtcgaaagatgtcaacatgaaagtgtggcaccctcacttcccttcgtctcgctttgctcctggctatcaacattgtcctaccgccaagtgttaacccccatggtttcagcagcgctgccgttgccacctcaccacccgcctttgtctgtcgtctttccagttattcctcacccataatggttatctataggctctctacaagagattcatgtcagaatatttttctacatggaagatattaaatgaaaagagagagcaaaactatctactaacttagaaatagtctatagagaaaaacgaggcaatgcatgagagagctatagatacccatatagacatactattgaggtggtttactattaatctagtctattgctgagatgtacatgttttatagagagcaccttactttatcattgcgggtgctctaagctcacattgtccaccttctcctctccagcatcacccttctctcaacccaatccctaaaccctaaccttaacatagcccttcttgataaggtactatgtgctactacctccgtctcaaaataagtgcagccatgagtttccgcgcccaactttgatcgttcgtcttattcgaaattcttttataattagcatttttgttgttataagatgataaaacatgaatagtactttactcgtgacttatgtttttaatttttttcaaaaaaatttcaaataagatgaatggtcaaagttgggcgtgaaaaactatggctgcacttattttgttacagagggagtagcttactaactagcgcgtgtgtgcgaattactagcattcatgcacattttgtatttgaatttcatgttaggatggctgcgagtttccaaacggggcccgtgtttactattgtacgatcatgtgaccacagctatatatacgtacagtttcctcttctgtcttctttttgtcttgtttcttttgttggatctggagcctaccgctagtagtacgaggaggctccctgcccttttctgcaaaccttggcgccaaattctccaaggataggatggtcatagtactactcctagcactaatgtgaacgattcataggcccactttagtttatgtgccaaaattttttgaagtatacatacatacatacatatgtatgtatgtatgtatgtatgtatgtatgtatatatatatacatttaaagtattcaatataaactaataataaaataaattacagattccgcgagatgaatttattaagcctaactaatttatcattagcaaatgtttactatagcatcaccttatcaaatcatggcgtacttaagcttaaaagattcttctcgtaatttacatgcaaactagacaattgattttttttatatttaatacttagtacaagtgtccaaacatttaatctgacgaaatttttggaagttcagaggaaccaaacactgccatagttccatcacgtggaggttaggcttcgttttcccgcgccgcgcggcccctattttggcgcgaaaacacctccattcatgccgccccgatggcgcgaaaaccgctcggctgcgtgcatggtgggggcgcctctctctccttccccgcgtcgccgtcagagattcaaagattcttgtctcttctttcttcttttctacagtgtctttttcttctcccctcccttttctgttttctctccccatgaatcgtgcgtgcatgatcctgaaatccatcgatcgatcgatcctagggtttctatccaatccgatcttcaaaaagatgatgaaaggagaaaaaagaggatcaaatttcgtacaattcggatgcaaacatcttggatatcatgcggatccaggagtcgtatgatgaaacatcattacagtagtaatagtaattaagctaagatgtactccactatatatggtccaaattgggcaggatgtgcgacactgacatatatatacacgatcaaagcaaagcagcaactaactagcgtggttacgtgacgtgtcgttgtcttcatctgaatcatggccatttcgatctctttttttttcaattatgcctcgcattcatgtcgatccatgctcacctcgacatacactgtcaatggatgcatgctcgaatacaagtatggtacaaacttatctattcgttcgatcgatatccttttgcattggttaattcgaattaggacatatgtgagatgcgagataataatgagtggatttattatagtacacttatgcagtcatcaccggcatttaatttaggaaaaagtacgaattacctctgaattatcgcggtcaaccgaattacctctctaaactcaaataccgaacattttacaccataaactatacataccaaacaaacgaccccatgaacactgttctaggcggttttgatttgagctatcacacgtggcgctaacgtggcaacctagtcagcaaaaaaaaattaaaaaaaatccctaggcccacctgtcatccctttgtttaacccaacttctcccagcccccttgctctctctctctctcatgcgcgtactcggatggccagcggcggagctctttcacgcggctggggacggaggcgagccgattcccccaaatccagctatcgccgcccttttcttccctttggccgcccgtggaggaggcagccggagctcatggtgggcggcgacgcggggatggaggatagcgacggcgcggggggcgagaggtgtgcaaggtcggcgacggcgagcttcttcgcaacgccgtggttgcggagcaggaggagctcccactaggcggaggcccagccgccgccagggaggaacgaggccggaggcggaggccgcagagaggaagaccggcggcgtgtggtggcgagcgcggaaggacctgtccgcgagcgtggcacgcaccagcgcggcggcgggggaagggaggcggaagaggtcgtcgccgagcacctcgacggtgcccgtcgccggccctcgcgcgccgaccgtccacgtcgtcctgcgccaccgctacggcttgacccgcacgcgagagggaggatgagtgagagagacagagagtgagagaggagagagagtatgacaagtggaccccacaacatttttataaactaggaaggtagcccgcacattcgcgcgggcatctattgtggtctgcatgtttcaaaaacttataagaacataatattaaccggatagcaccgtcatacttcaaagtatgttttctccacaaatattcttcgtcggtatttgttattttccacaaatgtgttatctaactacttaaaagtgtttcacattgttgtaatgtaagcaacatgttgttaatcatatggtttaaaaatctttggcttttcctaaatatttatgactgaccaatagctagcctccaaaatatggtctaaagtaatttatttcttttacttgttaaatatactacatccgtcctaaaatgtaagtatttttagctatgaatctggacacacatgtgttcagattcatagctaaaaatggttacattttaggacagaggtagtagttaatttggattcgactcatgaaagtttactgcaaataatctaatgaggtgcacagataaaaaattagtttaggtggtatagttgtttagaaactgctatcacaaaatatgttttctatctaattaataagcataaaaataggacaatgggagagaaggaaaataggaggcgaggttgtgctcgtgcatgaggggggagggcgcagacatgcatatgtacggatataatgtaataggacaggaggattgggattgggccttttctctttttgtctatctattaagataaatctaatggtaaaaaaataatgattccatggtaaaaggcatatttcatataaattatgagtgcatgtgatttttttcaattatttcatattttattatgtcaattcggatgacatggaaaaaaaagcagggatgctgtctcttgacaaaacactatttaatagttgaatttctaatttttgtttgacattgtagttttaatttacatatgcatgtttccagaataatgtaagatgagaggaaggaggaggaaggggaggagacgttttttatttaaaagttttatatagatagattttatggttgaaaataataggtttatctatttaaatgaaaatcattgattaaatgtttctttcgcagcatttatagtactttttataatatattagatgtgccatgtgatgagctagaaacactataaaggatgtataataaatagatctgcatgatattttatggggatctgcttaacaaatctttattatataataagaattatatattaattatttatatactaagctgctagccagaaataaggataataaagtgagtaaggagagagagtagatcatttacgattgcataatatgtattaatatttagttattatataaaggatatgagtttatatgcaaatgatatatttcttatatatatacacacacacacactccaacacatggcataattaaaatcaaatatattataagaaattctaattatttaatattaatattttaatagaaaaatttgctacctataaataaatggaaataaagagagagaaggtggggaacgtacgtacggtatgtacgtgatggaggggatacggatgggttttgtgattttttttccttgttacaagatagatatctaatggtgtgaaacggtgggtccaccgtattaagggaaaatcgatggtcggatttttattttttccttagaatttctataatttgttagagcgccacatggcggtataggagcgtttgtagaagccacatggcggattaggagtgtttgtaggaagtttaatggacttttagtatataaagatagaatgctgattggactgccacgcgtacgccacatagaccaaaacctcagcggattgggtagagtggggtaattcgtccggtttgcatagttgggggtgaagaatatccggttttgtggttcagggggtaattcggtcgaccgcaatagttcaaggagataattcgtactttttcatttaatttatgtatctttgagtcgactaccttacctcaagaagctactgaagaaacgaatggtctttgatttgtcggttgtcacaaggcaagatcgatcaaatattcttcaaggaaaatgagtaggtttaccttaataatgaaaacaaatggcagcattggtcagctcatagaaaatgggagccgatcacacaaattaattagtgctgaatagtcgtttacataaaagaagacagatggaactgtatgatcagaggttcaacccagtaaattaagcagcattatcgtttgacttaaaattaattagtaggattgtattttagagcaccgtattaattggtcaactgtttgaatctctaatagaacggcggattattttttttaaataatgaaggattgatattggtcaacaggaacaaaaaagagataaagtcgtacacaagtttatactcctgatacagagggatacttaattttccgtggaaaaatacaacgaaccatgacaaaatccaaaattcaaaaaaattccaacccaagtcttctgattatttttaccggcattgctaaatagccatcgagagaaaattagagtaaaaaaaggtttgggtatgtggcacgaaatctcaaagctagccgtcctacgtacagtccataatgtgcaagattttagcgtcttttccttccacatcaaaagctacgtaggcctcgtttaattatttggggaaaaaaatttggatttggttttcgcatcggatatacggacacacatttaaagtattaaacgtactcgaataataaaacaaattacagattccgccagaaaactgcgagatgaatttattaagcctaattaatccgtcattaaaaaatatttactatagcaccatgttgtcaaatcatgtcacaattaggcttaaaagatccgtcttgcaatttatacacaatctatgtaattaggttttttttttctatattcaatactctatacatatattaaaacattcgatgtgacagcgtgggaactaaaccgcgcctaaacaaggccataggcatgcaattctcttacagcaacttttttttccttgaagagacaatgcgtagtgctgatttgactttgaggtctgatgctcatgtgcatgcactttggaggcgtgatttaggctaatcccaaatcgatggattacctgatcaagagggcgccgccacgcacgcacgcacgcatgttgccaacccgaccggccggtcgtgcacgcgcgcgtcggagtactgcgcagaacgtgcaacgcaatgcgaagcgcgacactcgcgtgcacaccaccgccggcggcgcgcggtgtacgtgcatgcgccgcacgtcgccggccgcgcgcggcggcggatttggcggccggatcggacgtgccgggaaacgaacgaattacagtatggccaagtttagttctaaattttctttttcaaacttaaaacattttcatcacatcaaaacttttctacacacataaacttttaacttttccgtcacatcgtttcaattttaaccaaatttccaattttaacgtaaactaaacactatatattaaatccggctgggctggccaatcgatggatgtatggtgtcccctccgtgcacgaacggctacatatatatgtcgaattgagtgtggtaaagctacatatcgaatcaaatctctcctcctagctatacatgctgtgttgactccattttatattttttatttttgggaatgaagaaaagaccatatataaatagcacgctgctagctgatcgatcgaacagccggatatactatatttttaggtcgtgcgcgtacgtgcgtgcatgcatgatctccgcacctctgcttccagcttccataattcacctagtttcatattacttccgtccaaaaatattgtaacttttggttataaatctgaacacacagttgtctaaatctattatctatctatatatctattatatactaaaagtccattaaacttcctacaaacgctcttaagccgtcacgtgtcactcctacaaacacacctaagttgtcacatgacactatctaaatctcattgttgattttcacttaaattggtggacccattattttacaccattagattagatctaatattaaaaaataatatcctcatgtacgtatgagtttgagtttgtacgttacaaatgccgctgctttctttccatacgtacaaacattgtacatgattgaaaataaaactttcctaatcttcactgaaaaaaaacatacacatgtacataaaaaagacagaaaaaacatacatacataaaaatcaacggtatttaaaatataattttctacaatataaagataaaatatattacttcacaaatataaatatatttagttaaattaagatctataataaatatccaatcaatgttcttatctattatataataaaagtacattaaactttctctcaaataaattagagaatccctagaaatctattatatactaaacatctattaaatgtcctgtaaacactcctacattgtcacgtgacactctaataaaattagagaaatcctagaaatttagagtaaaaaaagaaaaccatacaaccttcaattttcacttaaattagtggacccactattttaaacattagattagagctcttaaaattcccatgctgctaatctccatcttggaaaaaacataacttgcctacatcgtacgatcgcctccttcccgggaaaaacaaaacttaaatacctacaccatatacgatcgaaaaaagataaagccaaaaaaataaaaagaaaacatgcacacgtacatagtagtatcggaaagaaatactaattatgaaaaatcatcagcgtcagcactgatttgttatcaacaacctttaatctacaattgtattataaataatactacactatgcacagctcaacttaatcgtaaacttattatagtgataaatatatcatgacaaatgacgccaacatgtaatagttaatgcgtacataatgtttcaaataatttcatatcatattttatggtgtcaaatatcacttgacaaatatacaatgttaatttgaatctacatatgtaaaaattaaaataacaaaacctagcattgttttttgagtatatctatttaggtttatttaattttggaagagtttgggattctcgaagtatttggaatttttcaaaacttttcttatttgaggtgtgagaagcacaattaatagattgatgggaaaaaataaactaaattttagcaagtgataataaaacaatagaatttagcttcggtttttaagtggatatttttaggtttattttgggtgatattgagattctaaaggtatctgaaatttttcaaaacgtttttattgttatttgaggactgagaagcatacgtgatagatagatgtgaaaaaaataaattaataagattttagacagttattttgctagaatacaactcttgattcatcacgagaattatgtattatctttgctaagtagtattggcaaaacatgaataatccaataaaatacgcataaaactacttatgctatatttttttatagttgatagaaattctaatataccggatatatagttgacaaatgttatacaccacagaacccaactgtatgtgcactctagcgaattagttagtgtaaataagtttgtgaaaataagtacattcttttcgaatgaaaaaataagtacattcttagaattagtaaatgagtctcatataattataacaacatatggtggaaacaaatttggcgctaaagtataaatatttatcaaaatataaataatgatatggtgttttgcagatttttatggtggtacgtctctttagcttttttttaggtagtggcgaatgattaacctcactcatttaaaaaacatgatattgtatgtattccattaaaatttgataagtacttattactaacttcatatacacattttgtctattctctaccacaaatcgactcaaattttttttaaaaaaaattgttttcatcacctcctccttctttctgtcctctttgtcgttcaatgcaggatgcaatacttgctatgctatcatatatattgcatgggcatgtacatggttgagttaaggtggtgtccatgaaaggctattgtaggcaatgtaactaaagtgacatagttaccaatataatcatttgtgagtgtaccaatagtgtactaagtgttataattgtactgtatgatggtttttaggggcatggctacatcgatgcgggatctatatgttttaagacattacatatatacttcatccattagagatgcattcttatcatattaagtatggtatatttatactatttatacatgtgaaaataagtgatgaataccgggttatgtagtgtagatgaattttttagtgtattaataatgtatcatttgttttagtggtactaatacagcttcatttattaaaagttcacataactcttaaaacgatgttagtaaacaatgatagtaagtagtaatgacaaacatcccgtttatatatgatcaggataaatggatttttatttaaatctaagagacatttttatcacattagtagtatattaaaatctaccatctattttatggtaaatatatttattttttattgtaggatgatctaaattctcttacactatatatatatatatagtgatgtatgattctttttagcattttttttaataacaaataagatggctgtgcatttatgcgaaattcctttccgatttatattctgaaaatgttctatagtttatattccgttgttatagtgtttgaaacaatacatgcctgcgcgaatgcgtgggctatctttttagtttatagttaaaaatgtttatattttgagatggagtaatagagaatgttttatcctgtccagattcatctgaataatccagaattacgatgagtgaaaaataaacaccgttagtacgtatcatctccctcgtcggccgtgattcgtgcccataaatcaactacttaactttgctctttgctattagcttgaatgcgtatacgtgaccatataatcatatacggtctccctctcctctataaatacaaaaaggaaaaataaataaagctgttcatcacattgtacgcacgtacgtacggcacaatttaattgacccacaagtggtttatggttagctctaaattattactgatggggtactaccactagtggtagaagcactactacaacgagtacgccctaattaatgaagactccattgatgatggacgagacgggacggcgtcacgtgaggggcgcgcgccatctccatcccctcacgacgcatccgccattaattaatgtggttcgatcacgtacattcgcgcgcgctggatagatacgacgccatcaatatcgatcgctgtactccactctgcatgcccccactactctgctcgatcctcctcagttactaccactgctctaaggccagtcacaatgggggtttcactggtgtgtcatgcacatttaataggggtaagactgaataaaaaatgattatttgcatgaaatggggatgagagagaaggaaagagtttcatcctggtgaaactcgtcagcgtcgtttccaagtcctcggtaacagagtgaaacccccgttgaggccgattcgtttcattcaccggatctcttgcgtccgcctccgccgtgcgacctccgcattctcccgcgccgcgccggattttgggtacaaatgatcccagcaacttgtatcaattaaatgctttgcttagtcttggaaacgtcaaagtgaaacccctccactgtggggattgtttcataaaagatttcatttgagagaagatggtataatattttgggtagccgtgcaatgacactagccattgtgactggcctaacgaacgtgccacacctgtttggcagagcttccgacacttttttttaaaaaaaaactaaaactctccgaacaatttagttttttacagattataagaaaatgtagatgtagaataaaataaataaagttagaaatttaaaagtccagtttttttaaattctcatgaaatatttcttccgtatcaaaatataattatttttagctataaatctggacaagctaaaagttattatattttaagacggagatagtagttaccaagcaaccatttctcaaaatattgtttagagagctttgcatcggatatagcttctcttataatctcccggtcatcaaacactctagattctcacatactccctccatctccaaaataatattttttctcatgtgacacatcctaggaggagcctgtcgagattcgttgtaatatgatatttcgagaaggatgaagtaactttgaaaaaaatatcattatagaattcaaaaggtgaactataattcagaagatgaattataagtcagaagctgggtgttttagtttaaacagctgtttttaagaatcctaacctctctcaaacacaaccctagacaagctctttcactacatgttatcagaccactaataggtttttgtaagctagaattcctatatcgtatattctcatgagtggtgaaatagatgtagaaacgtatgatttgcagtaaacaaaacatcgcactacgttacaacccagcagtgggcatattagcgtatactccagagtccagacacagccaaagtcggcaaagccgaccaggaatatacaccacatattcgagtaattaagaaccatattgggaccttgtcagattaactaatctcccatatcaacactactaataaccgtccaaattaatgctagttgtagcagcattgtacaaatttagagccaatgcacagctccaaatccggtaagatgctgccggcccctttgtccatctcgccgtactccatctggccatggcgaaaatacaatctccattctaaaattaaactcttcttttattcatctcacaataaaactaacagccccaccgtttggctttttccttgataaaccaaaatggcttattaggaagtaaaaataaatttgtaggtaatatatatatatatatatatatatatatatatattcttggtgacttaaaagtcaatgctgaaaaaaaactacgttgaaaatatcttaaaattaagtttgaaaatttaaaattacctttttctttggctgattagacgattcgatgggagcctaaatatcctcatttttatcaaattcgaatacaattatattattctgtttaccaaatcgaatatccacgctgggaatggagtaatttccacgtcggatcgtgtcagaggagtaactaaatactggtactcctaaataaagtggatttaaagggaaaaagcagagctgagcacgcagcattggaagctccaaaagatgtggatccgtgtttcgtgctgctgcaccgcaccgcaccggcgaggcgttgttgggcgacagcgacgcgacacggcgcgggaggcggtggagtgaccgaaatgcccctggggatcatctctgaggtggccgtggttggcgagggcagtttggtcagtttaagggtgatgggatcggtttggttcggtggagcaagatccggaccgtccgtagcgacggcagcagaaaagaaaggcagccgaacccgggtggggcccgcacgacagctggcgcggagacagacgctacgcaggcacgccccctgggggccccactcaccagctcctgttcctgctttacttgtcgttgctgttggcatattttcaaatattatttcttccatattacttggtggttttattttcctattagtagtagtaatgttgcttctggtaatagttgtgtgtgctgtttctcgactggacctctctaacaaaaaccgaaaataaaccttttcttctgctt

SEQ ID NO: 10243 - DNA, 50809 bp, Oryza sativa
taaattcactgaatcatgtgtctcatattttaccggtttatatttactgataggatgattctatttctcgttactggttttctcaacaaacaaaagttttacatgaagtattgttactttcacataaaatagtttattactgatgggagggttttattcttagtttctcgttttgagaagacagcaagttctcagcttttttttctgaagttctgacggatggcatagttagtactatggcattgcaatgggataattgaagcactgcaataagctggtaatagttttttttcccatctttgcaagaggaggcaacctatagggatggtgggatatttgtacttatcttttagccttaatatggacctgagttcttactgcagggagtgcaacaattccatgtaaccaaaagtatgaattggacacagtacagttcaagaacaggttcttctctacgaaaataaattggcaaggtaaggatacataggatgcaacagcacagtttgttgtagtcaatttgtaagcttcttgtagcaccacaaatgatattttagttgtttaaagaggataattgcaatcttttttatgcttaggctaccttagagttgaaaaaatctaggattgcaagagcattgcaagggagaacttctgaaaaggaactgtgagtacaaagaagagctcacaacaagtatagagttcttgcattgcattaacatatgattttttttaaaaaaatatttagtataatgtcattattgtttttcctagcaactaaagtctgcgattcagagaacaatactaatactattatgcacatacttctatcgtcttttggttggttgaaggatgaataataccaaatatcttcttttggttgaaggatgaattatatcaaatattgccgtaatgttagtacgggtatattactagtaggatgttgatgggtcgatttggatcccacctaacgattatgttcgtactcggttatggatattggatacgaatttgcattagaaactaggacgtgcacacttttagacattagtatggtattccgttggaatttctagaattttcatttgggaaaccatcccctctggacgtccgatgcagacacaggagctcctctacctttgggcacgacactccaatgtggttggcggacatgatgtgtaacgaggccagaatagacgtggggagcatctaaaaattttgccgtaagtttttttatgaaaaactttcaaatatagtgtagtataactgaaagagtaattacattgtaataacaatgcaattacactataactgcatcgtaactacactgtttttacgatataatttgtataaaacttctattcaactatggtttggttggatagcaccgagatcttaagcgtgatatgcgtgaaaatttatttctagcaatttttttcttcatgcgtaaatctagaggtgatccgatggtcacaaatgtgcaagtttttggagcaaaaaacttggagaagttatctagcaattctgtagacatggggtgacaagacaaaagcgagaggaggaccggaccgggatagagaggctagaggcttcgagtgcacccatgactgagggtgtttttgagacaagagaaaaatggaaattgagaatataagcaaaacgggtgtgcttgagagaatgaaaaatgaagattaaaaagttacgcaaaacgagataaaccgttagcatataattagtgaaaaaaaatgtaccatttagcaattcaaaaaatgtgtgcgcgaaggacgatgtattttttcttccaatgttttaggatagaatacaaccttagacatcagaatgggaagcctagttcccgtggatccgaccaattgagtagaggaaaaaagtgaatccggtcacaatagtagagtaagaaagtgaaccgtgggctattcacttgtgaacgcgtagaacattttattgttttgttctatctcgtggcactttatattatacaggtgtgttatcccgttgatcaaatggtacacatgataagttacatgtaccacggttcttttatcttgcatatagtggtttttgtatattataattatttgatatcgagtttcttccaattctctagcatttagttttatcatcggatttgttctcttcgcaccactacatgcattgtactcctgatgacggttgatgctgcgtatagtatagtttgtcgtaccgtaatttcttcgaactcgcgcctccctgagcagaaaaactgaaatcatgcacgcacatgttggaagtttgtcagcacctgtggcgtcggccacacgtataccgcacggcgtgacaatgccaaactgtggagacgatgcggtgcgatgtatggggggcatgtacactgaaatcggcgtttggccggtcgattagagcaggggagaggagaggagatggatggaggtgctccccgtcccagtcgacgccgacccgcaggggatcagagcgcgacgcgtgcatgccgttcgactgaacaaatatgcgaacgtatacgtacgtagcagtaggcaggcaggatcttagaggcaggggagccgggagcatgcagccggaaggtccctgtcacggacgctgtacgtccacttcacaccatgggaaattgggaatggctggacgtttgatcgttcagtttcgaagcataaacaggtcgtggatggctgggtgcagtgcagtgggaattgggaacagctgaatcgataggtctgtaactgggaaatctctgtcgcctggtggagtgactgtgggccttggcccatgcggagtgatgggcgaggccgtgcagggacaggtagcccgggcgaaatttggggccagttattagagcgagtacaataagcctagtcagctagcggcaaaatcatccacgtcattgaaatcttccgtggaagagagagaggaggggagagagagccaagcgggcgcttatttaagcgctaacgctaacacaataaacgatgctctatcacctgcttgcattgaaccaaaggtgcaagattatctgtggacccacgttacaaagactgaatgggttaggaattgagtaagctgatgacacgcatcattaaatcaaagtataaagaaagcataggcagtcgtgtagagaaaaatgatgaacaagctagtgtatacatctatctttgtggttaactctaatagtcgatgtgtatatttttacagccaactaccggctatattattagacctgctcttagatggacctcaagtacccaacaacttttttagtgagagttgagagtttgagaccacacctgcaagttgcagcttgcaggatcgagcgatcatcccttaattagggcctctttaacagcacctcaaaatccgacttttcattcttcaaataccaatttagacagcttgtcaaaaagttaaagatttaaatttatctttcactccaataacctctctattaccttctccaatctgatactagatcccacatgtcaatctctacccttcttcttcccctctctctaacaccacatctctttccttttcccacccacccgacagataaggaggtggtggtggttactgctcgtggcgagatggggagccagtgttcggcggcgccgtttggtgtgacaaatccgtgatggcagcggctcgcgcagtgaatcctcgaccgcgacagcggctactagcgcatccaacttcttcttcttcatccgggcagatatgacgttggcgacgacaactacaacatcggatggcgaccctgacgaggtctggcgatagacgacgatgacgatagccgtaacgattggcatatgggcccctccaatccgtccacggccatcatgctcaaggccactacttgctccgtcgttgctccttactcctccattagcaccgtcactgccactgtcggtgtcgctgcttgttggtgggcagcctgtgaagagagcaggaaggggaggaattggaaggagggatgggagaggtggtgggacccacctttagccagtggaggaggctagctacatttaggctgcgttcattatcctttgttcccaacacgaacaatgtgcacgaaaaacggagtggtccaacagctatttttttttcaaaaatggatcaatatgatttttaagtaacttttgtatagaaaattttttttttaaaaaaactacaccgtttaacagtttgggaagtgtgcgtgcagaaaacgaggcggagggagctggaaccagctagaacgaagctttaggctgcgttctttcaaaggagatttgggagagattgaggagattgtgacttgttttccgtgcgcacgcttcccaaactactagacggtgcgtttttttgtataaaatttctataggaaacttgctttaaaaaatcatattagtctatttttaaaatttaaaatagttaatactcaattaatcatgtgctaatggctcacctcgttttgcgtatcttaccaatcttctctatctcccctttctcaaactcagccttagtcatccaaaggagtggttttgctatccggatggagagtgtattgaagctatttctttttttttcgtgttagtcaaattttagcttagagagttaaatagacattttcgttggagatgctcttacctactcattgtgaaaataatacgaaaaagaaatgcacttatgcttgtaaaaataccttggtcaaatcatgcgcggttcacacttcacacgctcttgcaagtgatttgcaaatgctcgtgatcgtgcaggcatgtggtgcagcgaggtgactttggattccttcaaacgtacagccaacatctcttgcatatgtacaacaatcagctgccagcggggcaggaataggatctgtggtttatcccccatgagctatgatagctgcatgtccaacgagaagagagtcaaattaaatctcctagtctgccagacatattcacgacctatcttaattaatattccatctatttcaaaatcaaaatattgtaaactatttctgaattacacatagcttaatattatgaaatttaaacatatactggttcaaattcgtagtatttggttgtctaatccaaatagtaaattactactccagtgaaaatatagtactgcaacctagtaccggatcgagcacatcctagtattataaatatgaacaggatcaaacatatcctagtattacgaatatgaacaagagtaaccatgaacaaactcctatccaaattcaaagtagtaagatctatgtccagattcgtagcactagaatatgctcaattctattttgggatggagagaaagtagctacctatatcaattatattaattatttagcctcaacgaacatggcaccttgcacgtacgttcagctgtaaatgttctttgctgattgctaaccagaagagaagaaaccctggcagctcgatggcaataccttgattccttaaacaaagacgcatgcaactgccagtccctgctaacatgcccatggtaaaaacggacatttggaaacggaggcgcgccgaacatgcccagaacatgcatcatgtccctcatcctgttcgttgacttcaaccatgtgccgatcgaaccgtgtagttggtctatctctatataagctcacacaaatctgatctgtcaccacggataaagatcggacagagaggtgggaaggataaggatttccgggaaaatggacaagacggtgatcgtcgtctccgccgtcgtcgggtccctggggttgctgagcgccattctgggattcgccgccgagagcacaaagatcactgtaagcacattgccgatctctctcctggcccctgaagcgtacgttcttgcttcattggaatggatgcgccgtggcgcatatacgtggccaacaactgacagttgaacgatcgattttgcagatttcggacgtgcgggtttccggcgacgagtgcctgtacccgcagaacccctcgctaaggctggggctctgcgccgccgtattgctgcttctggcgcaggtcaccgtgtccgccatcggcggctgcggctgctgctgcggcaacggcaagccccgcggcatcccgtcctccaagaccaaccgggtcgtcggcatcgtcttcgccgttgcctcatggtgagcaaattaagcacgcagcgacgactgctttcatgcgcaacctcggtgtggtctcacgacaagtgtcgcgtgcgttcgtgcgtgcgtgcgtacaggatagcggcggtgatcgccgtagtgctgttcgtggagggggcggcgtggaacgccaacgtggcgagggacaccgcgccggtgtgctacttcctcaaggacggcgtcttcgcggccgcggccgtgctggccctcgccgccacggcgctcggtgtcgcctcctacgtcatgctccgcaggcagctgcccgacgacgacgacgacgcaccggcgggcgcggtcgcgtcctggaggcagccgctgctgcactccgggatcgcgatgggccacccgcagttcccgccgcatcctcaatggcattcgcaggtttagcacggtgtcaaccgcggatgaatcggaacagcctacgtgtgaagtcaaaccagagagttcaatctgaatcgagctggatgcggctagagaactactgattcatactcgactgcgggtccatcgacttagtcgagtcaaacataaacagtagtagtagaaatccagtagtcgatcattttccatcttgaactttgcttgatgtatcaattactctgcaatcacatgtccacaccctaagcaaacaagattgtgaataatatcgtagaaattaaagggatcctaatggagaggtttgataatttgaagtaaggcaggcgggtcagcccaacacacttttgggccaagctatagatggtgaaaatctatacttcatagactcatagtggacttctattctcaggcctcgggccatggccatggcttaggtggctcaaggcctcggtccgtctctgataggtcccaatttgcgaagcgttttaaaatttttttagtaggaacgaaatcattatgatgtaacctattcatccctccaagttagtaattgtgcatttttatattttggtgtgacaatataaaaacaatataaattgctcgaaatgataataattaatgacactcaaaagattgctgaatcgacggagctgcatggagacttacattgatcgtggaactccaactttgggggtctgaatttcactttgccgctaaacaaactaagtataatagccactagttcaaaaagaaaactttgacacatcgaccacctccaaattaccgcacaagctctgctactatgtgttaccatcagcatttttaataaaattataatgagaccatacctcaaaccaaataggtcaagggcccaaggtgtaggaccaaaaggccacttcactgcccctgtattctttgctgcgttcggcagcatgatattgtgagatagtttgtttcgtttttcacacgcacgctttccgaactactaaacggtgtattttttttacaaaagttttctatataaaagttgccttaaaaatcatattaattcatttttgaagtttaaaatagtttgtattgttaagatactagcccaactcaacaggctagctaagagctcactccaatcttgagttcacccctaattcgagtgcatgcgctattatattaagttgcgtacgtgccgcgggaaattcggactctgatccaaaaaaaaaaatgctctgagcttttaacttgtgcctcaaacttttatttcaaaatcacaaactttcatcttaaaatcacataaccttcaatccaaaaatttaaactttcatctaaaaatcacaaaacatctaattattcgagatctaaaactttattctcaaaatcacaaaactttcaattaaaacataaaacttttatcttaaaaatcacaaaacttcaaccaagaaaaatcaaataattgtcatctacatactcaaccttagacgtctccacgattcctccctcttttaagttggcctcagctatcactgcattcctggttgtggtacccagccaccaaccaaggctgtatccagtggcgaagctaagtagtgttatgggggttcctgggcacccggttgcaaaagaaaatttagtgcttaataccccttcgtaatcatatgtgcatccccctcagccaagtttggtgtacccccacgctagaaatcaggccattgaagcacgaacggcctacaaccacaacctcagtaggagcccaattcagtcctacttgccgcatcaccgtgaggacgtacgcacacgcacgcctcttctcgtttttttttctttctggcgactcgctcttcctctttttccctaccaacgccaacgcctcttgccgccaatgtcacaattaatcctggatgaataatcgatgccttagcaagatgaaaggatgtcaccgaggatgggcataggcaattcttttttttagaagagaaggttttttttacccaacctttatatgtcttatatccaaccggatatatagagcctaaattaggaatttagcctatcaaataaggaacttactctgaaataacccaatctgaaattcgctactacggagatttaaactcaggaccttggtgtgctactcacgtcactgcaaccactaggctatagggcacaggcaattccttgcctcctctatcttttgttcttttttactaattctttaccagtcaatcaattcattggaagagctccttcaccgtgagatataagttttcaattacgtgataatagctctctttttttttcggatcgaatggttatggttagtgcagtttttatctatgcttctttgttagtgcactccactgttatcgttgatgataacaacgcgaaaaaacattataatttactataatattgctttaaaatatatacattgtactatatagtggtgcacccccctccattcttctctagctccgcccttggctgtatcgcttcttcctgcatgcggaggtcacgtagtctgcgcctgcatcaccgcgttcatgcggaggtcgcggcgtcatccctgatcagcgtcgccctgtgtccttgcaacttcaccagtctttctcgatctctgcccagttgtttgcctccccttcttcggaaatggcgccatagctcgtcggctacttgccctttcttgtctggtgctgcttgtctcgtcatctatggagaagatgatgttgtagtttgccggctgcctatccttagcgctactctcactgccattaacccggggtgcggggatccggtgagggcaaggacgggaattgttttgcacccgatctatgctgagggggcagggacgggcacatgggtgctctttcccaacttagcccggacttgtcttgttgccacacctagataaggttgaggagctagggtgtggtggtgccacatggctagataaacacggtagatggacatggaggagctaagggttacaggaccacatcaagagtggagagggatggaaaatagtcggggatggagactgggacaatgaccgtggctaggcattcgtgatgaagctaatggatgggtgagggcgagcccctttatggctagatctgtcagctaacaatagaatcataagtgtgggggcacattgagaagtcaaataaaaatgagagacgagccatggaaactagaagataacgagaaccttcgatctctttggaccatatccataaaataaaattcatgcgtctaacgttgcgttgttcttatggaccgagtatgtgccccacacagctacaccaaatacaaatataattttgagtaagagtcatatgaagatttaaaattttaatagtgtgggaagttctgaaatttcttagttttagacattcacctattcattttttggtgataattcagcggtgtgccttcggcccaagactccaagaggacggaaggcggaactaccccagagaatccggagacagttttagcccaatcagacctcagaaggtgggcctcaatagtcagtaacgagttttcacaaacgaccagctgacgctcgcggtcgcgctgcgctggtgcggtggtgcctggtgcacctcctctttggcgcacggcacaatctcgattctcgagccctccccccgcgcgcgcgtatagctcgcggcgcacgggcggtcgggtcttcacgcggccacgggcgaaatgagccgcgcaaaatcgtggcactccgcgcgcttctctgaactgccgccggcgcggccactactacgcgcgcgggggtcagcctattccaaaatccaaagtcgtcgctaaaagagtagttttttttctccaaaccatgcgtggtgcaacagcgatatggactcgatctactgccccgatggaccttagcttaacacggctagttctggtcaatgccgaggtacaacgcaacggagaggctcgcagcctgcatgatctggctaccaatgggtttttttctcccaaaattagttggtggtggccattatagtggccgttgacacaacagagtatatcagaagcgcgccgtaacaagtagaatacgggggcattgtcaaatgtgtacacggtcttaaaattataaaggacaactagatagaagaagcagaagctatgtgcgccagctgcagcgcaactgtgtctaaagaaactcctttccctgtatatataaaacaagagcaaacagaatgtattaagcttgaaacagaaaactgggtcaactcgatcatatgcacaatcctgatattaattaacaatgcttgtgatcatggggagccatgtgagtgccgtgggtgactttggacttggtccatgtagtatatatttttaagtttgacaatgaggataagttataaatattactaagttgtacataccaggcgctacatagtttaacctaattatctaaaaaaacatagtttaacctaaagtctatgataacgtaagtgaattgttcgttttcctcgtcagtttaaactttggcaaatttcacccctaaaacatcgtggctatgtaattttagctattcaacacaagaaaaatcaagctttagaaaagacactcacattacgccgcctagaaccagttttttcttggggtgtgagggagggttaatttctccggtttgatgagttcgggtgtaaaatatctagtattagagttaagttagtaatttggattgttgcaaaactttaagtgtgtaatttagactattcttaatagataatagttaataagatagcgtatgtttttcttgtagtggactttataattaaactaaattatatagttaacgcattgttcagaagttttgcaattttcatttcatatcagatcatatattctatattttaccacctggtgatgttgctttttactccattgtttcgctttgacttttttcaatcaaactttttaggtttgaccaagtttataaaaaaattagcaacatttacaataccaaataagtttcgttaaatgtgatattgaatatattttgataatatgtttgttttgtattaaaagtattgctatattgctctataacttagccaaatttaaaaatcaaaatcaacttataatttgtgccccataagatgatgttttgtgctatggaattagtggaggaccaagagaaaccttgcttaatttgtttttcagttgtcctttcagtaagaggtgtgctgagagcgtttgggtatcaggtggaatactaattagaaatttgccaaatggtggtgttggctagaaaccatttaaggataaaaagtttcttggagattatgcgctttgcttgttggcacatttggaagcagtgaaatggccatgattttgacaacattcaaccatatttttaataggtggtttgttgcttttaagaatgaaattcttctacatgtttgaaaaatgagggatactcttagcacttccattcttagctagttacaaggtttgtaatttttgaggactttgtttttctttttttgttctttctctgtgcatatctttctgctcttaatatataactactgaataaagccctggtagtattttcaattaaaaaaaaggaacataatagtgaactaattgcatgcatggtttgatactttgatgcagtcagtgaacataattttgaaagcgaggctctgacctaaagaagccatcgaaccaaattttgtagaatagaaaaaaaattggtagaaattaaaagggggaacaaaatatgtgtggtggaattaaacaaactgtgaacccccgagaccttgcatatgtacagggaatagttaatgaaccagtcatggacacattaattacttacgccaacatggacacaaccacaacaacgtttatgcatcgtgcagcatggttgtgccattatattacgagctcctcccgtatattcccgttggtagtgtggcataaatatgtgccactcgaactgcgtcggagtctgtgatctagctcgcgagacctgtacataaatacacgcacgacgccaacattgtctcagccgggaagagaccaagagtccgatatggggaagaaagcgaaggcggccgccggctccggcgccggcaccagcgccgggcgtgaagaaccgatcgttgtcgcgattaaaatggacaagacgacgatcatcgtgtcgtcggtggttggttccctgggcgtgctcagcgccatcctggggttcgctgccgaggcggcaaagttcactgtaagcatgcatgcacgcactcatcttatcatctctctctctctctctctctctctctctctctctctcgcttcttgttgttcttttgttgaactgtgatgatgatcttgtttctgagtagatcttaatcatcaacgaacataatgacattttgttatgtgtctttgcaggattgtgcatcgtcgctcgggttggcgatcgcagcgaccatcttcctgatgatggcgcaggtcaccgttgcggccgtcggcggctgctgcgggtgctgcaagtcccgtgccgtcccgtccgagaccaagcggatcgtcggcgtcgtgtgcgcctcgatctcatggtgagttcatcaccattctcatcgatacgatatcatgagctcacggcattcatgcgcacgtacaacaaacgatagatcatcgcagactagcagattttctacacctagatatcatggcacccattatttacataagacacaaatagttatagaaaaaaattaaaaaaattagtaacatatcaattgtgatgatataagtatatagacaaacatgcaagattaaatttgatctacaactagagaaataaaaataataaaatcagacagtgaatagtacccgtatagtgcagataaaatttggtatttttgtttcttcatatgtcaatcgaatttagacttgcatgtttgtatattgtcttatattatcaaagttcatcttatcgaattttataaattttttatataactgtttaaattacatgcatggcacctaggtgtagaaaatactttctcgttatttacaccctctcgctacgtcttccgtgcagggtggcggcggtgatcgcgtttgcgttgttcgtggacggatcaatcggcgcggcggtggcgtgcgtcggcctggtcggcgagttcgcgggcgcgggcgtgctggtcctcgtcgccacgggcctcgggatcacctcgtttatcatgctccgtatgcatccgcaggccggcgaggcggcggcagaccgggcggccccgcgggattacgacgacgacgaacccacgccgatcgggacgccgatagacatccacggattccggccgccgatgcctcctaaccctcaggtgcctgagccgttgccgaactatccaccgccaccgtactcccctgctcctgctcctgctccggctccggctgagggaaacggcaaccaattagcacccgaccagcagctcgcgcctcatccacaaggtcatgcgcaggtgtaggcgtgtagctgtaacatcgtgcacgcatttatcatcatctggtgttgaactgaatcgattaaggcctaacgcgacaaatgcaatgcccttgatcatacgtgctgccctgttttgcttatttttttattggtttgatttcaatgatttgtgtacgtgacatttatctatgcaccgaacgttactgttcaccattttttttccgaggactgttcaccctttcaagcaaggagattagtttgagttttattggagttccacgattttttcagattcatgccaggacgtacaacttattgatgtgaagtatatgtaaatgcaataaacttgttcactattattccctctgtttcatgttgtactctagatagtgtgatttttttttctagtcaaatctatttacgttttaccaaatgtttagacaaattagtaatatttataacagtaaatttgtttaattaaatataaacaaatatatttgacaatatatttgttttatattgaaaatatatttgttttaaaaaacttagtcaaacgtaaaaaagtttgactagaaaaaataaaagcgatttataacataaaacaaaacagagggagtaatttataaaagaaaatagcaacattatggtgaaaaaaaaatatctgcatgggctttcatccccatactgaggccatgatgacgagaacatcacttcatcagatacgaatgtaactctataagttccagttcggcctccgaaggcagtgctgattttcatgtcaactccgatttggatgatcttgggtttgttggaaagcttatctcgtcacctttcaaacgcatcatgtctcatatcaaaattcattccgagttaatagaaaacgtcaaaacaagacagtattgtatctgaaaccgaccttgagccttaggctttgtaatggagtaaactcatctaagaagtgactctctccacctctacgaactagcacctatctctaactttatttttctctataaatagatttgtacaacctaaaaaaacaattgggttttgtttagttgaattttttccaggtgtcattcaccttccctctaggcctcgctcaattattcggcgactatagattcagagcccccaatagttgatatgttgattggcgtgatcgattatatctatcacttcaatcgcaactatttttttatgccattgcatcctactttattcttgcaatgttctctcgtttgcattgcagagatcatcaaccgcacgtcatggttattggtatgccatcgtttgtggtttagcgattgcatgggtgtcctatacttattttggttagtagccacgtcgaaaacgtcatactcgatcaaagtaaaagttatctccttagaagatcaggtcaagagagagagagcacgccatcacatgacctagggtgtccggggtcagggttctctttgtgcccgtgcgctacatttctagttaataaaaagtcagaatgcagggtagatatataaaacgtagaataaaaaacgatccattgagttatgtagaaatcacgctgaccatgcccatatcacacatcgctgtttttacgagttgctcctgttggccgtagcataaaccgtgtgcccattgaactgtgtcagcgtgtaaccgagctctcgtgagacctctctatatataaacacgagacgccaatcttgtatcagccgcgaagagaaataagagtccgatatggttaagatcgaagcgcccgccgccgccggcctggaagaaccggccgccgtcctcgcgattaaaatggacaagacgacgatcatcgtgtccgcggtggttgggtcccttgggttgctcagcgccatcctgggattcgccgccgagggtgcgaagcgcaccaaggcaagttcttgctaacactagctacatattatctagactctagtggtatatatatgtttactgctttttttttttgaacttgatgactactgccttagtgattatatatgtgtttaatttccagcgttgcgaactcgacctgtacgacttgtactactcgtcgaactcatcgtcagcagcggtcgggctgggtgtctgcggggccatcttgctggtgataacacaggtcaccgtggctgccatcggcggctgctgcgggtgctgcaagtcccgcgccatcccgtccgagaccaagcggatcgtcggcgtcgtctgcgccgtcttctcctggtgagtcgtcgcgccccgcgcgcgtacgtgcatgctctgatcgacagattgcgcgcggtgttgtgatgccacgactcacgaacgtacgctggttgcgtacgtacgtacgtgcgtgcaggataacggcggtgatcgcgttcgtgttgttcctggacggcgcgatcgtggagtccaactgcgtcctcgtcaggggcggcttctttgcttccgcgggcgtgctgaccctcatcaccacggccctcgggatgacatcctacttcatgctccgcgcacagccggacgagcccgcggcgccggcggcgcggcgaccgccaggtccggcgggcggcgatgaacccacgccgatcgtcggggtcccgacggcggtcccggccgggttcccgccaccagtgtcgtcgcctaatcctctgctggtgcctgtacctgctgctcaagcgccgccgaaccagcagtttgctcatccggctaccagccaggcgctgccgcacgcgcggttcgctgatgcagctgttcctgatcctgctcctgctgctgctcaaggctatggatcgcaggcgtctaaccagcagcacttcccggctaatcctcgagggcgttcagaggtgtaacactgacttcacactgcgatcatcccgtgtgttggcttagaatcaagggactagccggctagtgtactgttcgtgaagtttgtatttgtgcttttctgtgtatgtgtgtgtgtgtgtgtgtgtgtgtgtgtgtgatgcatgcacgtgcttgctttctgatgtttggaaagtggcccttgattttaatttaaataatcaataattatgcattcaagaactacggacggttgtgattttctgaaggactacctaaaatggttcagcaagttttttatgggaatactttcacatttagctatagtgtatatagtgtaattgaattgtaattatttttttttaatgaaccagctagcacaagacaatactaatttcattgtatagagtaggagtaaaagtcacaaaggagtctggaaaagaaaaatgacttaaaagtgttttgaaggaattagggtaacatttttgagggtcttttcccttccactcgcgtctaagttttcccttcctcctttatcttagcaacaagaagccgttgggagctctctgtggtggagaacttgttagtttgtttcttttcaaatctcccaggacgttagtagcataaaagatcacgtcccaagtttgggtagcccttttcgtgtggcaattgccccccgccattttcgatcgtgttcatcgcctcccatgaccttggtattagttgtttcgcatgcaatttaagttgtaggcatgccctagattttttatatctataatccgctagtagatggaaagaagtttcaaacgcgtgacaacaaagtaggtagtatgtgttgtaaggtcattcccttgttgctaaatgtaattacattgtaactctatagtaattgtgttataactaatatgtaactaagtataaaatcaactagagaaaccacatctggttggttggctagcccccacgcgcccctcgcatgaagtggcaggttgcgcatggcgcaaaaaattcttccccaccccttgcatgaatctccatgcaatttgatggactacaaattgaaaattttgggaggaaaaaactgtcaaaggttatctagcaaatctgtttttgtttttaagttgcacagaagaaacacaccactatgcatgttgtactctagtgcctcctttagtaacacttactctctccgtaccaaaaaaaaatcaatataagagtggtcacatcccttcttaggttgattttttttagacggagggagtatatatttatatacatccaaactctcatgccacaccccttatcttgatgactttttttttccatatcccctattagagcaaggtgaataatatatacaatagttagctataaaaattgtaccatcatctatagtcgtcagtgatagtagttaaattatacattaggcaggttataatatataattctctcgtctctagacaaatatggtaaaatgtcgttggccagaaagtaattggcctcaatttttggtcttgggaggagtgttgcagtctggctacagtagtagcctacaattctctatcatccacccattagaaatttaacgttgcaattcttatagcatgttgatgtaggtttgttatatttgcccaaattagtctattagacaaatagacagatccaagtctacaccacagggtcaagcacaaaataccgaactgtaattgcaattattaatgtattaattgggccacttgatgacactttgttttgtctatgccttcctacacacagcatcaactaatataagcgagatagttatgacttaggaactgatcaaagtatccagaaaaatctgtaaagagtatactatagtgatatcacagttccattgccacgtgtaaggcacatagttctaattaaagaatcatgcttaattaataacattatggttgtccaagctaaccgatctacgtcctacagcttgcaaccatctacatgctcatcatatacataatcgcattatagaaagagatggcttaatttgtccaatgatttgactagctatgagtatttaacacatattatagttggctatatgtctccaataaaaggctagagagtgcgtccatatataatatttacgaatttcatgctaaaagagcacaagttgtgtcaatgtcttctgttggagtgatactatcgaatgtttaattaacgattgtgactgtgggtagcatagcgtggtgtgacttattcactactatagaaaaacacatagaggtcgacactttatataccgaaatagttaaaaccgctttcccgtccctgcgaggtgcaaaaaattatagaaccggcaccttttagaaactataggtgttggttttaaagaaaaatcgacaccaatactataaatgccgattttttaatgaagtttttaaaatattgacaaagaaaaccgacccgagctgagcgaccgatcgacacccatatatcacttgcgtccttatccattctcgtacccaccttccaatctctctctctctcgccgcccccttctcctctccctccgccccatctcgcctccctcgcggcgtactcactcacctcggcgtcccttggcggatccggcggccctcttccccctccctctccctccgtcccctcttgtctcccttcacaggtggcggctccctccaccacctctcacctccctcccgcggtggacccggtgatggcggcgtcggcagcaacggctctcccataggctgatccggcggcagtggctcctcccgtggtggatccagcagtggcgggagcagagaagtgcttggaagttcttctttcgtctgtttttagatgttgttgttgttgttctgtggtgtcggttccttttgtgattttgtgataatgactaatatgtgatggcaattttgactgttgagagttcgttgtggttgattttgggggcgaatcggggtcgattcgagccgatacatcgagcagatttttttttcatcccgagaatcttaaaggtaccggttcctaaaccggaacttttgagaattcacaaatgtgccgtctcctgctgctcccccctccctattgttgctttcaggttccatgatgaccagtttgcccaatctcagggctcaccactacttcagattagggcaagattttggattggtggaacctgcctaattgcactcctctgctctacagaagaaaaattgcacattactttcccctcatttgttctgctagcattggttcttcccctgccctctccgatgctgcggctggtgggcggcgggttgcggcaggcggcagcgggcagtgggtcgcgggctgcggcaccctcaactctgtgggatgtggtggccggcggcagcgcccgacgcagctgtcgcggagggcggcggccgaggctgcgggcgaaagcgtggccagggctggagagggcggtgaccgaggttgcggagggcggcggggcgtggctgtcacgaaggattttgtgttggaaatatatgtgttgattttgtgttgtaaatttggggatgatttttagatatttttgtgaatgattttgtgttgtaaatttgttgatgattttgtgatgtgaatgtggatgattttgtaaatgaggatgattttattctttagttcattttgaaatcaatattcaagcagaaagagaacaatggaaaaggaaaagaaaaaaaaatctttagtctcggttggtaccaatcgggactaaagatggcggagctgggcacgtggcttagccatctttagtcctgattgatattaccaaccgggactaaagattgacctttagtccccggtatttaaattgggactaaagatagcaatttttagttccagattcgtagcctcaatttgctacccgggactaaagggggttgcaaaccggggctacaaagggtttgtgcagcagttgtagggcgtttgtcatgaagaaagttccaattatagtattcatctataagaaattcagccaatatgagatactccctccgtcccataatataaggaattttaactttttgcttgcacagtttgaccattcgtcttattcaaaaaattttggaattattatttattttagagtgaattacgctttaggctacattttattacctaagttttactttggaccaccgttaaatatatcttttcactttgaaccggacaaatttgccatttttacgatttggatcaccacgaacgattatttttcagtacaatcaacggccttaaacacatcaactctagtatacgggccgggcgaacttctctatttatggttcatatgtttgtcttaagggaagttagacatgacaagaagagttgtttatggtagtccaaaccgcaacaattgtaaatttatccggtccaaattgaaaagatagatttaagggtggtccaaagtgaaacttgggtaataaaaggtggaccaaagtgtaatttactctttattttatttgtgacttactttattatctaaagtactttaagcacaacttttcgtcttttatatttgcacaaatcttttaaataagacgagtggtcaaagagtgcaagcaaaaagtcaaaatctcttatattatgggacggagggagtacaaaataaatatgtagctagagagagctaaataagaaatcttatacagctatatatatttttttaccttagacctgattaatagcactatgtacgttctatttatatttattgatacgggatacgccatgtgaaaagtgggggagtaaaagaaaatcctagctaactctaaaacccattctactaacctgacgagaggggatctagctcgttgggattgtcagccggtgacaaatttttgattctcttggatatcaactcgatgtgttttgtgttcgcttgagataccctttcatcccgacctaacatctccgtgcgtcagataggacataccgtggaggacaatggaaccaacttaagagaatgcaaccacagttttttagctagtccattttttttaaaaaaaaaattctccctgactaataaatgcaccctatgaataagtggatgatttgttggtcgacgcaatgaagtagtagctcagcaagtactagatttatccatggcaagtacgtgtatctccacacaatgggtaattcgcacattgacctccaggacgacaaaggcagccctttatgtatcaccgaagccaatggtaaattactcgatccgcgtaattaacagtcgtagtcgactagttgaccttatcatggtggactttcatcagctgatcattccggggtaatttcctactaccaagaggttgtgtttattgttgacctggtccttaggacaagttcaataattgagatcgatctgtgctatttcctagtttgtgtttattgttatgagatttttggatttagagattatctctgttggttttccgtatagaaattaaccttgtcaaattttgatgatgctaaattttaacataaccaaatctttacaagggaagatgctaaggtagtttttgtttgaagctttgccaaattttggatttaattttaaaagaagtttatggagttaccaaaatatgatagaggtaatgatagtggaggcatgctagtttattgcgtactcagtgtttaggctgaaattttcggccacacgtaaaatgagacaagtcattagcatgtaattaatagagtactaattatcataaatttgaaaatatatatttatttgtaggaaacatatcgtttagcggtttatgaacgttctaacagaaaacgtaaatagttgttccaaaaggctgaaatgaactcttgctaaggctaatttcttgctaaggctaatttcgactacaaactaaacatccttggatttattattgatttttgaaaaaaatatccattttactctcgcatactattccattggttcacttaattaactgtctaaactattttttactacttaatagcatttttttctttgtttctctttatatgagttgcattttaaactgaaatttagtagagccatagatggaaacattatcaaagttcaaaaataatttaaaaaaatttcatgagtatttgcttgaaatttaaaacctcgatatttaaatcagtctcaatacttaaacagtgataaaagaattcttaaaaatgctgataggtaagttataatgcatctatcaattctactaaatttcgttgcaaaattcaacttacatagagagaaaagaaaagagagaaacaccttttaggagtaacgtgttctattttcaatagttcagggtataaaatgaaaataagatgtttagggtaaaatgaacccatgaaatagttctagggaataaacaggacttttttcttgaatttttatgaagcaatacataacattattattattattattattattattattattattattattattattattattattattaaatgtataaccatttatatagcatgtagtaatagataaatgcatctacatctaagttgtaaattgactgttctcgatctaatgtactacatgaatccccaccaacttgcaagcatgttacagaatggaacatccacgaaggcattaattatggcgaacatggcctgttgcatcaaggccgttttattctaagctcctctcgttggcagtagcgtaaacctgcctatgccgtcatgccgatcattcgaactgcatcagcatgtgagtgtgtgaccgatgaccgatcgagctcgccagccctctatataaacagacgtaccatcgtacgggcacaacgccactgatccgtttctcaatatctgcctagaagacggatatctcgcgatcgatcgatcgacatggggcaaaatacggtagccgccggggcaggaacgaccgtagttgcgatcaaaatggacaagacgacgatcatcgtgtccgtcgtggtcggatccctggggttgctgagcgccatcctggggttcgccgccgagggctctaagctcactgtaagcgctagcaatgcacgcatgcatgcacactctgctcgtctttgaattaattctccctcttctttaatttgttctggatcttatcttactactccctccgtttcaaaatgtttgacgccgttgacattttaaaacatgtttgaccgttcgccttattcaaaaaatttaagtaattattaattcttttcctatcatttgattcattattaaatatatttttatgtaggcatataattttatatatttcacaaaagtttttgaataagacgaacgatcaaacatgtgctaaaaagtcaacggtgtcaaacattttgaaatagagggagtactatctaagtgatcagacaatgtcatgatgggaatgtgtcttgcagagttgcctatactcgtcgacgaacccatcggcgctcgggctgggcgtatgcgcggccatcttcctggtgatggcgcaggtcaccgtgacggccgtcggcggctgctgcggctgctgcaagtcccgcgccatcccgtccgagaccaagcggatcgtcggcgtcgtctgcgccgtcatctcatggtgagtagtactcgtcgtcgccgatctagccaaattaatcaaataatccacatatgtaattaaccacgcacactgcgcacacgacacgtgatcgcgtctcgtcaccatgatctcacatcacgtacgtcatgtacgttcgtttcttgcaccaggattgcggcggtgatcgcgttcgtgatgttcctggacgccgggatcgtggcgtcggagtgcttcatcgtcagggaaggcttcttcgccggcgccggggtgctggccctgatcgccacggcgctcgggctaacctcctacatcgtgctccgcccgcagcccgacgcggcggcggggagaggcgagcccacgccgatcgggatcccgatggacgctgttcccgggtacccgccgaggcctcctcatcctcctccgcagcaggtctaagcaatgcaccgtccgtcgacgacagtatcagcaatccggtttaattagtagcctaacgcggctacgcttgaagtttgtatttgtgtacccgttcttggttcaatattagtattatttctattgtgagatttatattcttccttagaaattgattaaaaccggccgggctctacaaccaaaaggatgtatacagacaaaatgacaaatgtatacgtgggatttatatctatccaaacaagatatatatgtaaccttaatttgaagtctagctacaattggaacttgaagattttttttcttttcagattcatgcaagcgcaattttttttgagtcaactgtgtgctagtagacttgatcttggactgaccgctgatcacgggctagctgatccaggactttaagttacttagattagattagcattatcagttagtattgagtattgaccacatataaagtatgcaccgtttaactcgaatccactagatatattaatatggcgctacattaatttattcacttctttactcagttaagagaaacttttaaaagaaatggctccattgcaacgtgcctcgtcatccaaaattgctaattagcgataaggcgcatatgctatgcgcaatcgcgttctggcccatcaaattttatacttttttacatactagcaaatatacccgtgcgttgcaacgggtgaaaaaacgtaatgataatatacgtttttcatgcataaccatatcgataacaatcagaaaattagaactacgaaactttattttctagcgcgttttcttttgtgcttttttctgacatttttccctcacgtgtttttttaaaccgtttttattttctcgcgcattttttccttttttaatataccgtagaaacttctctttttatagttagattagattagattagagataaagaagatatataaatggattaaaaaacgacgaatataaatttgacttttttcctccgcgcttttttccgtccttttaattttttttctcgtgcatttcttttacgaagggttttttttcaccactttcacatagtgtcaaacctttctagatataataggattcgattttttttaccgcatcacgtataattcctttttctttagaaacagacaattttttcgcccttttttatcgcgtcaacggagtcggaatcgttttgattttttcccctttttttggatcggacagatttttttttgcccggtttatttcgcccgatcgattttttttaccgcgtcacatataattccttttactttggatttttttcgccctttttttaccgcgtcgacggagtcggattcgttttgattttttttctccctttactttggaattttttcgccctgttttcaccacgtcgacggagtcggattcgttttgattttttcccctttttggctttttttggataggacagatttgtttttttttcgccccgtttttttatcggacttttatctttttttcgcctggtttttttattttttttaccgcgtcacatataattcctttttctttatcggaaagtttttttcgcctttttttaccgcgtcgatggagtcagattcttttcagctttttccttttcttttatcggacaaattttttttcgcccatttttttttctcctgtttttttcggatcggactatttttttcttttttcgcccggtcgatttttttaccacgatatatataattcctttttctttggaataggacagttttctttttatttttttaaactctttttaccgcgtcgatgtagtcggattcgtttcgatttttttccttttttttgctttcttttttgtcggacagatttgttttttttccacccggtttttttccgcccaggtttttttatcggacttttctttttttttttgctccacgatacatataattcatttttctttggaataggacagttttctttttatttttttaaactctttttaccgcgtcgatgtagtcggattcgtttcggtattttttccttttttttttgtcggacatatttgttttttttccgcccggttttttttcgccaggtttttttatcggacttttcttttttttttcgctcggtttttttctcccgttttttgacggacgacagaagcacctagagaagtgttttttttttcttttctccaatccaatacagatcggatctcttccagggaaatcagatttttttctccagggaatcagactctttttttcgctttttttattcattaaacggtttgtctctcggacttttttttccctttttaagggatcgggtgtttttttgccagggacgggtgtttttttcgcccgggttttttttttcacttttttttggatcggacttttttttcgtccggtttttttgatcggacaaacttggttttttctgcccggttttttttcacccggtttttttgacggacgatggaagcacctcttattttttaagtagtagtagatatgtgtacaagaagttggtatgtatacatatatatatacaaagttgatatgtatatgtattttttttacattcaaatcatatacacatgtttatacatatataaatatttttataagtgtatatacataatttatacatataaagtataaactttatatgtacaaagtttatacatatataaacaaatatacttgcatgtttatatacgtataggttgggaggcggttggtgcaggcgtgtggttagccacgtatcagaatcctgctagggatcgcctcctatatcatgtcttagccatcaaccgcagccagaataaccaacaatgcggtacctcaccaatcttcgaatgaccaaccttacacctctaccagcaccggaaaacggcgatcaaacaccgactgctctgccaccacatgcaagctggctaggaacgagtattgtacccataattcactgcacctcaaggctagcatgacacaactacataggcgcaaacgcttaggtatactccctctatattaaaataaacatcatatcccatactatatttgtttttttagatgaagggagcggcatcatgcatgaccacgaccatatcagccgcttgttgtcgttccatcatggcctatatgtaaagaccatttttttaataagatgccttttgaaaataaaaaaggactaaaatagaacgctcattattcttacacttccattcttatcctatatatctatacaattgatccttacttagtgtagttaataggattttgcagccttctcgtgtttccacgtcatcctaagtgttcttagacgttcgatctccatccggtggcaggtaagctgtctaggcaatactagaaactaggaacggcaggaagcccccacgtcttcatctaatgggccaaatcaagggcaggcctagcccaactcatccgattaatacagcctttagtaagtacaatcctctattctagatcgtttccacgctccctgggcagggacgccgcctcccgattgcgttcttgcgataaagatgatatatggcgtcatgaattcctcctgtagtgcctaatctgaaagctaatctgtccgtcctaaaagccgtctagcagtagtaatttctcacaagagtcaccattaaggtgaaggtgagaggccatggctaatccaactgatcctcttcgttatccttctacgattcgtctattaatattgctttctccatctaggggtaccatacgcaccacggcattgttatcacagctcacatctctgtcgtgatcgccacagttcaatccaccaacaaatcaacaatcacagatcaggtgagtatgcatcctccaaatcactgctatggctccttcaggcttcagttttccagtcaaatgtttagtttttatccattgtctgtagttgtgtataacattacagaccaatttttcatcatagtgttaattaaatcaacctccttccgttgcatcttgtattgttcttcctagctgattgcaagttttaggtacccattgttctagttctattaaatttgcttctacccctctcatttacacgtacaggaataagttagtggtgatagtcgacaatcaggccaagcaaggtgaacaaaaatactagagatatgattaagctcattcttaccttcggaatgtaacacccttagtattgttatattttcttatttgcactgcttcaatatagacttttttttttttgctatctttacaatgaagcaaggcactggtttctcatcaaataaatgactgacagtatcactgggagcttatttccatcttccctgctcaatttctcctaccattggccatcacatggatcacctacaacaagcaggttatctcttatcattgataaacaaatttatctttacatatctctttcgaatgacaacattttccattcttttttttttcacaacactatcatatcttccctactttacaatatggccaatatctaaaactgtttccttcaggacaagatgattttctttcttctattaatttcattacagagatctaaagtagatatatggctacaattaaacaactgtatctatcaacaccacatgaccgatcgaagacatcggcaatctaccattgagtcacatttgcagcatcgcatacataaaaaaggagtactccacgtcaagtggttatcactaattgaagacaaattaatagcagatcgctacgttacaacattagacagttttcatatgttctcttttgctgtgtgatagcatctataatttctcacagttcaatcaacattgatcgtctaaagcctttcttttttataatggatcgtctacaagttactatatgttatttaatatttttattgtgcttgctaatatgttttaggtcttacacaaattatagctacaaattcccgcagcaacgcgcggggtatcatctagtttcctttacacttacttccattctctcctttgctcgtgatgccaactgctttctcacactttgtaagaagaaagaaaattcaagtgcagtcattatcgttgatactaactctaatgtaaacttttatatatgttatttgagatttaaaagctaattgtaaaaataaattatgatgtaaaaatttcaaaatcaactccaaaattatgatttataattcaaaaaaaatgataacagcttataagctgaaagccaaacaatgaggatgtggatttttagtcctgcctctttgagtatttaagatctcactgccagggatgaatctaggcccagcccgaggcctagagcgaaatgcatagaaggatagttattttttcagtatgtaatcattatgtaatgtccaaatagtctttatgagttggcccgagccttgggccagtactgggtctattcctgttcaatgcaatttgagagggagcctaacgcgtgcacctctccccacttgacgcactcgccctgctttagtccactactgtttttttatacatatgtatatactttgtatacatatgtgtgtgtacaacatgatgagtgtggggtggtggtaacctgacccaaaacggtttgaggaaccttgctgcggatgcccttaggtggtactgcagtgataaaacgagagaaagtgtgaagccagtcattgctcattggcaaagggcgcgtgcattaggattatcaaacggatcatgtgtgcaaattttagcactattcatatactccctctgttcgtaaatataagggatacactattcccgtgtaacgtttgaccattcgttttattcaaaatatttgtacaaatataaaaaagaaaagttgtgcttaaagtactttggataataaagttaatcacaaataaaataaataataattttaaattttttttaataagacgaatagtcaaacggtgaaagtaaaatattaaaatctcttatattcacagatgggggggagtagtatacacaaatttagccgtgattggtgacctggagtatataataggtggtgaactagtaataggttaccaaatttccaaaccattagattctcccaaaaccaacggtctctctatagtgtgttgcctgctggtgtgccttgaaaggttccaacaaattgtgaatcctcggcacctgcctccatatatacagtgcataattaataaaccgatcgtggagacattaatatatacagtaataatgttaatttatgcatcatgcaacatgcaaggctgtgttaattactaggagctcctcctgttctcccgttgatatgtagcggcataaatcttcagcttcagacctccatataaacagacgttcgagaatagacaccaattattctcttcctggaagacagagggtccactattgggggaaaaaattggcggccgccggcgatcggtagaaccgaccggacacgtacgtacgtcgtcgcgattaaaatggacaagacgacggtcatcgtgtccgcggtggctgcttcccttggcgcgctcagcgccatcctggggttcgctgccgatgccgcaaagcacagtgtaagcttatatgcgtgcgcacactgctcatctctcaatctcaatctccttttatttttcttctccttctgtagagtgctcttgtagaacattgatatatacatcttgttgaactcaggtgaggtagcagatcttactatcatatatgtatcttgcaggattgcgcatcagcgcttgggatggcggtggccgcgtcaatcttcctgatgatggcgaaggtcaccgtggcggccggcggcggctgccgcgagtcccgcgccgtcgtcccgtccgcgaccaagcggaccgtcgccgtcgcttgcgccgccatctcgtggtgagtcaccaccgatcgatctgctcggtcaggtaattaaactgcacgtgcactacgcgtgatcgatcgatcgtcgccttgatctcacgcgcgtcacgtacgtgtgtgcactgtgcaccatatgctgcgtgatagtacaggattgcgacggtgatcgcgttcgtgatgttcctggacaccggcggcatcagcgttgtccacggctcgtcgtcgagatcagcagcggccgagctgggaatctgcgcggccatcttcctgatgataacacacgtcgccatggctgctgccggctgctgctgccgcagcttctgcatcccctccgagacggcgcgggtcgtctgcgccatcacctcatggtgagtgatccatcgatcgtcacacgcgcagtacgcggttgtcgctgctacggtcacatacaacggcaagcgcccggttgttgcgtcgttgcgtgcaggatagtgccggtgattgtgttcgtgttgctcctacacgccgcggtcgaggagtctgattgcgacaagatccacaagggcgtctacgctggcacgggcgtactggtcctcgtctccacggtgctcggaatcatctcctacctcatgctccgcacgcggccagagccaacgccgccgatcgtggtcccgatggtcatcgcgttccagccggtatatcctaatcctcttctggtgcctgtgccggttcaagcgccgccgccgaaccaggcgttcgctcatccggctactttgccgccacaaggaggatggtacgggcaagcaccgaaccagcaattcgcggcacctgctcctgctcaaggctatggatggcaagcgccgaaccagcaacatttcccatgcgcaggtgtagtaccgtgacctcagaatatcaccctgtgttgactcgaaccaagggcgtagttataaattcgtgtcgtacattctgtatatccgatacggataattttaccgtacaatatttgatacctcgagagtaccaaatgtactactacacatcaggactgtagcactacatgctaggctgctagctttcttaagtttggaaaatgtgattttacgtgttggtttgtaatgtcgtctttctcttccaacacatttggcatgtactttttccatcccaaaataattgctcttaagtacgatttaaattttatgatcgagatacatgcaccctacatctgtactttgtagtagtacatgctagctctcttaagtttggaaagtgacgattttacgagctggtttgtggtgtagcctttctcatacaatgcatttggcatgtactttctccatcccaaaatagttttctaaacgatttaaattttatgttaaaataattatcacgttggattactacttgccccatcaaccatcttccattcaaatttagtatgtaaataaattagaaaagatggaaccttatcaatctctaccaacaattgatagattcaaacccttccactcacctaacacgtaccattaaaatttgataagatcataattaaaacctatcgatgattattttttcaattacggttttgtgttttgagtaaatggggttgtgaatctataaacccctccttcactaagaagatgattacctgaattaaaagctaagacaaatcacatggaaatatcagtcctatttttactctcctactttatcaatatatacgaggcaaagctttttccttcttttaacaaaaaaattgtttcaggtgttccattactcagtgaaaaatgtttcattgtttagtaaaaaaatgtttcacacatatgtgacattgaaaaaatgtaattgcaacatcgagagcctattgtgtggaacatcaaagaaaaaatattgcacatcaacatctaaccaaaagataatgaaacatggaacaaacatacacactagactgcagcaaaccgagagttgagtcacgagcatgcagcaacaacacatgcctggaaggagacgctggcgaagctttcgagaggacatggtggccaagcttggagagctccttggtggatggggacgacgcctcctcccacagtctccatgctcattagagacgccgtcgttggtgaggtcatcgttgttgtacctccttccacagccttgacgctcgtcatgggggacaccgccggcgacgaggtcatcgtacctcctccatatcctcaaagcttgtcgttagggatgccgccatcgacgatatcatcttcgtcgtaccttcttccatagcctcaacgctcatcacgaggggcgtctctgccgccgaggtcgtccactagtacaggaatgatttttctggacgtgactcattttggattgcagacgcaccgtaagtggtcgcgtctgcaaaaatcgtgctccattttggcgtgcggctctttaaaataaccgcacggaaaaaaaatcaatttttagtgcgaacctgttaagagacccgcacatgaaaatagttcacctacttttataatcccacagtcgtcgcccattccactcactcccatctcctcccactcctcccgtctccctttccctatcccactcgctctcaactcctctcgctcctcccatctccctctccctctccctctccctctcactctcaactccttccgctcctcccatctccctctccctatccctatctctatatttatgtgtgtgtgcaggcgtgtcagtgtacctaaatacacaataaacaaaactaagagaacatgtgctttattaatctcaaggatcataaatacaaattcccaatgtaatatatatgtgcgctccataatctgtcgttggacagatctgacttatgcgatgtggtctcctggttcctggggcttcgagaaactcccagttaattggagaacctccgattaagctgcttgtggtcatctcgtcatcttagtcccgcgttcttcatgcattgtgatgatggtgaggtgtagatagtggatatataagtatatgtgggcgtcggcaacgcatccacggcctcgtcggtccatgcgccagagttgttagcatagccttcgcatcggcttcgcccgccctcgttgtctagcctcgtcagtcttgaacgacgtgtcggtgtagattgttggtgaagacatatgcatggaattgtgtagcttggatagctcaacgtttttttttttgacaccagctaacccctttcattaaccaagggctccaggcaaatcaccagagactagatgtgatacaaactcggggacttggctgatgtacattgtcatgccagagttaacagaactcgccccatacttagctaggcaatcagccactttgttacaagacctcggacagtgttgaatgagacaacttgcaaaatgagaggaaacaaaagctttaatttggcggaataagcatccatcttggtgacgatcaaaatccgtcgatgtgagagcacgctgcagctctacggcgtcggtctccagtatgattcttgtcatcccgagttgtgcatctctctccaggctctgaagcgccgcagtagctttagcctacaacggactagatgcccgcaaaatatagccgtaacccccctctaggaattctccattgctgcctcgtgcgaggaaaccccagccgccagttttcgtactcacatcaaaagatgcatcactgttcatcttgtaaatatcggccggaggctgttcccatcttccattcaccttcatgcatggagttcgacactggtgcagcttttcaaggtccattatatggtaaaggacggcatcacagacctctaggctcgtgagcttcttgtctcccacattggccttattcctggcataccaccacttccacagcagaacaacagcttttaactgatctttggcagtcattgacaggatctcctttacggtttccttcccagactgatattgcactaggcgtagtcggacttcttcaagattcagactcctccagcactccttcactcccttacatttcagaaacaaatgcccacagtcctcatcaaatctattacacatcggacataaattgtccgactccatgccccttcgccgaatattgcatcgaactggcaggcttttgtgagctagtcttcaaacaaacattttaatcttatttggcacctccatgttccagattttctcccactgaagagtgtcagcatgacttgtattcagtgaagatcctgatgcatctctgcatttttccttctccctgatttgcactgccagtttataggcagatttgaccgagaaaagtcccttcgaatcaaaatgccatgtcggccagtcctccaaattctcatcaacatgcgtggcaagaatcgtagcagcatcctccggccaaaacagatcattgactaattgctcatcccaccatcccgtgcctggatcgatcagttcaacaacctttgttaggattgagttgcctctgggagtgatcggccggcgtgtaaatccaacgggcatccatggatcattccaaatattaacattttcaccggttcctactcgccacactagaccttccttgatgagatcgactcctttcaagatactgcgccaagtatatgatatcccgtcccgcggcgcacactgcagaatgcttccatctaggaaatatttagctttcaagactgttaacagtgaaatttggtaatcggcaaaaacatcatcggcttagaatcattatcggctgcagcatctcggaatcagccgatgggagttataaagtcgccaatagtcagattcctactatattcggttaaggaaatcaatctactaaaggaagcttatccctaagtgaccgagtttaaagaggatgcggcatggcagtttatctattaattaggaatagtttgttagtttccttttatctttaggaaagtgtgtttagtgtccgataaggactttatattttccttttatctttaggttagtttctttcttgtccgagaaggacttgtatcaacccatgggtataaatatgtacacccggggtctatgtaatctatcctcacgatcaatacaattcggcgcatcgccacccttttatttctacttttgtttttacgttccggcggaacttggcacccgacgcggggctgcatcgtcttcgatctccggcgaagggataagtccaatgttctgcaggcccaggctattgtattgtctacgtcagcgtcgttcaaggctgcatcagtacattcgacctcttggattgctctggtttggatgatatacttgcctacctatttatcatgtctctggtaatctagtcttagcatatcaatttagctctatcagttgcttctcgttttagggtttctgccggtatcggctaaatcgtcttgctagattagattagcttagacatctaccaccctgaaaactcagtcaacggcttgattgtctagatattatgtttcttttcatacttagtgctgcattagttaagtttgatctactaagtcatgcttagaaccataatctctagcctgcttcttgattgccaataagggtttcatcgagatttcagccggtgagttatcgggtgttgcatcggctcataaggattgcatatacatataagttggatttagccgatgacaacaaatgtttcactgtttaatctaatcttgtggatttcatgacatcggacctccagccgatgtgtgctttaaccttcggatcgatgcttatctatcatatcattatttgccgattggtttatactgggttttattgttattttattacatcatcattagccgattgcctctatatcattatctacattggacatatagccgattgcttaaaccctatcgctatcggctgatatcggcatcggctattatcggctatcggctggaactactccatcggcttgtcagccgattggctgttttgatctactatttgcatatcttgtcagttgcaggatcaaactgactggcacgcccgcatctcatcaatctttggacttgcacaggagctaagcagatctcccaggccggtgtgttcgattttttcgtcaacaaagacttgcccacagagcgagtctacatttaggaggagccgccatgcctgccgagcaagcatcgccatgttgaacagatgaagatcccggaatcctggcccgccaagctttttagggagcgtcatcttctcccacgacagccagtgtattttattttccttgtcattctggctccaccaccacttgctaatcatggaattgatttcatcacataaacctttagtcaaatcaaaacatgacatcgcataggtaggaatagcttgggccacagctttgacaaggatttccttccctgcttttgatagtaatttctcctgccaaccctggatccggagccacaccttcctcttaatatactcaaaagctttcctccttgacttcccaatagagacaggcaggccaagatatctttcattttttgcctcctgattaatacatagcgctgatctaacttccatcctatcactctgaagtgtgtttgggctgaagaggacagatgatttgtccttgtttatgacttggcctgatgccacttcgtatatgttaagaacccttctcaactcttgcgcatcattctggccagctcgcatcaggacaagggaatcatcggcgaaaaagagatggtttattcttggcgtgtccctgcaaactttaataccctctatctttccatcagcttgtgctttctgtaatagcgctgaaaggccttccgcacaaataatgaacaagtaaggggaaagtggatctccctgcctcagccccctctgtgggtatatttgatctgagtgctccccattgatcttgatccggtaagtcacagaagttacacacttcatgactaagttaacccactgatcatggaagcccaacctcagcatcatgtgtcgcaggaaatcccattccaccctatcgtaagctttgctcatgtccagcttgatcgcagccactccattcttccccttcttcctttgattcaagtagtgtgtgagctcatatgccagtaatacattgtatgtgatcaacctcctcgggacaaacgcactttgggacggagagattatttccagcagcacaactttcaaccgattgactatcaccttggagatcagtttatatgccacattgcataaacttatcggtctcaagtctttcaatgtgtccggctgtttcgtctttggtattaataccacaactgtatcgttccatccctgtggcatatccccaccattaagaaccgccagcacctcatcctttaccttatcgccagctagtgacaaaaattttttgtagaagattgctggaataccatctgcgcctggtgcttttaaatcccccatatccttcaaagccacccaaacttcctctctctgataaggagcagcaaggccttctctcatctccggggtcacacgcgcttggacacattgtaatactgcatccatctgagagcacccattcgacctaaagagttgttggtactggttcgaaatgaagctttttagttgatttccagcaaccaaaccaccgtggccatcctgcaacttctgtattgtatttcttttcttcttctccgatgcttgggcatggaagaactttgtgttccggtcgcccttggttaaccaggtagaatgtgctcgctgcttccagtaaatatgttgttgatccagcagccgctctaacttgtaccgcaacaaatgttctctgttaacttgccggttagagattggctccctcctgcacttctccaattccttccttagatttttaaccctcttcttcaactcacccaggacagtgcggtcccaagcccataattccttcaggacccggctttggatctccattagccgagtttgaccaccttccaatgcattctcccacgcttcctccactctggcctggcattcttcttcctccagccaacgagcctcaaacttctgcataatctccaaaggttgcccccattgttgtttttcagtggcaccggtttccacaatgaccgaacgatggtctgagtggcgcggatccccattgattacgcgaacaagcgggaagcgtgctcgccaggcaccattggccactgctctatcaagtctttcctttatgtagttggacgccaggtgatggtgattcctccacgtgaaggcatccccaacaaaacccagatcatgcagctggcagtcctccaaagcctgtcgaaacttggccatacaactttcggaccgaggagctcccccttccttctcacaattgaacaaaatttcattaaagtccccacaacatagccagggaagggtactccgatcacacagaatccttaataggcgccaggttttttctttctcctcgctcctcggttccccatacattcctgtgaacctccactcaaacccacgcacatccttgatggtggcatcaatatggtaacgagaaaactctgcacatcaacctgcacccccttcttccaaaacaaagctagaccacccctagctccctcactgtccttcgccaacatgttaggcatatccaaccaccatcttaaaccctccatccacttaccaccttttttcgtctccgaaataaacagaacatcgggatcctcctccctctggatatccagaaggccacgaactgccgagccattcccaagtccccgacagttccaagcaattatcttcatttatctcggcgggattggccggccaatcctgcctgcagatcataattgaccttggaagcgtcatcactcacagccacctgagcattctgtttcttccgttcttcggtcacaaccatctcctccgttacagagcactttcgagtatcagcaatcgcgctctccttggcgccgacttccttatccatcactcgcggacgccgcttgaaagtggccttcctcttatctcccgtccccgagtgcccagtatccaaagtaccactttcagcagccaacgggagagtgtgctgttacccgacgttgctttccaacgagattgatccctgtatatccacattcatgcacactttgtcctttactcctccccccacaggaacctgcatggtactgtgctccttcccccgagcgtcctctccatctaacccactagctacttcacccgtggtcggaactagttgcggctccgagggagccgtaatctccagcagctttttatgccctctctcctcagtcaaactccccgaactaccatcaccgacaaaggtcagcttcttcggagcaccgcccatccggatcttgggatgccctttacccgggctttcagcatcatcccttagttcagggtcatcccggctagcagattttccacctacaccgctgctacctcctttctcaactccacttttcctccaggatacgacactcctgtgctgaaacgaacccccagaactgcccccttccgagctccagcctcgcacatcccgctgtttcatcggtaggactcgcaaccagtccccgaattgctgctcttcctccttccataccttatcatcacactcctccacatgacccagaacgccgcaggaataacaaaaatttggcaggaactcgtacttcactccacaccaattctccttctcaccggcgacaccctccatcatcaccccgccgattagggctttgcgggcatccatgagcaccttcaccagcagataacctcccacggctgacccatcctcatccgtatcaacctccaatgctttcccaattttattcccaattacccggccagtatccacattcatcaagccgaacggcagattgtacaccctgacccacactgggaaatgtgtgaatacaaggtctttcagcctcttcgtctcatcaaaatccactacgatgagatctcctccgaattcccacgggccttccgtaatggctcttctcttccccccccccccccccgcgttgcaagaaagagaataggaaaaggttatctcccaactccttagccctaatccctctctgtggacaccaaattttgcccaacgcctacaccattccttcgacataccctgctcgtggagagaataacttccccactgcctgatttttttttttcggcatccttcttcttcaagcaccaagatcctttcatgcctctcaattcctccgggacaagcttaagacctaggaagaggccttccaggtccacccccttcttttttccccctttgtccatcacacctcccagaaccctaatccacggtgcaatcccggagtccggggcggagaccgcaccctactccggaagaacgagcgcgaacaggtgaaattgaaagcagtatgtggaaggagggaaaaggaagcagaatgtggcagaacgattgaaagaggaacgatctgagaacgatcagcaagaaaaccaatccgaaatcccgagcaaagaactagggttcggaactaactccgagtcgccaggaggtcgtgcggcctcctggcaaccgaagactggcccgttggatagctcaacgttacagcagttgcatcgggattagattagaaaagaatcaggagttattggagacgatcggcgcggataataaccgaatttaatcacagctcagcaccccattgaaaaaaatagaaaaaaaagggacttattagtcaacacattggccaactactccttgtgcatggcactgtagcatggtgatgacgtgtcgtcctctggttggtcggccatgttgccacaacatgtgtttgctgaatggagatggcttaacgtgcaactgctagcttcggcttgatatgctgctgccgtgtgatgagtgtacgtgaggccgccggtcgccgatctgatccgtagcccgacgatatttgttgatgtagatcggtagcaaccgttgtctgcacgcagcgccgccggttgccagttcgatctgtaacccgacgtatgctggtgtagatcgatagccgtcgccctcatctggcgccatctcctgccaccgcatcggctaaacaccagtgaacgccggcgtggccgcgcgagtgtattcttctgtgcgctagttgatacctcttcatgcatgcgtgtgtacgtgctgcatatgaatgaaagaagaaggaaacaaatcttagttaacttttaccttgggaagccattgatctcatctttctcctcgtcgaactccctccggtcctctcctgccggccgccgcttcgtccgaagtcgctcgccgctgccggtgtgctccggccgcgtacgcgctgttgcttaatttgccgccggccgatgtcgctgatggatggttgccttctaggaggaggtgcacagatggatgtgcatcgatgggttgtcaggttgatgtgtgttgatgaatggatgcgttttcgatggattattgcgttgattctcgggatggatgtgtgttgatggatgcccgggctgccgagcattgacgtccttatgtaggaggtcggtggagcgtgccgcacgccacgcgtccgccgttttcttccgcgtcaagtccgctgaggatatgtttgatcgatcggtttgttatctgctaataaccttctagtttatactttgattttatctccttcgcctggcgtcaaacacatctgtggcctgtgggctctgttaacttctttttttttttaacgactcgcacaagacggtgcgaagttctattgatagagcagaaaaaaattacaagattacaaccctagagggtcgtaactaggaaaaagaaaaaaatataacgccacccacacaccgacagcgccaagacacataactgggagaaggctaacaccggaccggccgccgctaagcgtgaccgaccgccgctagacgacaaaggaatacagacgagattgcccaaaagaacaccctcagaaccaacgcaaagccaactcctagagcatgcttgcaccgatcgagaggcttcggctaggggatgccaaaacgacgtcttcaagaagagaagcgacggaaaaccaccgccgccgtccgtcggggctcaaaggagccaagactgggctttcgcccggcaaccacccgtgagggatgagacagcacgacaacgccctcaggaaggggaattaaccatcgttgtcggcccggccaaggccgggctaggttttcacccgctgctcaacacctacgaatccacggttgatgcaccaatgctccaccaccactcaacctctaccgacatgtgggaccactgcaccggcgccccccgccggccagccttcgtgcgccgaagaccgcgccacatccaccggcagctcctcctagcaccaaggtcgcctcctccaccgccggccgcgcctctcgtgcctagcaggcctcctccaccggacgcgcctcgcgtcaatccggcctccctccatcggccgcgtctctcgcgtcaagccagcctccatctccgtcgcccgcgcctctcgcaccgagccggcctccgctaccatcggctgcgcctctctgcgccaagccggtctccgaccctcctccaaccattgccgcgccggccaaatgcagccgtctgccacgccctcgactagccgtctgaggctgccatgcctccttccaccggcggcgccgccaccgccgcaatttcgcggtcatcaacgcccgtttccggtcgtcgacaccgcattcgtacccccgtcgccgcatccttccccgctgccatgcctacttctccgcgccttccccgccgccgcatccgccaccgtcggcagtcgccgccaccagacacggccgccaccgccgcggcgctgcctcgccaactgccaccacagcagccattcggccgccgccacagctcgccagtcgccgcctcgtcgccatccggtgcatcagtagccgccgccaccgtcaccgcctcagcagtcaccatagcagccgccgcctcgccaccagccgccttctcgccagcagtcagccgccgccgtcacctgccgccgtcggcagccgcagtcaccgacgcggacgccagccagccgcagtcgccaccagccgccgccgccgtgtcgtccaccgccgccaccttccttccccgccgccggctgccgctcccctagatccagccagcaccgcacgaatctgggcatcgccactgtcgagcggcgtccccagccgccacctcccgcgccgcgtcgtccaccgccgccaccttcattccccgccaccgactgccgctcccccagatccggccagccatggtggatctgggcaccaccgtcgccgacgagcggcgtccccagccgccgggcgccaaggggagagaggccccgccgccgccgtccttgcgggcgcacggctttgccagcacccgctcaggcggcggcgaggcgggggaggaggcgctgaagacgaagaggcggcggcgtcgtcgcctcccgagtcgctcgtggaggacaacgcgagaggagagagaggaatatgtaattaagaggcttccctctgttaacttctgaaacatcggcgagatggaggcccagccgcccgcgcgtgcgcagccgttggtggcgattccttccgttattcttgtagacaatagacctacacaactttttaaaccaatagataaatcatgacttatcagattttgttggctagttccttcgctgtggggatttggcaaaaggcgcgtcgcgtgcggcgctgccattttatccgcacgcacaacccgcttggaacacactagctagattcgtttagataaatcacagccatattttatctcttcaatttgatcagccgagcttatctagctgataatgcacgcgtagagtgcgccgtggtcgcgtcatttacagtcatgggctaagctcatttcctaagctcgctaatcacactggtggagaaaccctttgtagtcccggttcataaccccctttagtcccggtttccaaaccgggagtaccaatccgggactaaagatcgctatctttagtcccgggtgaaataaccgggagtaaagatcgatctttagtcccggttggtaacaccaaccgggactaaagatagagctgacctttttttttttgcatgcccctgttgctgcatggtttatatatatatatatatatatatatatatatatatatatatatatataaaccatgcatatatatgtttcaatacatatatatgcatacatatatatatgtatttatacatatatatgttatgcaaatgcatatgtatatagatatatatatgaacaacatatatttacattatagaaaatgtgtacacatgcatatagaaacatatgtagtcatgtattaattacaatccattatatgtcctagctagctacggtttcgacgtagtagtactcgctgctagctcagaagctaaggaccgatgaattgtgtttccgttgtagtagaatccacccttgggatcaaggatttcttcgttgatgaatcccatgagttgttcttgaaccgccgcgataaattccttgtgtgtggtcaggttatccctcatgcgaataaactatatgaatgtatgaaattgattagtaattaaacaagaaatcgctacgtaatgaaattttgaatttatttgtacgtacatcgagctctcttgtggtgatgatttggtctgcaaggcagtggcaatactcgcacacgtaatagccgcacaagttagttctctgcttttgctttgcgcactacaaataaatgacaaacaacgagagatctaattaatatacacttgtatgtatttgaatcggagaaatataaatgtagagcatgtgtactcacaggaaatttgaacttccgcctaagtctttctctccatttgccgcggaccaaatgacggaaccgataccaagccctacatggagtttaaagctatgattcgtagtagcaattaacataacaagattttcttaattaacaaaggaacttatgacggtacctgtctataagttcaaaaaccttgtcaaacgtagactcttttttatccattgagtcatatacgttgacggtgcaggcctccaggtcgatgagtaaaagcacccagtggaatctgcaatgtgcgtgggatgcattacatatgaaacacttagcaagttcgtacgggaatgaaatttggtatgtaggaagacagtaaaattaaactaactctgtgttgtatggcaacagtatgaacgtcttgtaatgctgcgccttcaggagatggacgagattgtcctctgtttcttgtggatattggtcgagcattgcgacgtttactttccgagggtcgatgaatccagtatcgaaaaccctccgccgtcgggccctttgaatctccattctacaacgataaaagagagtatattattttctgtggtctacttatatacaaggacctaattaattaaaggagacgtatagtaagaaatctaactgaacgatatacttacaaaatccagcaactcataatagagacgtcgagggcgtccagctggtatagttcgtagattcccctgaaattgatccagagaatgtcatctccttgcaagaagtccgtgtccctgatcctcgctccgatcatctctctaccggtggcgctcatctccatgtacagctgatggaacttgtacatttgtgtgggtagagactgcagcagctcaggcttgacaagcggtttaccgagttcgtacatgtatttcactttcgccttttcgattggtgcgactcctagcaattgatccgtagttagaccggtgtcagtaataaattgttttatcgtcatttctttaccggtcaccaacggctcgatctcctggtttggttgctctccaagctgagggactggtttggactttccagaagatgctttcttcagcgttcgctcatagtccgatagcttgatggcctccttaacagatgcagacatacccctgaagaagttcctgacactggggtctataggaatcttcttttctggacttcgaggcttgaattgtctcttgacttttgatgcaacgtaagcgtcaagctcctcttgcgtgcaattgtaccccgggtccttgttcttggcggcgtcaactttcgccttctttgttgcccttgtgtgggcaagcggtggagctggggggggcccttaactttgaaggtgccggaagaggagcttgcgggggagtaggtgtaggagcacgaggaggagtcggtgcaggatcctgaggagtcgatgctggagcctgaggtggagacggtgctggcggagcatgaggaggagacggtgcaggatcctgaggaggagatggcggagccggaggagatggtgcacgagacgccgcttgtcgcccagggaggatgatgtaccgcctgcgccatagaataatggcatggcatgtgcctcgtagatgcgtctcaccgtctcctccagggtaatccagctcgaggtcctcgtacgcgccttcgaccaactcaacttcgaccttggagtatcctgctggaatcggcctgcagtggtaagtacctgaagggtccgttgggatggccatgcccgacgccaccttcatgttgtgagagattatttattagtaatcaacatatataagcagcaactagcggaatggctaaatcttacctttattgataagttcttgaaaggaatatgcagctcacatggtgtccgctgagtgatgtcatcaacgggacaggtcgattcgtcctgtgtttgcatggcgtccatgctctgtgatcctacctgccccgttgaggcgcagctgctacggtttcctgacgggctcaccattgcaggaggaatggtcggctggggatcatgggaccgatgtgcggccatgcgttcatcaaccttccttgccacctcctcttgcatgttgagttcgttgctcgatacccggaactctaggtctgcaatcttcgcctcggtatctctcttgctcctcatccgactcctgtacgtgtggatgtcctccttgaaaccaatcttccaaggaatcaccccttgccctcgagtttgtcctggatgctctggagtctgcagggcgagtgtcagctcgtccctatctctgtctggtcggaacgtgccctgagaggaggcttccactgcatctgttagtcgtcgcgcagcctcttgtatctgatagccgaagaccagtgagccatcagctgggttgagcgttccaccgtgagcatagtaccagaacttcgatcgttccggccaattggctgttgccggttcgatacccctctcaatcaagctagcctccatctgctcccacttcggcatcgcgacgctatagcctcctgaccccaagtggtgatggtacttcttcttggcggcattttctttgtttctttccatcatcgccttcccttgttcacctgtcttatatgcaacgaactcgtcccagtgatcccttagctttgggaatgtgtcgaagttcggtgtctgcctcttcagtatatacttctggtacagatctcccttgaagctctgaaactgttctgccattttcttcagagtccaccttttcactttgtcctctgtacccgcaggaagggtgaatgtctcgagcattgtggtccacagcatctctttctccgaatctgggacaaaactctcatgatctccgcgtgcccttgttcttcgccagtacaccgtactgacaggcacgttatcccgcacaacccaaccgctgtgacgtacatagttcttggcggcttcggccggggcactaggacgtccatcttcttccacttccgttatgatgtgccgaccctcaagcttcttcgctgcacctcgttgcccgcgtgccctcttctgtccaacggagggttgactaccactagcctcctcctcctggttcccctccacatccctttccacgtgcccctgctggttcccctccgcatccctctccacgttcccttcctcgttcaagtactggtttggatcctcgttcccctcttcttcattccagtactggctgcttccctccgcgattgtagcgtacaatatctgttcctcatcgcggtcagccatctgttgatacaagaaacatctgctaagtcacgagacatttatgttttaacaatctaagtcatgtatgctaagtgtaaatgtcgtacattagaaccctacacaaccttacgtgctaagtctaattacaaatcgtgatataagctaagtctaggtgacgtatattatacaaccctagctagtaaataattatatactaagtctaattacaaataaaataatcttatattaaaactcaaataatattacatgctaatactaaaatagtcatgtatatgctaagtgtttcgtgcgtatatgctaagtctaattaagactacaatagtcaattgctacttgtcgcaccaattccgtagtcaataattacataccaagtctaattacaaataaagtaatattatattaaaactcaaataatattacatgctaagactaaaatactaatgtatgctaagtgtttcgtgcgtatatgctaagtctaattaagactacaatagtcaattcctaggagtcgcaccaattccgtagtcaataatgtcatactaagtctaatttgcaataaaataatcttatattaaaactcaaataatattagaacactacacaatcttatatgataagtctaattacaggtctaataatcttaattaattgcattacaaatataacaatcatttatattattacgtcacttgcctgctccaattccttctagggctagctcttccactcaggcttgacggacgactccgacaacacgtcttttctgcaagataaaaaaaatgtattaggataaatgcgaagtaacatatatatatatatatatatatatatatatatatatatatacatgtatatatatatacatgtatatatatatatatatatatattgcatttcacgataacgttcgtcctcgttcgttcgctcgttcacgttccctagctcgttcacgttcgttcgatcgttctcgttctcgttcacgttgacgcggcaacgtacgttgacgtgttcgttctcgcttctcgtcgttcgatcggtcttcgtctcgttcgttaacggcggtgtggcgggattggggcgt

SEQ ID NO: 10244 - DNA, 16082 bp, Oryza sativa
ccgcccaactacactccgtcgggcgccgctcctctccctcggactcgtgggcggcggccggcgggggagcccgcgcgctgctcctccccccgccgcccgcgcgccgcccctccccccaccgccgccgcgtcgcccgttgccgccatcaccgccgccgcgtccgtccgccgacgccctcctcctcccgccggctgagtgagagaagggatagagatgaaggggggagagaaggggaaaagagagagaattggctgaggtgacagcctgacatgtggtcccatgctgacttagcatcacgtggaataaaaccaccgaggtcaaaactaccaaaaacctattatgaccggtctttgttagttgagggatgtaactcgacgacaaagttgagggacgttcggtgtactttttcctaattccttacctaggccagatgggcctacggaaaacaagccatacatgcagcttgtcaactgtggcatgcgtgacgtacagtaaaaatttcacggttttacgaaccagtagcccacgcagcacaaattcccttttgaattgacaaatggatttcttctactcttctattttcatttctctaaatattttcttcatgattttgtgtgctcatagaaagttagaaactgaaatcaacttatgaacccatcacatcaataatttcacatagcatccgtttgccatatgtgtttctactcatatgtgcacggatatcccttttcccaacccttcttccttgttttccacgcacacgcttttcaaactgataaacgatgtgtttttttaaaaaagtttctatacgaaagctgcttaaaaaaatcaaattaatctatttttaaaaaaaattagctaatacttaattaatcacacactaatggatcgctccgtttttcgtgctcactgtgtgctgaatgggaacagaaccagcgaactcacagtgtaattccggtcctcgctgctcactatggttgataccaagcctcctatgtattaacaccataaataaatcataccaagaatagattagtaatttgcccgtgctaacgctacggcaatatatagtagaacccatgtttaaaagaaaaaaaaatcatttgattaaaaaatatacagttaatttacttcagggttgctattatgaatttttttagcaagattgccatactgattagttgttagttatagtcatattataagtcgtttagcttttttcttagtcaaaattctttaggcttatttaagtttagtgaaaaattagcaacatttacaacaccaaattagtttcattaaatttaatattgaatatattttgataatatgttcgctttgtatcgaaaatgttagtatatttttctccaaacttgatcaaactttaagaatcataattaagaaaaaaaagtcaaacaatatgaaacaatatgaaacagagggagtatattacattgcaacgtgcccaaagttgtggatcacattaatcaccgtgtttagcactgaaaaacaaagctagaaacgattcagttttacataataagtcgttcttgacttttgggctagtaaaaaactattgctaacagaatatcatacaacaagtcaacagggttgcctcgtaggaaatcaagcatacagaatgccgttattatcagcaaaatgatattctgtgttagagataacaatccaaagttactctgagaacaagtacattgttgatcactcactactatatctcctgtgataagtacatacacagatttttgttaagcaattgaatgacatgataaataatctatattattacatcgcagattgatgattgatacatgtccttatgtccctgctgcgcatgtaaataaacagatgaatacccatgatgattatcaggattgaattgctttctatgcacttaaaattgatgggataatttgaacaatgttagctgagcgtacattaccatttcagctagtaataattacattatagcttcctcttatctgcagtgcttgcatgaacaataaataaaggccaatataatcacctgatcactatccctcaaataaaacacaaattgtataaatatgaaaagagttgttaatccaaatgtgtgccgtgtattgcaggacagcggcaaaatactcgtacaccctctaaactggaacagcgggagtaaattttttttcatttggatgtgtatacaataaaactcgtcacaatttgcaactgaggtgaatcgagtttcagtttggatcatattaaatctaagctttgtaaaatgggactgacataattctgcaataaaggattcacattcagttttagagaaatatcacatataaaaaggcaacattcagatagtgctcatctagtttcagcagggggaacaatttggtgtaattatttagtatgcaacattctaacagttcacatatatatttatcaagtggtcaacttaaggatctcttactactgctgaatgttcatatatgtcaatccaacggacaaaaaacaactaaatgcattccacttatcataggcaagaatttgcatctttcaggttggatgcacaaacatacacattcaacagtgcaagctcattcgccaacatgtggttcttcacctgcaacctaccacactcccaagtcttcttgaagatttctttcctgaattaccaataatgcaattcactaatccatgatcagagaaaaagtcagggacatcaaagatgactgctgaataaatcgatcatacctccattttcagattgagcagcttctgaacacattctttctttgcttaactgcctcccacatcacctcctgcagccgcctgctagcttatcaagaaaccattagcaaatatgatagtacaagcatagcccaacatgagatctggtaaatgacattaacgctcaccttagcattgagctccgggatcatcttggaagaaatacaatagcgttgatgctaactgaagcggcagctaggatttggcttcagctcctgcatgtaagtacaagtcacctcacttctcaaatttgtgatgtaatagcatttcaaggcaatctttaacagtacatcaccaactgaattggggcaggcacaagtgtaaaaaagcaaaaaaaaaaaaatcgagggtagattacaagatataatggcaacaccagcagcagtgtccactacctccatgtgccagccgatgcgacgaacagcggaggcgtggtagacggtggcgccggcgaggcggagaagtacctgtccacccgtggcgtggcggcagcggtgcttgagggtagtcaggtggcacctgagatattggcaagacaccgctccctccgccgaccgcttcctgcgctgccgccggatcgacgggagcagcatatcgccgtgccgaccgctccctgagccgccactccacctacgccgccgccggatcgacgtgacgggatgcgacgacgatggaggagccgcgtgggagaggagaaatcgagcagtggcgaacgagggctcagccctgtgcggcaggggcgaagccgattgcggcggatgctagaagtagtcgacgacgtccggagaggacaggcgttcgcagtggggatccgagatggggataccggcggcgtggcggacaagcgttcacggtgcagctgacggttgggcgcgccgtgcgacgaggaaggcgccgagcgcggcaaaggagtggggtcatcgcggagcgggcgcgtcgcagaccggcgttggtggcgcagccgacggtggggggtgcgggccatgcgacgaggcgaccccaccgtcggctgtcctcgtaattatagtagttcataattcgtcgaccgcggcggaggaatggaggagtggggtcggtgcggcagccgatgaggctccgaggcagtttctggcgcgcgtggcggatctgcggcgacggcgaatcatggggttcggcggtgaggcgcggttcctagcatgggggtgggacaacgaggcgacggggagggatgcaacgcaagggcgaaccggcgaaggcatgaatgcggcgtgcgggaggagcgcgtgattgaagggatgagtgaggatttccgggtgtaccgtgcgcgacagcgcgagactgcgagagagagagaggaggggagaggggatgcgggagagagaggcgcgatcagagggaggtgcggagccatcggatcttaccccatagatgaatttggatagttggatgtgtcacatgatgaatgagtaaaaatatttgttaaactatagtgtagattattcttcagaacctatccatactagtagcatgcccgtgctaacgctacggtaacatttggtaatgcacgtagtcatgtttttcaagcatatatatatgtaacaaataatacataatcatattcgcaaataagtcgcgaccgaaatcgttcatcaaaatttcgaaacatctagaaaacaacaaaatacaaaaagtaattatgctagcaaacaacaactaaaaagcaaaatgcctagagatgttatattaactggtccacttcttttctccgactccgaccgccttccatgacgagcacatgatattttggctgcttgatacaatctctatatcacatgcttgcttcaacggaggaagtattattttcatttggatgtatagaaataaaactcattacaatttgcaacttaggtgaataaaaaataccatagcttggccttagaaagagagaaaatcagaatattctagaccaaaagctttctaaatcagcatacctgatattattactatatgaaaataataatccatgaccatcgacaattatatattatcacttcaatatacaatatatgtccacacaaaaagaaacagtagagttatttttatagatattcatataatcttgtcagttttggcaagtataattcaagaccagaatctggataatttttcacacgatttccatgatccgcatcagaacaacaaataatccttacccgaaaatcctaggcaacttggtggtcctaccaaaaccgatccttgtaagttgcaacctgaaatttatcggatctaaaaaataagaatgctaatattagccataaaacaacatttccaatatggcccatgaaaatatatacaatgtttgatgtaatttggtagaaaagcacttggtaaattaccatcattttcttgatttaccattgtcacagttgcccaaaggaattttactgaaaacaccttagcaaacaaatggtgtatgtagagcttggcaaacatcttggcagattcacatcttccaaaattcgaacagtgtattcatatttctcattctagttgagaatgccaaaaaaatctggcgttctctctcatgctcctccctctcaaagaaacatgtattcacagacagcacaacgccacactgccctgacatgttttccagtacagaatcctcagtagacaaactaccaacaatctaggacaggaattggcaatctgggaagcttgaggttacaaacaaaagaataaaaaataatatttcagtcgatataacactccatctactgcaaactcaaattgttgaagaatcgttgatttgtttcttacccaacaaaatatgaaggcgatggatcgacggcaacctgatgtcagggtgacggagaccccagcaagccagcacccttgaccacataggagagattccctactattgactgcatttacaccagaagggctataagcatctcattaaatcataatatggtcgatagaatgtgcacttggagtgatcactgtttgaagtagaggaatggatttttttcttctaaaaatgagctcatatttgtcttaaaaaaaggtttctttgaacaattatgtacagcaatttttttgtctgaattaaccaaatgatccacatgaattaacctgatatgtaatttgttcagaaccagactatatatatgattttatgattgcaatttttttttctgttaccacacatacaaattttcatcatatattttcgctaaacaaaaatgatatatgagcaaaagacgacgctataattggaaacatatctacagaaactctctaattggaaacaacaaaattggggaaatttgacctgatctcaatggagattagcagcacaacaggggagcacaaagatcgttagagctgccacacagatcggtcgccggggagcgccatgctactgttcaagccgccacttgccaacgaggagcacaattgccgatggaagatggagcaatggcgctgtgatgttgccgaagatccgctgcagtccacgtcatgccggcgaggcgcctttcgctccagccactgcgccacctcagtcagaaacgaattgcggcgttgcgcgtcgatttcaccggagatcaccgcgccaccgcttcaccttcgtcgaggactcacagtaggcggcgacaggggagagatgagggcggcaatggagaccacggcgagccggcgcccttgacgacggaggatctaaggcggcggcatgcggcaggcggcgattagggcagcggcgtggttaggggcggagaggagacgtggatctgggagagcaagagagatagtggggcgtgcgcgattcaggaggtgggaggtggaatcagcgattccgggaggggggaggttggatcgatctccatcgttcgattttacacggacgatctgaaccgttgagtgatgaatgtaagagtaggagtgaatgataagtaaaatgagttggtgaattatatggtagatttagtcgacaaaagcaaaacgcgctgccacatatgaaagaagtgggcttcgtaacttaaaactaaggatgtgtttaattcccttcaaactttaaaaaatccatcacatcaaatgtttggacacatgcataaagtattaattgtaggaaaaaaaccaattgcacaatttgcatgtaaattacgagacgaatcttttcagcctaattactccatgatttgacaatgtgttgctacagtaaacatttgctaatgatgaataattagacttaataaatttatctcgcagtttacaagcggaatctgtaatttgttttgttattagtctacatttaatatatcaaactagcatggtggcccgcgcagattgcgcggctagcatcattatagtatctctcatataatagcatatatgttttctcaatatattattcaaatatattaaaatgacaacataattttaaagtttatactaactttacgaaactactaatgtgtgatattcacattgtattttatatacgtgttatttattaattatttttaatatcaaattttagttatttgtatgtgtgtgtgtgtgtatatatatatatataatattaaaaataattaataattaacacgtatataaaatacaatatgaatatgaatagtacgcattagtagtttcgtaaagttagtacaaaatttaaaattacgttgttattttaatatattttaataataaattaagaaaacatatatgctattatatgagagaaaatataatgatgctagccgcgtaatctacgcgagccaccatgctagttataatacatatgagagaaacaatagacccataagaaaatagagtggcgtaggtagatggaacatataaaaactataaacaaaatctcaaaatagaattttaatgataattaagaggagggacgacgagcagttcgttaagcagcacggtctcgatgattggcgggatttctagaaagtaacaaaaaaacctcaatgataattatgttcgatattcaaatctcaacgataataaaaatgagaggcagcgggcgggccgtagaggagtacatggtggcgtttggtgagacttctaaaaattataaaaataaaacccaacgatacaatgaactctaaaaccacaaggtcaaatttgtaaatgacggagaatgaactccaccaccagggaaccgtgagactcccctttgtgagttcggccgggggcagcggatgagattcgagtgcttggcaagcggagctgtgtgatcttgagggggttaggcccctccaagacgatgagacaaaagaggattatacaggtttgggccactgagaagcgtaataccctactcctgtgcatgattgattgaatgtagaatacaagtgcttggggttgcgagacccaagcgccagttcgctcagaagtccccccctccaccattaggcctggacctccttttatacctcaaggggttaccacatgggcccaacaacctaacctagctccggtggagaagtattataatctttacattaaatgcatgtcttatctcttgacttgggaagccaagcacacgtcgtcttgatgatggggcctgtcaaatcttgccgcctgacacgggggtgcccctgtcagtcaccatttaacgggtgaagacttctggtctcctattacaccgggaaacgggagccttgctttgaccagagcgggaggaccgaatccggctgggataagaggatgagaacctctcaccatcattatttgatgggatatgtcgggctgcacgccgcctgacacacgcgatggtgcgcctgacatcaagggtcccatcagtcattcgaccggtcacagaccggttgagtgcactgcacaccgcattaaacgcggcgtggcgcgaccgctcgggacgccataaatgcgggtaggtgggcacctggaggcggacacctaacccactgtacgtggtgacctagtgtcacgcccagaaatttaacccaaatttccagactattttgcgtattaaatccctgtccaggaccagccagggtacacaaaacgacaagtaatatacagttccaaacgtaaaataagcgtaaaatacttacagaagaggcacttagtcctcacaccgaaacaaaagcagcagcagcggaaaaaaaaacgatcctagcggggcttcagctccactccacaggccaaactcaactggggtctgagccttggtcctctaactccatcttcagctcagaagcactacacttctgaaaagggggaataatagcaaggctgagtacaaccaccgtactcagcaagccacaccaacgatgcagacgtgcaaggggatacaaggatggtttgtggctatttgcataaaggcggttgtaaaacattttattgagcaaaacagtaaaactgttgagtaattaaagtaacattaaatctccactgatcaacgctacaccacgttgaacaggcccaaccaacccacctaaactacagtgtattgggtcgatttattaagtgtgagactaatcacggtgaatctagtcgaccgcccataaccgcgggcacggctattcgaatagttttactctgatcagaggtgtacaactgtacccacaagacacagccccacgacacgtttccgtgcgccgacatgccaccacgacataccggaaagaggccgtgacaggacccttcgcataaccccctctagccaagcacaccacacctcaggtttcacccccgtccccagcgggcaacgggcagtcccctctcgtgcctaggtgaatccggaagcgacagaggccgtcgcagggcccgccccgctccatcacgcccacccttgcctggatgcgtcgactagaggaaagctacactacaagcccagccgttgcccgcgctggcttgtggtaagtacgataagttcttccagggcatcccgcgaatcggtccttaactgccatgggtgcgaccagcaaaaccatgcacccacagcccaccattcagtcgcattttagttggataattacgaccatgaagcatggccagatgtctcgagcacgcagctcaacaagatactagaatgtctaatactgcaattatcccatcgactgagctagtggtaattaagcatggctaagcatatagttctagctaggtcatcaaagtaacaccagctaggcgatttattacccatggttgacaaaggacagatatcaagtaaacatgacacaagcgagcagataggtaaaaccctgaccccatgtaattagcaaaacatgcatatttatttgcaaacagtaaaacatttgtaaattgggatcaacatgctcaaggggaatgtgtgacttgccttgcttcttcacttggatcttctgaactcttatccttgcgaacgcgatcttccgaaacgacgggaactacacgctggcacgcaaaacgaggaaaaactctaataaaaaccaagaaaatagtacataaaaactaaacaaacatgtagagctcaattttagatgaattttgcaagttgaatggctcaattcggagttcgaatgaattagatatgaattttagaagttttgagccatttaaatgaatttctagaattaaactcgatttattgcgcaattattatttatttttacaaaggaaaagcttaagtgctgacgtcatcaaagaggccggcgccgacaggcgggccccacacgccagcgggtcaagggaatcggtccaccgtggaccgggaccacggggtggtccaccgccggtccgcaggaaccgacggcccagatcagctcgagctgatcgggcggccacgaggcagggcgcccagagcacgggcacggctcagagccggcccggccgagacacgacgcacggcggcgcacggccaccggcggcgagcggcggcgcgagaaggcgcgcgaagggcggcggaaaggagaggaggaagggggatgctcaccaagcggcacggcaccggacggaggcgaggtagcggcggcgctccccgggcgaggacgacggcggcgccccaacggcggccgacgggcgacgagtgacggccgggggcctccgggaccttgaacggggaaaagcgggctcccgtggaatttcggcggcgaggggcggcgaccgaggcgcggcgacgctgaggatggccacgggtgcggctcgggacggccaggagcggcggtaaacggtggccggggcggcgaaagcggcggcggcctcgggttggcagtggaggtgacagcttggcggtcggttggggaggggagcggccgacaggcttgtcctcgcggcggcgaagccggctgcggtggtggcagggtgcgggagcggcgacggcggagagaggtggtgcacgtggtggcggtgtttcggagttggggaggggaaaaggactaggggccggggtagagctcggcacagtgatgccgacgacacaaacggcacgacgcggcaagccctagggcggcagtagcaggcggctggaggcggtgaatggcggtggttttggcttgcactgtgggaatggtgctgcgggggtggaaggagaggacggagcggtggacggggtgtgcacggcggctgcggtgccggggagggcgacggcgcagtgcggggtggacgggagcggcggcgcggcgctgctggagttcgccggagagcggcggtgcgtgggctcggcgcggggagagcgagggagggcgcggcggcttgggaaaaatgggggaaatggatgagggaaggccggggattgtttttataggggaggggaggcgggatcgagcccgggagaggcggagtcggggcggcaaccgccggtggcgtgggcggcatcgtggggtgtgggtggcggttttggaggggagaggtgggggaaaacggcgcggacgtgggcggcgaggtcccacggacgagcgcgcgcgcggggggtggaggaggtgggcggaaacggccgcgtcgtggggcggctcgggcggccatggcggcagttggagctggaggaaggggatgacaggtggggtccacgggtcccacctgtcggggagagagggagggagagctggatgggggacgtaaaacagacttcgcgagggagaggggaaacgggccgacggcccaagagatggggagggaggccggccgggagagggagagagagggcgcgggccgcgggaggggaaaagatcttgggccgaaagcggcccaaagacaaagaggggaaaattttatttgttttctttttattttaattgattaaatgaactttgtgctattaaaattatttcttgagctccgaaaattcacgggaaatttcagagagtattttagggcacaaagaatattacaaaatattcccggccaatgatttttaaagaaaattttaatttcctctataattcacttgattaagttgatttaacttttatttaatttctagaaaatgtattattaattgatttttaatcccgaacgaaaatcggggcgttacacctagagagggggtcgggggagcccgacccctggtcatgggagggggcggccgccgcctgacctcgggcccgatcccccctcggggggagccacgtggcgcctggggcggccttctccctctagtctcggccagggagtggccgccgccctacttcgggcccgacccccctcgggggagggctacgtggcattggagggcagcctcctccatccagtctctgggaaggagtggccgctgccctacctcgggcctgactcccctcgggggagggccacgtggcatcggggggcagcctcctccgactatgtcacgccccgaactaatcccgaccggaactagcccgtgacgctccaaattaacctgttgatcgataccagtcccaggaaacagtgctggtatcacagggagacagaatatcacagcaacagcggtctctttattatagagtagagatacagtcatgttgggctacggacagatcccgagctcacaactgcattacaaaagggaacggaaaccaggactaggaccaaccaacacaggcgcgacttgggaactaggccgaaaccctaaaactcatcgtagccggtttgctcctggaagaactcctcatcagcaggatccgcttcatcttcttcagcaactgggggggattatttatatagagcaagggtgagtacgggagtactcagcaagccaagggaaataagtgtttaatgcaggcttcaaggaaaggctgttgtttttgcagttgattttatttgaactcttttctaaaaacaactaagtgagtgcttctcaaacgacacggttgagacagtgcgtctcgtccggtcggagtacgtgcaatgtatcagtctttaaaatttgaaaacaaggttggcacccggccaacagcttttcaaacggccacccgggccaacaactttcaaacggccacccgggcctagctgatcccatcagctgcagattttacaaacatcgaacccctttccacaacagcaatttcacaagcagtagtcaaacaaaactacgctaggaatcatctcacatccgcccatgaccgtgggcacggctgttcgaacagtttgttaacctctgcagagggggtacactttacccacacgacattactaacccggatcacccagcccatggggatcagccacgtcgggagacctccaagctttcatgacaaggcatttccaaagccgacacaggtttaccatatgccgacgagaggggtcccagaccaacaacaggttaggtcccagaccatactgtgccaggaagcccaggggtcctccccgacaccaccccggcgaatccacatgtctctcggcatcaaggctcccctgataagctagttactcagccaggggtgtcccattccacccatgtggtcgtacttgtcttatgttttgatgaaattccaaggaaacggtccttaagtgcaagagcggaaaaccgtacacccggtacgttccccggtccgcggtttcggaaattcatttagttcgcaagcaccgacccaggtgtcgggttttccaagtcttttgtaaaacccaagttttacccaagttgttactcagattttaagtttgaaggcgaccgtcgatactcgcacagagtgcacgaatatcgaggtgcaactagatggttacaaggggacatggtatcacaattaataaaggaaggatcaaatgcaacaaattaggtaggtccgccaatctgccttgcagacgggacaacaggttaagtgcgatcctatcaatgcataatattttcaaacaacataattaaatttcaaatataggctcaagatgttcaaaggtggcttgccttgctcgagatctggagcttgatcctcgaaatcctcgcgctgcgggtcttcgggctccgaaactacacgcgaaacaaacggcgaaaataaagccctattaatgacctctaagcatgccattagatagatctcgagatttgaggaattttggaagttgaacggagtcaaacggatttacagttgggaagatattgaatttataagattattggatttttggtctaaaggaaaaggatttaattaagtcctttttgaaaaagaaaagaaaagaaaggaaaagagggagggaaaatagacttttcctcgggcggctagggcgcggcccgagagagatggggcggtccggccgagctaaatgggccggccggcccaaggcggcccaagcgcgcgcgcgggggaggggaggagagagagggccggtggaccgggctcaccacgcgtggtcccgggtgggacccgcttgtcagcggctcggctcaccgtgcggagggagcacgcggcgcggcgctagggtgggggagggacgcggtgcacgcgcgcggttcgcggtggatgcggatgcggcgggcccacgcgcagcctcacggctcgcggtggaacgcgcgcacgggagggactgaccgggatcggcccgatccgatctcggccgagctggcgccgacgtggcgcctacgtggccgctacgcgggccggcgggaggtagacgacgacgccggccggaacggacggcggacgacagcggcgagcggcggagtgaaccacggcgataccggcgaaagcgagtacaccgggtggttgctcaggacgaggggagacgagccaacggctcggattcgccggagggagtccgtcggctgcggattgcggcggcggcaaccggcggagagaaaaggggaaaacggcgacgaggtcacgaggggccaattcccggcggcgagagcacctacgcggctatgggaatccgttgctagcgtcggattgggcggagctacgccgagcgaggccggcgacgagcggcgcttccgagctcgggcggcgacggcggcgagcacacggcgagcggcggcaacggccggggcggcgccggctagctacggggaggctactcgtgctactaccgaaaactaaggaggagagatggagcgaggaggaagaacggagggaggcactaccgtgcggacgggacgcagtgacgagaggccgacggcgcgggagtaaactctccggcctcgggccggggaagaggaagaagagggcgcgcccggagtccccttccgcgtcctagtgcgcaccggctcctccggcacgcacgcgacgacgaacggcgacggcgaacaggggcgacagtggcggcgagagacgaaaacgagggagattggagggggaggggcttgggtttaaatgggcagcaatgtcggtttgggagaggggaaccgacattggacggtcaagccggcgagctggcgctccggctagcggccaaaacggcaacagaaggtgacgccggcgagagggaaaaagagaaaaaaaaaggggagggaaagggggcttgtcccttgcctctttgggaaaaggaggaggggagcgggggcgacgcggcagagggagggggagctctgcctccgtcccttggcggcttgcgcgcggagaggcggggccgaggcgatgacgacggcgatgacggcggggcggtgtggagcggagcagcgacacgagcgacaggcgcggcaggggctgacggcggcagcgaccaggcggtcggcaaccacggcacgcgcgcgcggaaacaacgggcggcgcggtggtttgagcggcgcggctcgggcacgcgcgctggctagcggaaccgggcggctgcgcggacggcgcagacgcgacgcgggcgacgaccacgcgggcgggcgcgaacgacgcgcggggagcggcagcgagggagcggaaaggaggacttggctcggcgcggccggctcaagc

SEQ ID NO: 10245 - DNA, 53361 bp, Oryza sativa
agatgggccgagagagattcggcccatcgaccccgggggaggcaaaatagacttttgcggagggattgatttggaaggatttggattcggaattggactcgacgatagatcggggattgagatccgagatggcacggacactagacaacaagcaaagaaacaaatttcgcaattagggtttttaagagataattttcccgctaggcgccacgacggaaagggcgctacagactagtctttggggaaggagtggccgccaccccacctcgggcctgactcccctcgggggagggccacgtggcatcgtggggtagcctcctccctctaaacctaatattcctgggcccatatcaccgacagtagcccccggcgttagccctgaccaaaacttttcctaggtggtcagggttgacgccactctgttagtcaaatgacatgtggaccagatctcttattctttctttgctggcactaagacccatgcgcctttttcgccccagcctgagggtgactcgctagcccgtgccttaggctgtgaacttattttctgtatatattcagcaaacgttgttagattatctcgggcccgtgaccttacgcttgcccctgccatttgttaacctctgttcatgttctacttcatctattcaaacgattattttcgcgagtgtgaggaatgaactttccatagccagcaatcttcacccgtgatcaagctaagctgggcgccgtagccagccggcggggccgaagccagccgctacggaagagctagcacagggggccccgggcgtcgacggtacccagagctcgacgcagggctaggatagagctaggaatcgtagcccccacactttaagcaaagaatcgtttgaatggatgaagcgaatacaaactttttgttaccaagggaggcaagcctgcgcgcgacacataggtaccgtgggaccgcgaggaagagataggcgagagataaatataagcaagaataattctatgcaaacgattaacttcgcgcaagtgtgaggactgaactttctatagccagcaatcttcgcctgcgatcaagcgaagctgagcgtcgtaaccagccgacggggccaaagccagacgctacggaagagctagcacagggggccccgggcgtcgacggcgtccagagctcgacgcagggctaggatagagctaggaatcgtagcccccacacttttagcaaagaattgcttgtatgaatgaagcaaacacaaaccttgcttgcatatcgcgacctttcaaacctttagctcgaagagggccccccactatgggttccgaaccatcttgggaagactgtgaccacttagcaaacgaggtcaggttcccacgagcctgtgtcctcacgctacacattttgtttgctcttttctttcggtggcctccttccaatctcttttccttttacatggacgattactttcgcacgagtgtgagagccgaaaactctagagccagcaattcctgtccacagttgagccaggccgggtaccatggccagccggcgggaccaaagccagccgctacggaagagccagcacagggggtcccgggcgtcgatggcacccagagctcaacttaaggctaggataaggctagaagacttagcccccacacttagcgaagaatcgttcatgtagattggagagaggttgggctcttaccaccgagggagcaaacaaatgagcaacacgcgggcgtcgcagggccatgagaatagaatggggggaaataaatataagatttcaagctgtactaggttgatgagttgaaaatttgaaagtactgaaaacatgagaggatgattagttgagccgggccaggcaccatagccagccggtgggaccaaagttagccgctacggaagagccagcacaggggatcctgggctttgatggcagccggagctcaactgcaggggtcctcccaggagtggaccgaggcgggcagcaggttcatgagccaaccccgcgcttggcccctgagggccatggggaagaagttcgccatgacccggtcgtcaccccccatcgcctctatgatcgtcatgtggatctggaaggactcaagggattgacgctgtcgtcgtacttctcggtgaggctaggccggaactttgggggccatcggacattccgaagactcgccacaaagacctggtagccaagcttacctggtggggatgtggggggccttgccccctgcctggggtggcacgacactcctaaggatgctgcgccttccccgtagcggtggcgcgacactcaccacgccagcactcaaaagaacctcaaaaatcacgaacgcaccgcctacctggcgcgccagatgtcagagaatgaactcctccaccagggaaccgtgaggcccccctttgtgagttcggccaggggcagcgggtgagattcgagggcttggtgagcggagctgtgtgatcttgagggggttaggcccctccaagacgatgagacaaaatatgtttatataggttcgggccgctgagatgcgtaataccttactcctgtgcatgattgattgaatgtagaacacaagtgcttggggttgcgagacccaagcgccagttcgctcggaaatcccccccctccaccactaggcctggacctccttttatacctcaaggggttaccacatgggcccaacaatctaacctagctccggtggagaagtattataatctttgcattaaatgcatgtcttgtctcttgacttgggaagccaagcacacgtcgtcttgatgatggggcctgtcaaatcttgccgcctgacacggggggtgcccctgtcagtcaccatttaacgggtgaagacttctggactcctattacaccgggaaacgggagctttgctttgaccaaagcgggaggaccaactccggctgggataagaggatgagaacctctcatcatcattatttgatgggatatgtcgggctgcacgtcgcctggcacacgtgatggtgcgcctaacatcttgggtcccatcagtcattcgaccggtcacagaccggttaagtgcactgcacaccgcataaaacgcggcgtggcgcgaccgctcgggatgccataaatgcgggcaggtgggcacctggaggtggacacctaacccaccgtacgtggtgacctagagagggggtcgggggagcccgacccctagtcacgggagggggcggccgccgcccgacctcgggcccgatcgcccctcgggggggagccacgtggtgcctggggcggccttctccctctagtctcggccagggagtggccgccgccctacctcgggcctgacccccctcgggggagggccacgtggcattgaagggcagcctcctccatccagtctctgggaaggagtggccgttgccctacctcgggcctgactcccctcgggggatgggccacgtggcatcggggggcagcctcctccgactagtatctggggaaggagtggccgccaccccacctcgggcctgactccccttgggggagggccacatggcatcggggggcagcctcctccctctaaacctgatacccccgggcccatatcaccaacagtaaaggttccaacgaggatgaatgaaaacaatggtagatcgagaaagcaaataaagcgatgaaaacgaaataaggcgtagtaattggcatgactattaaaaacacggggatgataaagtcggtcttttaaagttctaacataagatagttatttaataaaatcatatgtaaaaaaagataattttgtatgggtgctagccgtataatagcgcaggccacctagctagttttaatctagaatccataaaaagtatattttagaaatatctaaaattcaaaatttaaaaataattaataactatcacatatatacaatacaatatgaatatatcacatatatacaatacaatataaatatcacgcattagttagttcgtgattggttagtttggttaagttagtacataatttaaagttatgttgctagttttaatatattttaatcataaaacgtgaaaatatttaaactattatatgagaaaaaaataaaacgatgctagccacatgttttatgcagagtattatacggaaaaaaaataaaacgatgctagccacccgatttatgcgggccactctgctaattgctagtaaaggaaaaaaaatgcaatctgaccgacgaagtggtacggagggcactagagatcgggcgcccgatccggggagacaaaaaatcgggcggccgtccggccgtcccagccatccgatccgggagaaagaaaatcacaggacccaaaactactacacgcatgcacagagagattatttttaggcactgcatgcacagaacatgcagccatgcatgtgtcaagttttttaaataaactttaaactaatttttctcaaaaattacttatccaattcacgatccgattgcaccactaaactcgttgcaattaaatctttaaaacaagaccacacattaatataatccgatgaaaaaaaaattagcttattattgaattatttttaaatattgcacgctgttccgccaagtatatagaaattgttccactaagtagatagtaattatttcactaggtagatcaaaaatatttcaatgatttaaaaagttgaaacacaaccaaatcacctcgtaaaacattttgctacaacgtatgaaacaacagtttctcaaaaaattgggcgttatttcactttatataaaaacaatatttcagcaaatagcgaaaaaatgtttcagttcactgcaacatttgagctatacgtagtgaaacattataagtacattaggtgaaacattttttgtggaacaaaaaatgaaacgaattcccttaatagagggtttctaaaatatgtgggtgatttgttgtaaaagaatgtttcaattcgctgtaacattatatctatacatagtaaaacattgtaagtacactaggtgaaatattttttatggaacaaaaaataaaacgaattcccttaatcgagagtttcgaaaatatatgagtaatttgttgtaatagagtatatgtagggacacgtgacgagggcggcagaggacaggtggcggggcggggcgcgcgcgcgcggtgggagacgccagggctggcgcccggcgcccgattttttgcagccgcgccggcgcccgacgtttaggattttcgaagtggtacggccccattcccattcaaaagctcgcgaaaataaaaccacattcccctcccataaaaaaataatatgttcatctttactgtgatagatcaaaggctgatattcggaaaacactaataacataattaagaacatctccccaaagtttaaatatgtagatatgtacccagctgattcatgtacatacctaaagcacaatttgtgtgcatcatcaacaggacgtagaagttgcgaggagagctcccttgttcttgttcttgtacttgaacgtgacggcgaagtagccgtaggcgagcagctcgagcgcgctgagcgcggcgatcagccagtagaagtagtcgaggtgggcgcggttgaggttgttggagaaccagctgccgcccctcgccgccgtcgcccggtcgatcccggacacgagcgcgctgctgatgaagctgccgacgccgaagatgctgaggtagagcgccagcccgaggctgcgcagcttgtcgggcacctggtcgtagaagaactcctggagccccaccatggtgaacacgtccgccgcgccgaacagcacgtactgcggcaccatccaccacaggctcatcggcaccgggacgcccgccttgtcgacgagcccggcgtcccgcgccgcccgcagccggcgggtctcgacgagcgccgcgatcaccatggacaccagggacagcaccatcccggcgccgatccgctgcagcatggtgatgcccgaggggacgcccgtgtagcggcgcgccaccggcacgatgacgcggtcgtagaccgggatgatggccacgatggtgatgctgatgaagctctgcagcgccgccggtgggacctgtatatggtcgccgatccgccggtccagcgtccccgcctgcttcgtgaagaacgtcgacgactgcgctaacgccacggcgtagatcaggcacgtcgcccagatcgggaacagccggacgatgcccttcgcttgctccacgaggcccgccttgcccaccacctgttcgtcctcctctactcccgtgctacaaaattgcagacaaaaaaaatcatgttatcgaacaccatatgtgcaagattaccagatgcgtgaagacgcattgcagcgagcattactggtttacctgaactccggcgccgatgtcgccgttggatggcactcctgcgaagccggcggaagaagggggatcgacttcgccctgtttcgccacgccgcgagtgcctcgccggcgcgagcgaccacgcccttcttgctgccggagacgtagtagcggtacgtcctggtgccgagcaggaacacggcgagggcgcacgccatgacgacgcaggggatgccgaagccgaggccccagccgatgttgtcctggacgtagctgaggaacaccagcgtgacggcggtgccgccgcacatgccgaagtaccaccagttgaagaaggagctcctggagaccgactcctcggggtcgctcgggtcgaactggtcggcgccgaacgcctgcacgcacggcttgtggccgccctgcgcgacggccaccatgtagagggagatgtagaagaacgccacccgcagagtcgacggtgggcaggtcttgccgccggcgacggcggcgctgctgcattggttgccgccggtggagatcaaggtcgagaaagctaacatggccaagccctgcacgcagtatcgcgctgagtgatcagtgatgtagtacgttgccatacgcgcgcgcagatggcggcgaagttggaaagggaacaatagtaaagcattttataattggcaaaatttgttacaggacacctaaaaaatatgtaattagctatgagacatcacaaaaacgtaaatttgcccaaggacacttcaaaagtgtggtaatttgctgcaggacactagacgtattaaaatataatatcaacctaattgatgagagagaaaccacatcaaatgaccgttttgcccttatcttcttcccctcttcctgctgttcttccgatgcttccgaaaagaataaacaccaaaccaaataaaatgcgccggcgagccgccccatggctcctcacacttgaggcacaccctgaacacgctgctcgttatcacgtgcacgggcatggtgttgcccatcgcgagcgcctccaatcgcgtgaccacgccgctcgccggctcgcgcgtcgtgaatcacatgccacccatgcgcgccatggctcgcccttgcgacacggcagggtcgtacgcacgagcaacggcgacaagtcaaagcccttggaagggacatcaggtggaaggcgttcagcaccttgcgcaattcatccttgtcgttgtcgacattgccaagcatgtccactggctcctgcgcgagcttggtgagatgggtcacagaacatgtgccatcttccggaaccactgcatcttgtggaggccggcgaaggtgatgcaggtgtctgggttgaggtcgaacaacatcttgatgagcttccgtgcgtccgttgtcaaccacgtcgggcagctgaagtcacctgccgcatcttgtgatagatgcacaccaggttctcgtcttggaacagtagcgcgccggcgagcaatagaggatgatgctacaggactagaggtcggccttggtgctatcgtagccacccggcgagcacgtcggggacaatgtacgtcggcgtgccacaagcggtgtggaggagctcgtcggggcgcgcatggtagcagactgtgctgagcccgaagtcggaggttctcagcctagttaagcagcaggttctcaagctcaaggtcacagtggtacaccccgctgatgtgatttggtttttgttctttttagaaacgtcggaagaagcaagataaagataagggcaaaatggtcatttgatgtggtttctctctcatcaattaggtggatattatattttaatgcgtgcagtgtcctacagcaaattaccacacctttagagtgtccttaggcaattcacgtttttgcgatgtcccacagctaattacacattttttaggtgtcctacagcaaattttgccattataattttatcgaggaatgcaaaagaattgaaggcccaacttatgcacatatcggcccacaacttcatctgtaattaaacaggaataagttcactttgtatcccttatcttgaggttgagtttaaatcacatccttagaaccataataacagatataacaggtttcaactgatgaaaccagtgcaaatagactctcttagtggtttgtgggcaattttggctgatgtggaatcctaatcggtgatgagggatgtgaagtgaacaattcattagttgagggacacaaatggcgcgacgggccagtgtacaccttaccagatgctatcatgtaaacgatgaatataaagagcccgagtacaacaaagtactaggtgatgtcccatccaaatctatagggtcattgtttggcttattgaggaaaaaagccaaatgacataattgcaaacaagaaatgatttgtgaataaaatttttatatacatgtttttagtgatctaaaagcaaatgattcaaattttgacttatctaccctataattcaccaactcattttactcatctttcactcttacactcttacattcatcactcaacggttcagatcgtccatataaaatcgaacgatcgagatcgatccaacctccccccctcccggaatcgccgattccacctcccacctcctgaatcgcgcacgccccactctctctctcgctctcccagatcaacgtctcctctccgcccctaaccacgccgccgccctaatcgccgcctgccgcgtgccgccgccttagatccttcgtcgtcaagggcgccggctcgcgccgctcgccgcaatctccatagccgttctcatctctcccctgctgcggctgccttcaatcctccgtggtcaagggcgccggctcgccgtggtctccatcgccgccctcatctctcccctgtcgccgcctactatgagtcctcgacgatggtgaagcggtggcgcggtgatctccgttgaaatcgacgtgcagcgcggcatttctgtccgaggtggcgcagtggctggagcgaaaggcgcctcgccggcatgacgtggactgcagcggatcttcggcaacatcacagcgccattgctccatcttccatcggcaattgtgctcctcgttggcaagtggcggcttgaacagtagcatggcgctccccggcgaccgatctgtgtggcagctctaacgatctttgtgctcccctgtttgtgctgctaatctccattgagatcaggtcaattttccccaattttgttgtttccaattggagagtttctgtagatatgtttccaattatagcgtcgtcttttgctcatatatcatttttgtttagcgaaaatatatgatgaaaatttgtatgtgtggtatagaaaaaaaaattgcaatcataaaatcatatatatagcctttctggtgtaaatgcagtcaatagtagggaatctttcctatgtggtcaagggtgctggcttgctggggtctccgtcaccctgacatcaggttgccgtcgatccatcgccttcatattttgttgggtaagaaacaaatcaacgattcttcaacaatttgagtttgcagtatatggagtgttatatcgactgaaatattattttttattcttttgtttgtaacctcaagcttcccagattgccaattcctgtgccagattgttggtagtttgtctacagaggattctgtactggaaaacatgtcagggcagtgtggggttgtgctgtatgtgaatacatgtttctttgagagggaggagcatgagagagaacgccagtttttttttggcattctcaactagaatgagaaatatgaatacactgttcgaattttggaagatgtgaatctgccaagatgtttgccaagctctacatacaccatttgtttgctaaggtgttttcagtaaaattcctttgggcaactgtgacaatggtaaatcaagaaaatgatggtaatttaccaagtgcttttctaccaaattacatcaaacgttgtatatattttcatgggccatattggaaatgttgttttatggctaatattagcattcttatttttcagatccgataaatttcaggttgcaacttacaaggatcggtttttgtaggactaccaagttgcctaggatttttgggtaaggattatttgtttttctgatgcggatcatggaaatcgtgtgaaaaattatccagattctggtcttgaattatacttgtcaaaactaacaagattatatgaatatctataaaaataactccactgtttctttttgtgtggacatatattgtatattgaagtgattatatataattgtcgatggtcatggattattattttcatatagtaataatatcaggtatgctgatttagaaagcttttggtctagaatattctgattttctctctttctaaggccaagctatggtatttttgattcacctcagttgcaaattgtaatgagttttatttgtatacatccaaatgaaaataatacttcctccgtgcagccagcatgtgctgtagagattgtattaagcagccaaaatatcatgtgctcatcatgtaaggcggtcggagtcagagaaaagaagtggatcagttaatataacatctctaagcatttttgctttttagttgtttgctagcataattactttttgtattttgttgtttcctagatgtttcgaaatttttgatgaacgatttcggtcgcgacttatttgcgaatatgattatgtattatttgttacatacatacatacatacatatatatatatatatatatatatatatatatatatatatatatatatatatatatatatatatatatatatatatgtatatatatgcttgtaaaaacgtgactacgtgcattaccaaatgttaccgtagctttagtatgggtatgctactgtaaaaggatatgtaaaaagatgaggctgctagattggttttttttacattgaaagtagaaatttttgtattattgcgaatttaaagtgcagggcgtgcgtaaccgtatttgcccagaaactcatcagtgatgtgctctctctcctgggatagaatcatcgatcatttccctctagaaaaatcaaagttgatggcttgatttgccttcgtcatagaaagggaccctcttcgtcgtgttccacgatcaaacgagtaggttagtcgatccccgacgagacctcaccaaccactcgaataatttttgcgatctggctcctaataactctcagtgctacagctgctactggcttaacaaatatcttcatggaagaaacatgctcacgcgagtcacgagccaagaaccaattccaagccatggatagctttcagagatctccggtgtgctgctgacacgtgggccccgcgctagcgcactcctgagatctctcgcccatgccgaacaaacgggaattttttttctctctttttttttctatatctaggagagaaacagacgagagaaaagaagagaaaaaaaaaacaatggcgttttggtggtattaatttaccaggatgtagagcagcgaggcgaggaggatggtgcggtagcggccgagccaggagtcggcgagggcgccgccgagcagcggcagcagctgggagacgccgttccaggcgttgatggccgccgccgccgccgcgttcccttccccgagcgagcccgtcaggtaggtgatcaggttcgccgacaccccgtagaacgcgaaccgctccgcgatctccaccgctgcagatcccccaataatccatgtcaaattcaccaccacacaactcgtacgcatcgatgattctcagttctggcctgccaatcgagcgcactacttgcctatgatgaagagcgccgacctccagccgccggtggcgccgcggagggcggggcggccgcggtggtccacgggggcggcggcggcggcggccacatccccgtccgccatgcccgtcgtccagtgcgagcagcgggtcgtaggagccggagtcggagccggaaggcatcgtcgccggccggctttgacactatatatatgggcagctcgctctctctctctcacgcacacaactagccgcagctcggccgaaactttcgcagtcaatgcctactcactcacaccttggcttggcggcggctaaaataagcaaagcagcatgagaatcggccgggaatggatctcaacagaaaataagcgccaactggcgcgctcgatttatatcccatttatattatttttgtgttattaattagcacattgttcataaaaaatatagaaatcaatttaatttccttgaaactcataaaaaatcgtaggaatggaattttttgagtttaagtttaacataacgggtcatattgttgagaaaatcatcaaattttctctttttttcaatccatactattaattcttccattgtttttctaaaattataattaaattgtttactaatgataaaattggtgttgtttttttttaaaaaaaagtgtttcagatttttgttttgttaggagccacaatgttcatcatttgttttgatgacataacaatactaaattgggtttaaatcataaacattgtataggtgtttgtattgatggctaattagtgatgggtgacatatatacgttgatgatgagttgcatgtggtgatttcgctgattttagaagaaaaagaagttaattttaattcctgaactatttcaccggagtagttaacatactaaattgtttttttcttattcaacatttctttttaatttttttcccaccgtttatgcaggttgaaagtacataggactgatttaaacatcaaaattttaagttcaagcaaacaaccacattttgaaaaatatttttgaactttaataatattctaatgtatgactccaacaaatttcagcttaaagtaagaaaactacaaaatattattaaggagtaaagtgaaccattttttacagtttaggaggtaagatgagccaaaaaaattagattttttaatagtattcatcgaattagttcggagaagtaaaatatttttttttattttgagatatgctaactcaatttttcaaagatgctgatatgtatgaaaactgagtagttgtatatgcattcaacattttttttgtaatactaatgtactacctcagtacttatacatatgtagagcatgtgagctctattgacataggcattcgctgcttttgcctaatcgatccttccagaatagcctttcatcggcataggaggactggcctgccacaaccctgtacttccttcgtactcctagacgcacaactgctcaattcctttttttttctttgtgctcttcggatttatgtgccatgtgagagaggacacgtggaccaatcactgctggcagaagcagccagcattagaaataaagatccgcgccgcgccgcgccatatcggatagagtcggatacgattatgttgatatgtgaatacgattatgttgataatatttggataattattttgcgtttattttaaataaaattttaaattactattctatcgtggatctgatatttgaaattgcgctaagcaagacggaatagttatcactactagtactatggaacgaggggtcgcactcgtcacgcgtcgcgcatgttggatttgtttggttcaataccctaccaaaatactggtattggcacaaccaatattttggtagggtagagttgtatttggtttaaggccaatttaaaaactaagcttttagtggaatatagaaaatatcaaattggaccttggcattgccaatgatttggcttctaaccaaaaccaccaatacactattcaaactaccaaaatgttggtaaggcacgtttttagcactagtctaaaacacattaattttgacaatttgactctttaaaaaactaattttacaaatgaaccgccgcctatttcaaaagtaacctttttttcaacaccaaatgatgtggcgctgaacttaaacacctcagcgccacatcacctggtgctgaatgccgtgctaccgtggatggaaggctgagtcagcgtgccaacgtatattcagcgtcgtgctatttggcgttgatgtgtctaaattcagcgccacacgatttggtgctgaacagaagggtcacttttaaaataagttttggcagcagtttatttgtaaaattagtttttgcaaaaggtcaaattgtcaaaattaatgtccaaaacggcccattatacgcacgggtgcgtgaagcaacggagttgctagaaatatggcgccatatgctacagtcgattttttttcagccacttacacagtagttacacctcatttacacctcacttacatatgtaattagtatgtaattttcgaatttacatatgtagttttagtacttacatatgtaattttgagacttacattgtaaatacactaaaattacatatgtaatttagagacttacaatataaatacataccgactattttttgatgaaaaatatggcgccataaatataatataactacaccctgaagcaaagcggccagttgaccaggtggccggtgacggggccgtgggtcgccggacatgcatgcatggctagtcttggcgggcgccggacatggctcattggctggctggtgttggcgacgttgcgtgcttaggactcgcgagctctggcagtacgctgtcagcgtcagctgcggtacgcatcttgggtgcctcggttctccaccacgaattttggtcaaaatgagcagacgccagacgggcagattattctcgttttgaacgtttttgtaccgagaggaaggtcagttgggctgtatgtgcacactaatctacagtagcagtactacgttgtacctttccttttgagaggacgtacgatactccagtcctactgcggtgtacatcctcggacaaggccggggttccctcggcttcgatctaaccagtgcaagtctctcattcgagttaccttagatatcacgtaggacaaatgcatatagaatccactcatctcacagtgcaagttactttcacgggatccccaagccaaacaccctaacccaactactgctacatttcccttttaccggcgcttctctctcccactttcctcgcattctctctcacacttcccccatttaccggcgcccagcggagaggaggcgacatcctcgggctcgtcccagcttcgagcggcggaggggtgatgatggcgccacggatctggagcggcagcgcggatctagagtggagcggcgacggtgtcctcatgctcgtctccaggaagcgcggagcggagccttgacggcgcggatcggagctgcgcaagagctcaccggggcctccgtttcgaggcggagaagggtggtggttggggagctacccagcagcacggcgacgagctccccggcgacaccgaggtcggcgaagtggagtagagcatggggacttaggacgacgccaccgccactcgagatctgcaaccggtgcgatggctggcggtgtagagatccgccaccgaggccgcctcttgaagcgaggaggaggacaaccatgagcggtcatggcgagcggcggtggcgtcgtcgacgggatgacaggagggaggtgcgatcgtggcgggcggtggcgtcgttgacgggctaacgggagggaggcgcggtcgtcggcggctgcggtggcacggtcatggcgggccccggtggtgactccaccagctccacgagctcccccggtcggcgcccctcctctcccttcatgacagcacttcaaaccgacgaggcggcgacggcggtctggagcgccctcgtttcgagcggcaatggcacacggtcgatctgcttgtggcacccttggcaacggcaaccccgacggctgagcagcttcaccggctttggaggaccacggccacgctcaccaccaaggctgcaccggcctttttgcagagcaaggcgccaggctctcgttcctctagagagatgcgaaaaccaatcatagctatgcggcccactcgctttttcctccacgtagaccaggtaacgcgccacgaacttgcactgtgaaagggctagacaggtcttttcaaggcatggccagatggccaggtccagtccacgaacatagtaggaactagttgataccccgcactttgttgtaaaatatgtagataaaatgcatgttatacattataaaaagagataatccattctatgccgtagacaaagcacggattctacaatataccactgacaaagctcagttctataatataccatcgaacaactatttttcttccttacataccatcaccgctagtcaacagctagtcaaattccgttaagaggaagaaaatgtccattttaccccctagggtatcatgcgtactcagatttcattggtcaagatccactaattcttctcattgatgaaaaatagaaatcacttgtctttttatcctccaagattatttaatgagtcatgacattgtgcaaaatctcaattttatcctaggggtaaaattgtcatttttttctcccttaacggtgtatgactaacgactgactaacaccgatggcatataaggaagaaaatgagtcgttcaatggtatattgtagaaccgagcattgtcaatggcatcttgtagaacccgcgctttgtcgatggcatagaatggaaaataatgtatatgtttaaataatgtgaaaatgatctggagataatgatttaacattgcttgcatattgagttctaaaaaataacaaaattataaatgatttgtcatgtttgcattatatttaaactactttagataataattgttagtggatgatgatgtggcacacttgtatgtgatttaaaatactttagataataattaatagtgagtgatgacgtggcacacttgcatgttgatctttagaagttagtgggcatcaactatatagatagtatagataagttaattttttggtctcttaacttgacaccaagttcgattttcaaccttgaaccaaaaaccagatacaacaagcctcccaacttacaaaaccagtgcaaacgagatccctcaacagtattgttaccaggtttggctgacttggcacctacgtggctactttgactagttcttcatctcacatgatattgatatggcgcttacgtgacagtttgatcccggaaaaaaatttaaacccatggagcccacatatcaattacaacaaaaaaaaattacagtggcgaccatgtgggacccacatatcaaccggttgagttagcgtgagacccatgcgggcccccgcatgtcagccgcgggtgaatcctcaaccagtcgacgctctcctcgtgcattagtggcggtggcggctggagcagtggccggccctagggagagtggattcgttgggcctcaagtggatctcgtcgctgggatgccgacaatgatttccctcattgcgatggtcatcggcagcggtagccggttgatgatatcttttgtctgactgacatgtgggccccatatttttattttattttttatttttttgcttctagtgccatgtcactgtcacgtaggacaaggatcaagtcgaattagccacatagatgccacgtcaatcaaaaccgtcattcaaaccgtattgggatcttatttgactggttttaacaattgaggggagaagaccgaacttgctgtcaagttaagggagctaaatgaacttattccaacgtactatatgcgcatgaggcccatattccgatagcaagtccggctaggaattatttgggcctcactcctcaggctctaagtagactctcctcctactggctagtggctacgtactgcccttccctttgcgagcttgtacttacttcctgaattgatttggccgagattattaaatcttttgacggcagctagtgatgttaacagtacaagtgtataacacccagaaaagatgggcagaacaacacctgtaacaaaagttcaggtgtttggcatgcttaaaaccaaaggtaaacttgctgaaatggtgaaaccacatgacacatattttcaggtttagtggagtccatcgcgttgatggggtatatctttggccaaaaagtgaactcactcttctccgttcagcagcggggagcgtgtagattacagcacgcatgcaagcttagtgctcgtcagagaactaatcactaatatatccagccgctgatttctcatcgaagacataattaaaattgtttgcacgctgatctgatcacagaagcgattgatgcatgcaaggtgtggcgacgtggagagcccaacacggaaccaccaaggatggggggcgcacgcagagcttgctgtgctgcgtgctgctgctgcgtatgcgtgcctcctgggatacaccgtgtgatagatctggcagccccatccgacctctcgccctataaattgggctaccggccggcgtcttttgttcatcacctccacctcgcaaacagaaccagtactttaatttcaccttgcaaattcagttgaattcggctcgttcaggttcagtcgtttgatcatcatggccagtatggccaagtcgctcttgtgcatctcgctcgtcgccatcctgctcctcgtcgaggtaattaatcagatatttcaaactgatcttttaacctaaacgaaacggtttcctgaattgtatatatttcagttactgatccgatcctgtttatttcttgtttggtcttcagactactgctccacatggacaagcttacgccatcggtaagcaatgcgtgatctagttcagtttttcttttccctttttttctgatctgtgtgagtgtgatgaactgatgagttgcatgcaaatgtatgtaatctcgtgtagattgcggggcgaagtgcgggtaccggtgcagcaagtcggggcggccgaagatgtgcctgagagcatgcggcacctgctgccagcgctgcggctgcgtgccgccgggcacctccggcaacgagaacgtctgcccctgctacgccaacatgaccacccacaacggccgccacaagtgcccttgatcatctcgaccaatatatcaccgctcgatcaccgcgccgccgctttgctatccaaccgaccggtgatgatacatggcggcaaccttgtgatgatcctagctagctagatgtgctacctacttcgtgcctgcatgcatgtagcttgcatatgcatgctagctttgctatatcgcgtatttgctacttggaatatgtatgatgtgtgtgcatatatatgtggcgtgtcgtgatcgatcgatcgatcgaccgtgtacgagcaaataagtaatataatgaagtatttgcttttatgattaaattgcgtagcaactttttcagttttgccttgctatgcatggttgggaaaagcttggggtatagtagcgcgattactagcaacgatgcacgaaaaccattttgtgcgtgtgcgtgcgtgtcagctattcagcaagagaaatcatgactggcacggcttacaagggaagattgctcgtacgtacgctagctactctcgatcacacgggtgcattgtagctttggcacttcgctgcatgtgaccaatatatggcagcaaatctgggtgcagacgaggcactagaagagtaggtgcagccaaaacacgggtcggcgtcgtcagccaccgatctaccaaacgcctgacagtgttaagccaaactaaccacaacttaaacgacggcgcagaagtaaactgtcgcgtgctcatgcgtagcagggcccaagaatgcactaacaaagacagaggcctaatccatcgggcctggcccagctagcaacggaagtgaacgcggtaataagctgcttgtggaatacgttcacattaggtccctcaatttgtcgcccagtctgattttcatcctcagttcgaaaaaccggtatattgcatcccccaacttacaaaaccagtgcaaacgaggttcctatgtggtattgacctcggttttgactgacgtggatacgtggcatcttttgactaagtcttcgtcctacgtggcgttgacgtggcacttatgtggcagtttgatccggaaaaaataaaattggaaaataaaaaattacaacaaaagatgtgaggcccatatattagtcaaacaaaataaaaatatgtaagtgggtcgtactacctccacctcaccccctctctctatcccctatgggtcccaatgggggtcaatggcgacgcaaggcagcagtggcggaagtggcctgcgaggcagcaaggagggagctgcggcgttccggtggcggagaaaaggatggaggtgagggagccgatgagccgaaggaggaggccgagccgcatcggggcgacgcggctaccaccagcagtggcgacggaggaggagaaggcgcgggtggggaaggcggcgagggcagtagggtcaatgctagcagtgccttgcgggcaagccctggtggacggggaagggtcgggttttttttttttttgggggggggggagggggcggcggcggcggtggaggggcggagatggcagcttcgatgttgagaatgaccgcttcacccggcgccgcccactgcccctatgttccactcggtgcctggcacccgccgttgctccgcccaccgccccgccaacgctccgcttccacccaccgcccctctgctccgcttggcgcctgccgtcactctgcccaccgccctccgccgctccacttccacccgccgttgctccgcttccaccctgccgcccgccatcgctccgcccaccactccacttccactcgctgcccctttgctccgcccactactttgcgccgccgcttgccttttgcagtgtaggggagaaagagagagaggggggtgagggaagaggggggatgacatgtgggaccacatgggccccacctttttaaacttttttgtgtgtggttgacatgtgggtcctacagtttttattattttttgagatccaattgacacgttgttgatgcgaaaaacatacactttgcttttgaaaagcaaactctctccaaatcctcttcgattttaacttcgaatccgatctatgatttgccaaatttggtcgttaacacacgtaagcgccatgtcaatgccacatgggatgatgacctagtcaaagggagccacataggtgccatgtcatccaaaaccgagcataatactgctgagggacctattctgcacggttttgtgagttgatggatgcgttgtatctggttttctggactaaggatgaaaattagactaggcgacaaactgagggatctagagtgaacttattactaaacttgttgaagcagagaggggggggggtgttaaatgtcgtcccccctattcggcctaaacagtttagaggacaagggtgaaacatgcgactatagtgaggtgcagggcgagagaggaaatgagagattgagtgagagagggatgcctgcgaaaatactttaagtgattggaatgtaacttttaaacttgtaaatgttgagaatacaaaaaataattgataacagtgtgattatgtgagctgtagtacctactttcgtataaaaaaataacttataggaatgaatctgcgcaagcattatgttcatccatataaattggttttttgaacggagggtgtagattctagattaatgtgttagatgtcgaactttatattttctttaactttaactatagtaaacagtaattttatggaattcactcattttttctcattgagaatttgatctgcaccataaaactgcaattgccaattgcatgctggaattcacacaatttatttagggcccatttgattcaaagaattttatgtagaaatttcataggattcaaatcctataggaatttttcctgtgtgaccatttgattcaagaaagctttcaaattctataaaattcctatggaatggctcattgcacatggattttggaggaatcttagcaagagctacaacctcttagaaaattttcttcgagtctatctttctcatccaatttctatgttttttatgtagttcactcaaacggcaattcctgtgtttttcctgtgttttataaaactctgatttacatttatttttttatcagaattatgtgttttttatacctttatttttttcgatcctaccattcgaagtgcacttagttgcgaagtgtcattaaatttcgagaaaccacagatcgatcagatccaagtccaacgatcaactactccacctcccgctacaagccttcagcgcccaaatcgagtgcctacctttatctctcacctttcgcaaatcgcagccggccgccgctgtagtagcaaacatctccttcgtcttccctacgcgtccacccgaaaaagaaaaaaaaaagaacaggagaattatccccacttccagagtccaaacctccccgtccatggcgacggcgagctcgatccggccgccacgcgcggcgctagtcctcctcctgctcgcgctgtccttctccctcaccctcgccgcccacttcgagggctttggctccgacgacctccactccgcccacgccgacgcggcctcggcagacgacgaagacgacgaggggctcgacgtcgagctcccgccgccgccgcgcatctccctctccacttcaactccttcccctcccgtcaccaccaccaccaccaccacctccgctccaaaccctaaccccgatcccaacccgacgctgaccccgccgaaccccaccccgacgctcgatctctgggacgaggacgagttcgagggcatccctgtcccggaagcggcctcctccgacgaatcctccacgccggcggaagccgccccgtcagatcccgcggccgatgccgcggccgaggcggcgccagccccgccccggcggcccgcggagctgctccgcgcgtacaccgtcgagatcgcgtgcgtcagcttcctgatctgcttcctgctcaactacttcaccgggaagcggcagaacgaggcgatcgcgctcgcctgggccaccaggttcgccaccagggactccatcttcgacaagaacttcagcctcctcggcaccggcgacggcaaggacacgccgctcctgatgaaggaagggcaggacgtgttcaagttctacgcgagcgggaggcggtactgccaggggatgctcgccaccatggagatgcgcgcgcggcacgacctgctgtccaagctggtggagctggtgttccccaggaaggacaccatcacgttcgaggtggtgatgaacgaggaagccatggaccacgtcatgttggccgtggcgaggaagaaggcggccaagacgatgcagaaggaggagagggatctgcagaaatttgccggggttctgacctcggcacccgccgggaggagatgggttgcggatgagcttgcggtagtggccgagtcaaaggaggttgctggggatatgattactgaagccgtgctggaccaggtgatgatttaacctgcttacttatttttagaattgctgtttttagcttcggtggtactgggtaaatggttcttctggtaagattgtacagatgatatagtgaggtgtcctgttgatgttgattcttttatgaaagtaatataggtaagtgccttctaaaacgaaacggtatatattacaaattatcatcaaataatttggaagtgagaaaggtgcaatattcgacattcgagaaacatctcactcccttcaattatatcattaatcactaacttcaatatggatgaagtgtaaaggaattaaattgtgaattgatctgagtttcttactttttgggtgaattggcaccaattggattctattatgttcataactattcttgtaccaagattttcccagaatagtaactgtggatcaagtaatgtgatgatggcttgtattatcatttcattatgtttgtaatttaataatatcatcaggcttttgcataaggcagtgttgatattgaacatgccatatttgtcttgggaaagtcggggtactgttcctagctgttgatgttttgcacatttggatagcgaagaacttagggagtaccttgaatttttgactgctagagttctaccaaagtcgccatctatatcttttttaacgactgaagtagcctgtcttaatgctatgataaagaaaattagatggaaggtttagtaattaaggattgacatagctttgctcagaattttgtcatgggctggctcaatatgatccgcatgtctttagtaagactgagcaatgctatacagtggcatacatatataatgttttacaacctgtttctctgcaggtccttggtgacaaagcttttgagaaatttgggaaatggttcatctcacttcatttttcagatcaactggcaggctcttacaagaaagtcctttctttcaagtttgtactgccagatgcaagcaacatggctgagatgacaagattagttgctctcgtgccatactacattgatttggtggggcgttacaagctcagcaaccatgtgagtatctcctctatctttgttttaggccacaaccatttttcggttacagtgtctaattcttcttattcatggtaattgcaggctcgttccaaaactgaagctgcaagaacaaaagcttcccaggaggctttcagggagcaacagggtctaaggcaggaagcccttcaaaggaagaaggctgagaagaaaaaacttatggaagaggcagaggccaaattgagcgccgaggcactccgcaagaaagaggaaaaagaaagggctcgtcagatgaagaagtccatgcccaaagttaaaatgctccgttcctagtaacatcaaagatatatcacagcactggctttagctattcagttgctgattagcttattgttgcctgccagactcttttatgttcttctgggccatcaacttttctttgccatggggggatacaagcgaaaggaaataggtgaagataatcttttgctgttgtttcagcttgtcgcttgttgggggattaatttgaaacgctgttttccttgtattaatatacgcaggctggaatggcgtcaagtttgatttgcccccacgatcgttcattttagttcatctgaatgttgttatgcagcagctcgtttgtaagagaactccatgacttgctgtgtaatgcgtttatagatacgctgccagaaactcaagactagatcacataatttgagttgatttatgagtaaatctcatctatgcatgtcttctactggttgaagcagtaataactgttgggattgtcgtatactgtgttatgcagcgctgtttggcaccgctctaactcgagtttttatggagctccagattaagatcatcactgttctttactttcgtgtaaaatcagattattggatttctttattcataataaactctattttctgcaaaagttcttgagttgcagtcttgccaaacagagcctggtcaccaattgtcaaataacagatctgcctactcatgctgtgtttttcccctttgctacctcacagttccttttttttttgcacgcgcgctttcgcttttcaaactattaaacggtgtgttttttttttcaaaaattcttaatatgaaagttgctttaaaaaatcatactactctattttcaagttcttttagactaatacttagttaatcacgcttggatttgtctacttattaagatatgttctttccccttctttctcagctcatcttcctctttccttaagcatgccttttcaaacggctaaacatcctctttcgttaagcatgctttttcaaactgctaaacaatgtattttttgtaaaagttttctataggaaagttgtttaaaaaaatcatattatctatatttaagtacttaataacaccgggcttgtttggtttgctatcatgccaaaatattggcaataccaaatcattggcaaattttggtagtaacaaatgttttggcaacttatgtgtcttattggcatattttggtagcaaaccaaacactagccaaactactatttaaaataccaacaatttggtagggcatcattttagcatcaaaccaaaatggcccaccgtttctcgtgcggggaactcagccttactatgtgtgtcatccaacatctctatgataaattttggagaaaatttgcgaaggtaaacgttgcaaatatgcaggcaaccgaatcatcgcaacaactctcggcagcacatctcccctcttcttcctgagtactctgggccaatctgccgccctccgccgcacgcgccatccgatggaggaggcgcaggccgccgtgatggcgcacctggaccaggtctcgggcctcgtccaggcgctctccgccgagctccgccgcgggatcggccccgccgccgacagccttctcgccttcgtccgcgccgtcgactggacggtaactaactccccgatccccagattagcggagatcaccgatttccagccgccgcgccgcgccgcctcctttctcttttgctgatgattcgcgtgccttgtgcttgtggcactgaggctatttcaggaaccatggctgatttgcttgatggtattccatgcgactctgttgctcacggccgtcgggttgaggaggaatgccaatttccagctcttcatgctgtttcttgcctgtgagttttcttgtttctttttgcatatttttgcagtatgtttaggactgagacattgtcgtcggagaagagaggctagggtataataatattttggtagtataatcttccatttgcataaaccgaaccttgtcgtagtaattgggtcaatagcaactaacagtttaaccgagttactgcatttgcttaaactttagcacatacagcgctcacctagatgctgctttgagcacaaagaagttaaagcagaattggccactaaacctttctaaagatgtgatgccttggcagttggcacaagacaaatattcaggatatcgcaatgcgaactatgataagggtttgagtggaaagaatgtgataaaattatgtcaggaggctaaaacttgtaatgtgaaaggaatgcataaggctgaaacttgtaatatgaaacagagggagtgcactataaatgatcaacattttattattctgtcaataatgtagaattagagtattcttggtgtctgctagtgtgccactcaaagtctactacagagcttgagtttgtggctattgtgagtttctataattggtatcttctcaattctgatattaggaagagacaacggatatctcaggacgttaggtggcagtaaattatctagaataaaaacctggttgtttgattgatcagagtaggctgcttggtttgattaattgtctgattggttccatggttgcctatctgcagattcaggagtttatcttgctgaaaagataaatagctatatggcagagcactggaagagcattgccacacgaaattacttcgaccgcgctggagtttttgtttctgtcgtctggtcgggtccccttatcttcatatctatggtcattgtggttagtaaaagaccttccattccctgttattaaagtccttattaattagttggtgttatgctctctatctatttgcagttcatcttgtatgcatattgaacactttttactattccaggttagctcccttattacattatgtcggttgatggtgaaatggaagagagcagaactaaggcatcgggctcagcttgctcgtgacaaacaggattgactgaaaggttccttagtctggtagaagaaatgattagagacatgcgtcttctagaattgtaactgttggtgtttaatcacctgatgtttttcagttgcttgctgctagtaacttactgcgtcggttatattctggtgttcatgaactctagtaacagctaaaaacagaaatactagacccagtatctgatttcatcatgttttggttcagtagccacgaacatggatgtgtaattttatttaaaatcgattgtgataaattgcaaactgcatccttgtgctagctgtatttaccgtgaaattatacatggcgacctcttatagttataaactaaatagagacaagttagtgggggtacccgtgggtggatccacttccatccctacctctccacagaagtttcacattagctaaatccctcactgatcccctataaacattgtaaatgtagttagaataacaaagtagtgcagagtagaagaaatgcagaaccagtaaaatactgggaaatgtttagtaattccaactacagaaaattacagaggaattgaatcattgcatgacagcatgttacacctatataatttattttcttaggaactgatacacaaatatgaactgttgttgccagcattttacatactacacgtgaaacaattatgtgtatgtactgtaagcataattgccttagtttcataaccgtttagcaggcaaagaattcctgaactttttcctaaacaagataaaacccagggcaccaaggaaaggccaagatgttacaaaagcaatgtaagtaagcaaccaaacagatctcccctgcgatcgaatgagctgattaatggatatctttacaggagcaatagcatcctggattttatctatgttttgttttggctgttcctgtgatcctacaggaccttgggctggcgtcacattctcttgtgacctattaccgtcacactcattctgtatttctgtggcgattccatcctgttgcacaccaaccatgccattgcggagttccatttcattggaaataggattatctgagtcactattgttggcatcatcatttgtcaccgcagttaccatcccatcttccatgaaattcacatatgggcttttatcaatggatgattccaacgaagtgtgcaagctgtgttcttgtgcctgcattcaactacatgttatatcatgtattcatgctatcgtacgccagtttgcgatttaataatctctaccttttgccgatgcatgcaggggctatcatgtagagcaagtagaaactcagaaacagctcccacccacctaccaaatattcataaaggaacacactgacttaatcgctattggataataatgtatattgaagaaacatcacaagtgaaaaatggaggtgtgagtggaaagcggattaaagaattgtcttttcatccctgcccaattatatccccgcacaaaatagtataatttagccgcttgcacctcaaaatacataatttttgtgtttataaatgtatattacttctacttatctaaaatatcctacaaattatcaactacaactaaaacaagctttccccggtaatcgcaattccttacaaatatctattttcaagtttcttagaccatgaacagaaaggtaacggtactttgtccttactattcataataggggcaaacaacataccacagctttccagcagttagcccttgaaaaaaggcaagatggccaccgttaggtgcagttgccaaaacaatgtttttgtttgccctgaatcacacaatgtggacctcatcaatacacaataaaactttaggatggtgatcttttgaaagaaaagtaagcttacctgcattcgtcccagggaatggcctcccttgtgcaaagtgggtcatcaagagcactgatacaaagcaggggcactgacacattactaatgtaatttgcactgctgcaccgacggtagaatgtgtccactgtctgacaaatttatactgatgcaagttagaggcttactggtgttaaaagtagattaagaggcttactggcagttcaatttgaattttgcttatttgttacaaaattggatttgatgcactagcttatggtcaattctgatcacatccctttgaaaatcaaaggtggtaaattaatttggtccatttatgtttgaaccaaatagttgtatgttgctttgccagtccacctctaccttcaaatgtaattggaacagcacaatgctatttgatttgatctaagtatctaactcatgatattaagcaatgctaaaatatttagcaggtacactagcattagaaagaatacctcatattttgcaaccacacaagtggcatgacggtcgaattccctgatagatcgtgactgaaaaaatgaaatagaagatgataggataagtacaaatttgtgtaaccagccaattaatttaaagggacaattgctcttttgacccttaaaagtaatctactgtagcctctgtgaactacaatatataacccttttttatggaaactgaaacaacactcaatactttgtcatggttcacagggaaagttccaatgtacagtacatactatatacacatgagataatagaacaacagggtcagtcagtcaatgtacctttctaatatcttcccagttagcaagtcttgccaagacgggttggtgtctgcaaaaacaaaatggggagaaaactcagtagttgagtatgaagaaaaagtgcattcaccatctttggttgtcattacgcagcacgggcttatactacatccgttgctctggatgatggtgcgagactgctaagcctaaacattttatcaggacatttgcatattcggtatattatgtatcaattaaattcattaacattgttagaaattacaaaaagtaagaaaaatcagagttaatgcagatggaaatgggtttaatggtctgaatgtaaacatgtactacctccgtcccagaataagttaatctattactagatgtggacatatcctaatactatgaatctagtaaggaggtagtacttcaagttattgtcctctaatcagattatcagtaaatggagtgtacattctgcagttgtggcacttgtactagaactgaagatggtaactactcgagagttagtgctgcaagaatttgctacaagacctagtatcttcttacggcacagatcagttacagatcacaatatgaaataccccgattactccaactatcacataactatgagaaaattccttcaatgtagtctggacctcactagaatagtcgagtgccttaacagttcagctagcaacagctatttgctcttcaagtatcagatcacaagtttaagcaacaattcatcagaaaggtccaaacatttccttagggctcacatgggattggaaactcatcagtcaccatcaaagcaaagccataagggagatgtggtctacagtaaatttctcgagagtaagaagaaatacaaaaaaacaactgttcagggaacataaacttcatatttactaatttaatcattcttggttgactgcaagcagaagttctttactggacgtcccaccctctcctcattctcttatttgatatttgtcaattagtgctggtttctctcctaccacttaacaaaaagccctcttgaccctccaaatccccataagacagcacttgacgataggcaacgagtaagaccattatgtgggttctgtcgcaatgagcaacatgatcacaaagccacactaatcaaactgcttgtacctaacatataaactctaacccaggatactagtctacaattgtccacaagattgtatgggatgcaggcccttgataccatgagctcaagaatagtgtctcatcttgatttgtccacaatgaaattaattttaacaaagatcataaacacacatttcaattgatataggcaagaacttggatctttagctaaaggtgcaaaacgcaaaccatcattgccattgtattttatttgaaatgcaaatcaaataaattgaaaaaggatttatttgataatcactaaaccttgattagcacaaactatagtaattcaatgaataaaggttgtggcaagttgtatacaatgttagtcttgtttaaatgcttagctggtaaagaagcgtaatgagaacatacagttttgcatatcctttcagaccaattgcaagagctttgtcataacatcgttgcacaagcttgcgctgaataaatctgttggtcacctgcaatattgattgatataacaaaatattacggatagatgtaagaaaacaattaagaagtattggtgtgaaatgaaacactagaagaggatattatttgctatttgttatttcattaagtgagacacagcgaaattgttagcaaacaaaaatataggtatcataatgcaaaattgtgtttcaaaacaaataaacaattatttatgcataaaataatatctatagaaccataaaaaaaaattcaaaaaaaaaaaaaaactgtagacgctgaccagcagatcccagggtgagcaaatagatacagcaccagccacaggggtaccctcaccttcttctccgagatacttaacctaaaagggcaacagatgaaaacaacataaacaaattgcagctcacttttacaatatcaactacagtgtatagcagagtgcgtgcatgcgtggagtgagagcaagcaagagagattatgcaaaacaaaacagaagatcttaagaacagacaaagtctaccagaatattggcacctatgcttgtcccaacagcaaataatggagcctgtggatacttctgatgaaggtaattgacaatctcacggaaatcttctgtccatccagcattgtagaagcaatcagactgcaagaataaatactaggttgaggaacaagtaccacctgaacatttttcatcaactgctaccaaattgatgattctgggacataattttcctggagtcagaacatgtattcaaggattttctaatttccacatcagcatcattgattgatggtttaggcctaacaccatttcacccattttcactttcatgcacatatcatgtaatagactgggaatatggaccacatggttcaaaagcttaataaaaaaaaaatgttcaagtggttcaaaacaggaatatgcagtgtctttacatttgctatcaatcctaatatctaccttataagacaaacatgaatcattcagctaacagaatttaagggagcacaagtaacaaatgtgctttccaccatatttaatcttatgacactggttaattaattgcttgtcctcgtacggaaggtgcagatcgacagtaagcttcagcaatgcctctctcgaaacttctgccctgtagttcattttatcatccttttgtctttggactttagtttagacaagcatggctattaaaaccaatcagttaaagcagatgacaccatcgatttttcaatgctgcatatcactatagaataggaggaaacttacagttatggagatgccacccagacccctatgattgcctacaacaacattccaccctttgcttgccatagaaaagaccaagtgcttcacatactgcaacagacagctgcatcttgtttagaacaattagggaaggtagcccaaatacctaaaattgattttatggaaaattccagattgtgtttaaaccaaagtttggtagagaaatcatagggacttacagcagcagtagaatcactagttaatccaggtatcacaacaacaagaggcgtcgaatcatccctagagataactccatcacaaaaaccaacatcttcttctgcaacatagaactaactatcaggcatctctagcctattgatctgaagctatccaacaaaaacatcagcaccttcacaatcagaggctagtaaccaatccaaagcaatggtcccaccatcgcgaactgtgtacagctgcctgtgttatagagttcaatgaatatgggaaactaatttcataactaagaatttaataaatatggcaaactaatgtcataactagctgcagcaccgttccaagtttaatttgtaatgtccaaccaaaacagaacatgagtctctaccttatagtagctgatcttactgaacttggaactggaactcatgagaatactaaataccaatatatatcatataataataaaggaacagcatgccgcaattctgcatataccagatttcgcacaaaagtttattgccccttatttttatacaaaatggtgcgcaacaatcataacttcatagggaaaaaaggaagctaaaaccgcacaagcatatccatattgagaagtttcaagtgataccgttaggccattgagccatcagaacagtccattaacatctcataccaatgtacaatcaaacaaatactcacgttggtgcagagagaccgtagacaaatgcaacgagtaaatgcacaattccaagacatgaatttactcctacctcctatacgtgaacgaagggggtctcccagagatgctcaggaacagtgtctgcaaatgagggctcgcaagccacggcgtcgccaagtacctacgcgaccgaccagcgttcccgatgttagcgatgacatcgcaaaaaaatattccgacgaatccacacaactcggagttctctcatctcacctgccatggagggagcggcacttggatgcgacgcggtggtagacgtgggaggcggggtggaaggtgagcgcgacgcggcccccgcggaggccgcggaggaggtcgccgatgaggtggagctcgaggaagcggtacagtaaggcgcaggcgaggaggagggcggcgagggcgtagtgcgccggcggcaccagcgccgccgcgcggagcagcagctcggcggccgaatcgccggcggccgcgtttcccatcgggttgggggggagggagggacgggacggagttggatgccaacttgcgaattgcgattgcgagcgatggtcagacacgtgagcccgtttcgtcggttaagaaatgggcgcttggtggggcccaccttgcgagaggtattccccactgtgcggagctgggaagacactgactagtgggcccatgcgtatttttgtcgtaaacgattattgttactacttcctccgtttcacaatataaaactttctagcattgtctacattcatcatataatgaatctagacatatgtatgtgttagattcattacatctatatgtatatggacaatgctaaaaagtcttacattgtgaaacggaaggagtactacttttgcgaatgtgaataacaaagcaaatacgaagacagggaaggtcttccacaggtgcaaactcagcaacatgaagacccaaaattctaaaagagaataacattagatcaacacatagttatatatagtatcaaatgatcttgttatacattagtgcattacagccttttttttaatactcattacaaacttaggatacaagctaaaagatcattgtatccactggggatgtacaggtgttgcatctcttattgttactaccatatagtattacaaccatgccatgagatgcacacaccagaaacacttgcattacactaccttatcagctaggccggtacactacacaagactaaaggtgttcattgtgccagtgccagccccgggtccatggagctggtatgtctggcttggtacaacctgaagaacacctggttgctctgcaacaaaagaggcaggagccaaatcagacgtaaggatacaaacagaagtgcaaatggcccaagtacgattcgcactattggcgactttagcatacatacttcagaaacttaaccaaaatccaaagaaatcatgtgccgtattgtaatctataaccacacgacactggcatgtacattagataagttttacttgattaatgataaaaagaacagtacactaagaaatccggtagctgcttggtcatagatagcgtatatgtaagatcgaatcatgttagaaatataagttaaaatggtattaataaaatccacggtgaaaagaaaaaccttgcatatataatcctagaaaatgaacagatgcaagtccagttcataaggaataggttttatttgcaaatatcttatcagtttggcaaatacttacaataacagctaagagcatcagaattcacaaatatccttcaataggattgttcatactatatgggataagtaggatgtaaattgatacatcctggtctacaaaggaaatattgtacttcctggttccaaagtaccaaatattacatgacaaatatgactgaagcacattattatggggcaatgaagaattagttatagttataatgtacaatccccgaacaggttcttagtagcttacaatcctatgatttgtgagtgtgcacttaagcctgaacctgggcttgtgagagaaaagaatgattgctttcgcaattattgcaacggaagactacagtgtgaaagaaactttgataaccatcaacattaccacagaacatcaccaatcaatcacacctaagtccaaagatctaaaagcttaaggatcatacttaattttactcaacaagatggaagttattcagtacggccgctgtattacagattgacaaatgatacatttatgttccaataagaatttgagactccgatgttcatccattggtttggtgccagccaaaaaccagatttattcctctcgtttcattttccagatatagaagaacggtaaacgggcataattctgaaagaaaaataggatagagtactcactcttgagctcctcgacctgctggggagtaagttttgcagagaaaccgcttgcggcgtgcttgtagtggtagagcaccgcctcctttgccttctcctcgctgcaatcaaccaaccccaaaatcagcaaatcgccatacaatccacacctctcagaaaaccctattcctacccagtatcaccacggtcatattggagctaatcgagcccccagaaggacacaagtttctatctcaatcgaaccaccggaatccaaactcctacaaccggagcaacatagatcgcacaaatagtagaaacaaccaggcgggggatccaaattccgcgagtatacctgccgaggacgggggcgagggtgcggatgtggaactcctcggggtcggcgtccgcggggcggtccaggtagacgatctgcacggtcgcctcctgcgccgcgggggccgcctgctccggctgctcggccgacatggcgatctggggaacggatgctgccgccgcgaggaagatgaggaggaggattgggaaggagttgctgagaacgctcgaggatttggtcttcatcacccgtggattccgaggtcttaatagccgtgatattctcgttctcttccgcgttatcttggcttgatttgctttgccttctcgacgaagtttttatttttcttcttctcccccacaagtttttgcagtttggcttcacaaggtttggtttattctataaaaaggttttctgtgttagatttaattgaggaaaaaaaggttttcttctgggataagaaaaggggaaaataaaagaagcttgtatgattatgaagcttttctcggattacacctcattctctttcatattatctgtttgcttattaggtaggcagagtcaccacaagaggaagaacttttttcaatgggataaacacatggcatgatttctcatattttttccaatccgtgataagtagtgtgatggcaattcacaagtattgaaaatataatggttttgtttgaagccaatggtaatgcaaatgtggcaaaatttcttcacaatggaacgaaatttgacattattttttttaagataataaaatataatcctgacctttgctcacagaattacagctaattattaaaaaaaagtttcaaacataatcacacctcaaaagaagacataatagggacacatccaaactgatagagacgcacaccggtactaacaccaatagaaaaaaaataaaacgcacatttattgaattctatctgtgaacctccagccaaaattggcaaaaagttgcacaaccgttcagtctcattgtttaataagccaaacggcatatttgcaaacgagaagtatttgtaaacaaaacttttatatactccctccgtcctataatataacagattttagagggatgtgacactgagcctgtccagattcatagtcctaggaagtgtcacatccctccaaaatacattatattatggaacggaggtagtatgttcttagcaacctaaaagctaaggctgaaagataaacttcaatgaaaaaacaatccaaaaatcaacttcaaatttaagattgaaaatttaaattttcgttgataagcataagcataagcgaaaagatgaggccggttgactccagtttgcgacatgcaacttttattaatttagtgtcatcatcacacttttgtagaataacctatgatcgaagccaatatgttacactgaaaagtacatgcaaataagatttaaatgatattttatgaactctgatatcatatttataataaactaaatatgagcaatatatctctctcctatcaacaaattgatagtttcaaattttaccaagattttaacgctactaagtactaacaaatgggtacgtagagaaccaaactaccgaatgacgaaacaagaacattaaacttgtaaatcattttattccaataataatttgaagagcctcgtataaccaggttcatatacgagaagagtagaacagtgtgctcctctgctgctctgcatctcccaacgaaagcaacacaatcactcaatcagggtgtgaatgatcctgccgtccgctacgagccgaggcaatcaaatgaccgtttgatcactactatcccaggcccagattaaggcgtgaaaagtctatgcgaaggccccagcttgggcccagccatctgggccgcttcatgggccgtagaacaatcctacttactcgccgaattttttttatttataattttttttattaaaagttttacaaaaataattttccattttgaaaattgacggaaggagtcgcctaccgccttaaaaatcgccctctcagagggcggcgaaaatgacgtggcagacggccgttcgctctcgggcgacggccgtcaacgaaatttgcaggcggcccccttgccgccctccgctagggcgattttatactgtgcggggggccgcctgcaaattggcggcgagggggggcatggaattttgcaggcggcccccttgccgccctccgctagggcgattttgtactgtgggggggggggcgcctgcaaatgggcggcgagggggcatggaattttgcaggcggcccccttgccgccctgggggagggcgatttttgcctctccccctataaagcccagtccctcctctgtgaaatttcattatattcacttaaaaatccaaaaaaaacaaaagagagagaggggagggcagcagaaggggagcggcgaagccctgctggttcgctcaattcatcacaggtatgctcccatacatcttttgcatttgtactaatatgttatgtttgagtatatatgttgcgttttagttttagttccatatattttagcacatctgtagcacacacacgatggggacttactggtgtcgacgtggggttagtgcaacttcgctgcgttataagtttatcagtcgtctttttttttcttcacataacatgtctaattccgatcatgtttattgcagcgtcgttacgctcacgtccaggtgagacgtggttacccggacttcgtgttcgagtttgaccgtctccagccgagcgacgtcatctgggagccgtacacagaagaggccgtcgctgcgagagcaccgctaggactttcgtccttgtgcacacgcgaccaggcttactggctcaccatcctgccgatggtgttcgacattttcgttgagcctcactgcccgcagcgtgtgatgagacagttcggacttaggcaggtgtttccgggcaacgtgcagccgaccgtcctccctgccgaccactcgtgagttcggattgttcatttctaaatttttatgataattacttcattgagccatataatttacctctcttcacaggttgactcgacggggacagctagcaggcgcactttgggctccacgtgtacagcagtacgttgacgactgggtgttagctacagaggaggtgatcaacgagctcttcccacacacggaggagaactaccgtgactaccttcgttggtaccttcctcgcactcgtgcgcgtgtgaccttcactccagacgccccagagccgcacgttgccgctgtcacggacgcgtatcccacgcaccgtgaccgagactacttcgtggcggtacatccaatttgtattacttcttacaattatttcatttatcttgcataatataggacaactactgaatttgttatttccatcttgcataggctgatgccgcacgggatatcagtgccgatatcaccgcagtccaagtgaggttgaacagaggtttgcacttgactgacgttgagcagagggtgaccttcgaccggatgcaggagaagatgcgtgcggtcatgcgcgtcttctcctgtcgcagcgccgtggacgtcgtacctccagctggtccggtacaaccacggcctcgcgcgcctaccgtcggagcaggacctcgacctacggcacctatttcgcacggtactgctcagcccagaggtttcttaagttttgtttctatttttgtacgaaaacatcaccccgtcataacttgatgatccatcctcgcaggacctcgtttgccttcgagcgcccctagcttcggatcagtgcgacctacagcaccggtttcgcacggtacagttcagcccagatattagttcatttttgtttcagcttttgcacgattatgtcaccatgttttaactgcacgtttcctcatcgcaggacctcgtctgccttcgagcgcgttcgcaggcacgaccggcgcttccacgagctccgcaggggcgttcgccacctcttcgggcgcgttcgccagctcttcctctcacggagcgtcgatctctcgcccacacggtactttactttttattaatactgttaaatacctgtacgaaactgatggtccttgtccagcaggatttgcagccgggatcttcggtactggggcctcttcgtctcacgccggtaggactggtcctactagccagttctacgacgacgacttgcacggtgcagaccaccacgacgtactaggctcctctcagcttggaggagctccagaggcgcacactcaggagcagccagaggtcacacctgtacaggcaggacgggttggccgtgccgtactcccggaccgactcacgtactcccacgggcacattagggcgcagggtaggagggacaggggtaagaggcctcgtcagtagtgttctacctcttcagtccttatgtgaccgtttcttttggcttacaaacttgtaaagcagtactacttttgctattactactgcagtactacttgtgtttgtctcgtctacatagttcttttcattcatatggtgctagaacaacttatgctcacgacaacacactttcggcgctgcacggtagtgtcagatccagtagcgcgcacagtctacaacagcacacatgaaaagcggcagctcgagttatcactatcaactttcggcgctgcctgtttacataaagtgaatcacgcccacgcgtgatcgtcttgtcacatctaatgaataatgtatctcattgagttcacatatattgcagtgaaaacgacgctatataattgacaatctgaaggcaacctcttcatatcttctttcccactagcacacaacacacgaaaatggaagcctatttattggtaatacgtaatctagatttgagattatgtagaacattcttcactacaattttacattttggcagcaaaccaaatatgatcaaatgcaattttaccttaccaaatatttggtcgtgaagaaaaatttggcactaacaatccaaatatgccctaaaaattaataaaatatttgtacggtaacaaaatatttgtacggtaacaatccaaatatgccctaaaaaataataaaattgtattttaccagtcttggagattttaatcttgtatagttttcaatataaaaagatttgataactattgatatttatacaaaaatatagagcacagtacaaaatcacccttgcggagggcggcaagggggccgcctgcaaaattccatgccccctcgccgcccatttgcaggcggccccccgcacagtacaaaatcgccctcgcggagggcggcaagggggccgcctgcaaaattccatgccccccctcgccgcccatttgcaggcagccccccgcacagtacaaaatcgccctcgcggagggcggcaagggggccgcctgcaaatttcgttgacggccgtcgcccgagagcgaacggccgtctgccacgtcattttcgccgccctctgggagggcgatttttaaaaatcgccttcccagagggcggtaggcgactacttccgtcaattttcaaaatggaaaattatttttgtaaaacttttaataaaaaaaattaaaaataaaaaaaattccttactcgccatcgaaatctcgattcgtagccgaacggattacgactgacgggggtcggagaagaaaattccgaacccccaccaaccttcgcaaccacctgcgtggctgcgtggtttcccatgggccatgggccatgggcaccgaggaggtataatcctgctttggttaaagaccacaacagagagactccttagctggttcaagtgtctccaatttccatcggaggaggttacccatcggacgtctaataaaaaacgaaatatcggccgcctctcacagcccttagtagcagcgcacctagcactacatttaaagcgcaagagcatgcagctacatgtgctagcctgtgtatgcagcatgtacggctactagcactatattataatgtacacatatatttttattctttgaactcttttctcttaaaatatatatttgatatgtaatttgattgcatcattagatttgttataataaaatctttataacaagatctcatatggctatattttgatataaaaaactactgaaacatcatgaaatgcttattgcaacaacagctatatgtgacatttcaaaaacccattgcaacaaaaaaaaactttaaagtgcaacatagtccatatctaattgaaacatttgtttctcattgagtgaaacactgaattttaacagtagaaacatatatatttttttcgtcagaatataatcatgcaagatttaataacaacaaatataccacaataatcggatcatgaatcgcataattagtttggaagaaaaatagttttaaagatcatgtctcaatttgcatgttcctatatacttgcatgcaagttgtgcatgcatacggctgagtaaaagtaacttggaaagagaaaccaggaaaaacaccaggaaaggtaaatcaattttagactagtatagaggaggaagctggcgtccgatgtttgtcttcccgtcggacgcgcgacacgaagcattttccatttccatctggtgttcagttgcccatcgagatattaatgccatcgataaaagcaacttcctagtttctagaaatgccattgcacaagcctctttctcccaaaaataccatcaccgtcaattcaacaccattacaaccgttatttttttttaacaatgaccattttcccctcagtgcagaatatacccagtttttatggtaaaagaaaaagagagatgaaacagtgaaaatttctaaccctaaccctagaacgatcctgatccaggcggctctcctagcggcagctcggtgcagggctcggtgacagcgatgaggcgtcggtccacggtggcggcatggcggtccatagcggcgatggggcaggacgcggcgaggaggtcgcaggcggcggtgcggctatccatagcggcgatggtgcggggctcggcgacggtccacggcggcggcgcaacggtccacagcggccgcaagggagaggcgggtttctagcggcggaagcccccaccgatggctccgtccctgctcctcctcccagagaatagctactggacctcggagtggagatggcaccgccgccgtactcgcctcacgaaccaggagcaatgacattggcctcggggtttcttctttctctttgtgctcgcttcccgccgatgtccagtggtaggttaagtttcttttggatttctcttccgatgcagagatactgagttgctgcctctgcagtggtgtttgccagttgctcctcctcgtgtggaggtgcagcgcgtccggacgaggcgaatgtgtgaaattggtttgtgaatttgatttatgtgaatttaattctaaaataatttgattgatagcaaaattgatgtctgtatttagatgctaacagaaatatggatcaatgcaaaataatgttgtgtgagcaaacaatgcaaatgatgttgtgtgagcaaatggttgcctggggtaaaattgtcttttcatacaacttaacggagagatgttaataacagtttgactgtgatggtatttttgggagaaagatgcaatggcatttttaggaagatgcttttgtcgatggtatttctgggattatggtgcttgtcgatggtatttcatggattttctcttaaaaaataatctaggaagtcggtcgatcctactgttcatggtcatgccaaccatggcaccgaccattttggatggacctgaaaacatggtagcgatctatcttctttaggcttttaaccaggcaaaagctatgttgatgcacagatgcactccaaagagtactgctatacgtacgacccagttgtacaacgatagacatgcaaccatagatcaattaaaggagagcatcttcatatgcactgtggccgtttacaactattgatcaaatccaatcgtacgtgaatcggacaattgggtcgtatgcatagaaaaatttcactccaaattatccagattattaagagatgctttgccgcacacaatggaaaatctctttatccaaaagacaatcggatggattcatgtacaaaacatctctccttcagagtgaatcttaagatcacacatacatattcgactaaaattatgttccaagatgcaaaaaggtataatttagactacattgtatctgcagccagaattgcatacaacctaccaaacgcaaactacatagcgatgcaattatcaacatgcccgaccttacaagtagcaccatctagccgatgctaagtgctttcatattcggagtttccttctcttggacctcccttagaatcttgtcacattcatcttcctcttcctcgttctcttctggcccctcctcctcttcctgcatttcctcttcatctgatctgtaatcaatatagccatcgccgaatgatttgggtattttctgcgcttcttccatgaaagtcatgatttctccactagtttgggctgagaaagtagggaaatagtcattctttgtgaagtagatagattgtgcctcttctgtgagctccctcgggaaattcttcaagaaccatggatggttctttatttcctgcatggtgattctctatacaggaaaagaaaagagctcatcgaacttgagttctagagtaagaccacagctcgatatggctcattcactagtatggtttaccacatgccataattaatcaccacatgaaaataaagtcacttatggatatcaatatggaaaccgagataaatgttaacttgcgttcattaccttcgatggatcactgacaaagattcgtgatatgagttctctgcaatcagtagatatgtggacttgctggggtatctcatattgaattgcttttattagctgcaaacgaagataagccgccggaattcatgagtgtaaacaagaccgcaaatatattcacagaaatgccaatgaaatatatccatgagattataggactgagctatcaccttgacggtcttcataatattcttgggatcatccttgtcttcaatgagtaggcccccacaagcatgacatagagagtaaccccacacgaccatacatctgcaagctacaatataaaaatacacttgtcactaattaattaactgtgctgtctaaaaaacaggatgtcacgcccagaaattcccgaatagaattccaagcaaaatgtgcattaaaacccccgtcgaggaccggccggggtacacaaacgacaaagtcgacatacagatccacgtcttacaaacattataaaagtcttacataaatgcagcggaaaattaaaagataaatggagctaagccttgacttggactgcagcgggaacaccactccacatgcatcctcgacagcacggacgaagcctactcctcggagaacccaccatctgacacgcactcaaactctgggggtttggggaaaaatagagcaagactgagtacaaccaccgtactcagcaagtcataccggaatagagggtatgatgcaggatataattgaaggacagcttgagcggttcatttgcataaagcgagcatttaaagacggtagttgaaagcagtaaatcagttgtaataattactcaatattaaccatccactgtccaacgctacaccacgttgcaacaggccccaccatccacctgaactaatcaattccattacactagactagggtgaggctaatcacggtgaatctggttgaccgctcataaccgcgggcacggctattcgaatagtttcactctgatcagaggtgtacaactgtacccacaagacacagccccacgacacgtttccgtgtgccgacatgccaccacgacataccggaaagaggccgtgacaggacccttcgcataaccccctctagccaagcacaccacacctcaggtttcacccccgtccccagcgggcaacgggcagtcccctctcgtgcctaggtgaatccggaagcgacagaggccgtcgcagggcccgccccgctccatcacgcacacccttgcctggatgagtcaactagaggaaagctacactacaagcccagccgttgcccacgctggcttgtggtaagtacgaggaattcttccagggtttcccgcgaaccggtccttaagtgccatgggcgcgaccatcaaaaccatgcacccacagcccaccataaggtatattttaattgactaacaccaggacggcggctttaatccaacaccaacactagaacctgaagtctatgcattaatgtgatttcccccacggtgtgctagttgaactaagcatggctaagcaatccctagtccaatctttagtcatgttatatcccaagctaacaaaggagcatggtacaaaagtagcatggctgtaacagtaggtaaacatcccatagtatcattataaaacaatgcagtatttaaaggaaaacggtagagcatttgcaatataggatcaacatgttcaagtgacaagcatgacttgccttctctgctgctggaggaacctcggcgactatttcaaagtacaccggagcgtcgggagagccggaatctaagcgacatacaaagcaaataatacaaacatgctataagactactaaaacagcgaacaaaaccatttttaatggattctatgcacttttcttgatttactgagacttgaatgggcttaaacggagctcggatgaattagatatgaattttagaagattcgctgtgtttttactataaccagaaaaatccttaattgatttattgcgcaataattaaaatcccggggagagagagggcggcgtcgacatgcgggccccacttggcagtgactcggggggagggcggtccgcggtggaccgggtccacggaccggggaaggagcagcgcaccacgtggtgcacacgtggcgtcgacacggcgcacacgtggcggccacatggcagccacgcgggcggcggggttggatggccccgatctacccgagggtagatcggacggcggcgggagcgcgtggccggcgcgcacgggcggctcaagccggcccggcggccatggcgcacggcggcggcgcaaggcggcgatcagctggcggcggtgtcgtggcgacgcggacggcgacagcggcggctaagcggtgagagagagagagagagagaggaagaggaggaggggcctcaccgacgacgattgacgatggcgagcgacggagggcgatggcgacgacgggacgagctccggaaccacctagcgaacacgaagaaaggggttagagagagagagagagagaggaagatggaagagggcgaggacgccggccgaaggcggcagccatggcggagctcaccggcgcgcggtgcgaacggggttcccgcggcggaaagcggtggcggagaggcagacggcgtggcccttgggcttgcgaacccgacggcggcaacggcacggctcggcgcggcggctagcggctaccggagcggcggcgacagcggtggagaggagggcgacggcgctagggcgatagagggcacatgagagctcggcgaaatggagaaaaagagagaggggagagcgggggtgctttatataggctcgcaagggttgatcgtgcccgggatggccgcgatttcgccggtggagtgggaaaagggggagaggagagagaggcgggattcaaaaattgaatcctggacgtctcgagcgcgggcgcgggcgggaaagagagggagtgggcgcggggaaggcgggcgcgggcggcgatgtgggcaacgttgcccgggaggcacgggagcgagggggcggcggtggttgcgggatgcgcggcggcgactggaggttgggggaggacccgacaggtgggccccacttgtcggtgaccctgggagagaggaggggggctcgggcggccggctgggccgtggccttcggccggcccagcggggagggggaggaatatgggctggcggcccattgggaaaaggagggaaaaaggaaaaagaaaaaaaaaagaaggaaatgaattttcctgggattaaatactgcttgtgctcgtttttaattggttaaaattatttctagagctttgaaaattccactaaaaatcttgttagcatatttcgacatgtagaactcaagaaaaattccacatgccaattctgattattatttgcattaatttattagggtttctctcttgcttttacactgatattttctctaggcgatttataaattcaatttaggcttgggaaaagaaattcagggtgtgacacaggagtaccattgtaaagtaagagatatatcttctatctgagttttcaattggtgataacaaagtatgcaaccaatcagttaaatcattactaaaagttcatttcagccctgcagtgcttatctttccaaaactgtgtaactgtactatgaattaagagatcatagtagagtatagcacactaacgctggttgaacttctctcttgtttacaacattactccaaaatcatcttcaagaagaatctaacatgctatacacacaggaactaaacctatctcaaagggaaaaaaaacaatgacaaggtcatccacaatttgtcaattttagttagtgtaactagtaccatgattcaatcaatagtaactgtgttgaaactagaaacgatatcatactctgtaagtcaaaactattcttgtgatgaaagcacatgaacgtataccattattcgcatatggcttgctaatgtgatggttcttggtacatcaaaccatatctgtgcaatagtctaggttaattaggcaatgccaaagtgcttagaaagtaataattctatatctaaataatcaacttgtacttccagttccaggtttttgctgacatggaaagtattaatatgcatgccataatgaaaggaaaataagaaaataagccatatatggaaccaagataaatgacgtgcttctgataaatgttaccaaagaaacatcaaagtacatatcataggtaaacaagaagctatttaactcaccttcccatcatactcctggaggtttagtatctctggtgcaatatatgccggagtcccaactgctgatttgggccttgaatgcaacattgatgactgttagaaatggcaaacaattattcctgttcaaactaaaaaagaactaaaagcatgagcaaactctgaataattggagacaaccttggagtacccaaaatcacatatcttcaggcgcggagctgcgctgccatccaagagaacattctccagcttcaaatctctatggcatattttctagaaagtagcgaagatggttgcaatatttaagcattttttcaggtcccactcacgttatttgagaaaacatactagcagtttctactacacatactacagagcaacatggaacattagattattgaatgtgctgataagataagaccaatttattgtttatccataccatgtgatggcaatagcttacaccccaaatcaattgctggaagaaatatctggcctgcattgagtagaagaaacaaactttagaagcataaaactttaaaaaatattattgaaatcaaaaccagagattatatattgtgacctcatcctcactaaatcgctcaagatcgacaatccgatcaaagagttctccaccagatgcatactccatcacgattgcaagatgtgtatgagttaggatcgcctgtgcaaattgaaaacaaagcattgtttattttgttccacacggcatgggattatgagagaaaggagtaagatcaaaaggagatcaaacttaaatgcacccataaaaccgagattaaaccataaagtgattagaatgaagaagaaacatggtacattccacaattgtcaccttcaaatagaaaacacatcaccaaaacccatcaaactagggaggaaaaaaaatacaaaatcgaatccttacccattcaatattcatgctcaagaaactagtaaatcatggcatagcagacaattaacccagacggacaaaacaatgagtgaacaatccctgactatctgctcctattttttctaaaccaaaaatgtttgctcctcatcaacaagacaacaatagatacacacctctatgaactggatgatgtttgggtgccgcagcgaacggtggttgatgatctcccggtacgcgctcttgttaatctgcgcaaaaaccaatccaaagccccatcagaacaaccaaatgttggccaccggatccacacgagcaagacccaccaaaccccagcctacaaccccaaaaccctattacgctagtgaagagggtagaaggactcggacccggtgattgccgcgtgggatggtcttgacggcgacgagctccccggtgtcgcggttgcacatcagccgtgtcaccccgaagttgcctgacccgatgctccgcacctcctcgtacgtgtccatgccggccggcgcacgcggcaacacacccgcacctacctagtggggagctgagcactctgatctgtctctcacgctgggggaggccaccgccaccgccgccggggagaggaggaggaggaggaggaggggagatcgacgaatcggtgattgagggatacaggtggaggcggcgtgtcgcgtgtgtcgctttgcggtgcatggcgcggcgtgccaggagcctgtgtgccttatatataggcactggcgcactgcgtgtgggggccactgtcactgccattggcgtgtataggaagaaagacgccgacgaccggttctgtggcacgacgagtacacagcagatgcttccgaaactgctactgtatgcaagtatgtacagtacataaataggggcaatagaggggtaataagtctactgcacgatcgatcgctagtccaacgtcccgcgcgatcacacgatcctacaaccccatgtgcggatgcgtgtttgttggacttcagtttggacattcctatttaacaacccatatattagcctatttttatttctcaggcattttcttagcccacatttgttttcttcaatgaacactatcttgtggtttagaaaaaaaattgtctgcaaagccttattttgttttcccggccattttttttgaaacaacccgcataagatagtatgatgtttctattgataaagaaggaataaaatacaagcctatagtcctgggagactatagtcaggaaaaagaaaataaacaaccacaccacgcttatacgtctgatcctattgtttaaaacaaaacaagcacacaacactctcaaaggaatatgacttctaaacgacgtctccaagaaggaaaacgacgccaaaagcgccgccgccgttcgtcctaggtaaccaggacaaggttttcacctgaagaacccactgggaaaatagaaaacacggcaacaccccaaggggaaaacggcgcccgcaggcgtcgccgttgccggcccgaaggctaggctttcgcccgttgttctactctcccgcgttaaaaagtgcatgccagttcagcagaaccaccatctaatccccttcgacgcgcagccaccgcgccgacgcctcgccgccggctagccatcgaagaagagtcctaaccttcaccgcgcttcacatccatccacgtggttgggttggagagggagagggtgagagagaagaatggatcccctctcccccgcactcgctcgtccactgtggccatctttcggcggcaagccgccaccgtaagagggcagacgcctggaaggaagcttgccacaggcttgaacacccaccctcacagcatgaccgtcgttgccgcctcgaccagaccgcccgtgtcaacgggtgcttggtcgcatcgccgtcgcctccatcttcctcaccgcagccatcgcctcaccgtcaccaccgccgacggccttcaccaccgccgatccgtcgcgccgtgcagccgtcccctgtcgggagctgtgccacgtcgccctccgccgttgtcggccgagccttcgctgcggtcgccaccgcggcctccacgcacgccggcctccgcagcctccagtcgcatcgccgttccgcggcctccgcacacgtcagcctccagccgcgtctccccgcgccatc

SEQ ID NO: 10246 - DNA, 18925 bp, Oryza sativa
caactccactccagacttaactcctgaagcaatatttaggagttggaactgtaccaaacaggccctaaaaaaattatataagaacataatcctggaaggttaattataattagaaaaaggaaaaaaaaagcaccatgccctcacccacaacattgggaacttatcctctaccattgaaactagaatggcagacagctatagtactctctaccatgagccattttcagccgttagattagatgtggatggatgagatcgatcgctacagtacctaacagtaaattaatgccgtactaacggtaggtattttacattgtttgtacagaggtttttaactgtagctgtggtaaaacactgtaccatccctcacgttttactgtttacctctgccatttacctctaatggcagtggatgtgaaccccacaacacaaacacgtattgaagaaaaaacaggagcttagaacaacccgacaagctcaactttgtccacgctttgtgttggagaaggcgagggcgagaaagaatatatctgtcgcccacatagtcccgccaacgtggccatcgtgctggctaaaagcgccaccagaagaggacaactgtctggagatggaattggtaggaaatggatcatcaaacaacgcctccaagaaggttatgatgcgacaacactaccaccatcacccgtcttgaggatcagggcgtgattttctcccaacaaaaccatcaggaggaatgagatatgccacaacagcgccctaacaggggttgggctaccgcaaaagcatcatcgctgccgccccagaacgggctaggctttcgcctagcaatctttctacctcaacctgttgtgaagtcctatcgaaaacagaaaagaacagtcattactatctaaagcacatttgttgacgatcgttaagtacaaattttgaacaccaaccagtacaatgaataaaggaaaaattagcatatgttacatgtatatcaacaacaaataatgtagttgtattaggattgggaaacaaatgtggatgtagagaatatacatcaaagtgaaggagaaatgaagacaacatgtgaagaaacacacttccgatgaatcacgtgcgagcacacagattaaaggactcacaagtcagttcaaatcgactcaaagtggggccaaccacctggaaaccgactaaggggcccacatggcagcctctcgccaaaggcggttttcctggtttgaccgaactaggtgttcaaccgaacattggctagcaccgctcagcctgatcctccacgtgtcacctcctcctgcgcacctgatggcagttatgcacggctggcggaccaataaccgtcatataaccatcataagagtgctataaaaggagctctccctcacttgcaatacacacctcaaagaagaaatcccctcttccgctttgtattcagtttctagtaggaataaagtttagaatcttcggtccaatagtcttcttggagttctgggtatgtctctagtactttactctttgtgtaagattatagttgaattaatagaattatcttctttatttatttatgctcatggtttatatatttctttatttaatatatgttctatgaatagtatatactttgtatatatgcttcatcctagactttgtatattggtccatgctacggtaacggtccaataacctttatagattgatttaactccaacttattcatccgtagggtgagagtcttgggggagttagtgatattgtttacttgcacaagcatggtatataggctaaataaatgttgttggatccgggtgtgcctccacggaaagtgaggtaggtggcaggtggtgatagccatgtccgtcctttttattcctacacattcaagtatgacgtaagaatgcataaatgccataaccatgctggcagactagtagtgagtggtctctcggtagtatctgtgtgctctagaactaagtcctatgttgttagcatgtatatgttaagtgtatactagaaatgattagtattcaagtatatatgaatcgtagtttcctaatgataagtccctactagatattcttatagaggtgaatcttctgtgtgtgtccactaccttatcatttattatcctaaccactatttagactatggtgaattaattaaaggttgattaagagatataaaaaaacatatctttataccacccccttcgctgtggaagcacaaatacgatacccttgggagtactcgtgggtgaaatgctatagcgatatccgtgcgcttgcgaatttatatgtgaccataagaaataccaacaaccttcagctcacaatcaccgcaccaacactttaccgtcggttggccatcaggcaagatgccccttcccgagacagaacaatgtgcccttctcaccgctagactccatcaagccgtcaacacgctggccacctccagtttccccacacaccaccgatgggcctcactagcttacaagtcccaccgccattgccttgcactgctaccttcttccaacttcacccaagagggatgaccacacgctgtcgacttctgtatcatgccactccatggtgcctccttgctgaatgcccaaactccaggtaccctgcctcctcgctgcacgtcggccttcaatgcccacggccacccttgacaccgtggctacaccgttttacgcctctctccatatcactaccggccaccacgccatgtctgcagagcatatgcccaccacccacgtcgttctcgtcgtcatcaagagttgctttcaaggatctgtacctctcactggagacacacaggatccgtctagaaggacataagatctggccaataggatgttgatctagcatccccaccgcaacctctatgaccattactctgccatcttcaatcacagcatgtgttggctcggcctccaaccgtccactggcctcactttgtgtggatctagccatggagactcggatcccccagcgccacctctgtcttcacgattgcctcagagccctagcctaatagcacccttgagagtagaagagagagcttcaccgctgccttccttgcagccgcacggttaccaacgggccattcgggtgatggtgatgcagaggataggaggaagggggttggtggtagtggacgtagagtcgctgttctgatcgcccctagggctggggacgacaaataagcccgcttgaccctagagacactcccttcatctatttatttttggaagtgaagtgtataatcaagttatagctcttttcggcaaagatctgagtattttagcaattccttttttcttctagttatccttttgaattcagcatgtcttcaaatttaaatatctaacttctttttgtacaaatgggaagttaaataatactccctctatactaagatataagcatttcagctatttaaatattgtattaaaacattattacttctaggatagttattccaatacacaaaaattcaagcattttcaatcaatgaaaagcatcgaaagaaaatatatacaattaagtttattaaaaaagtattttgaaccaataggcatgagatctgccttgattatattaagaagaggcgaaatatgtcgcaatggtttgcttagaaactacaagatttaaaatttgacctaagaatgcaaattacaactttagtttataaaatgtgactaaaaagatatctctttctgttaacagtgaaatttggtaatcggcaaagacgtcatcggcttataatcattatcggctgcaacatctcggaatcagccgatgggagttatcaagtcgccaatagtaagattcctgctatattcggttaagaaaatcaatctactaaaggaagcttatccctaagtgaccaagtttaaagaggatgcggcatggcagtttatctattaattaggaatagtttgttagtttccttttatctttaggaaagtgtgtttagtgtccgataaggactttacattttccttttatctttaggttagtttctttcttgtctgacaaggacttgtatcaacccatgggtataaatatgtacacccggggtctatgtaatctatcgctacgatcaatacaatttggcgcatcgccaccttttaccatttctacttttgtttttatgtttcggcgtgacttggcacctgatgcggggctgcatcggtgttcgatctccagctaaggggtaagtccaatgttccgccggcccaggcaattgtatcgtttacgtcggcgtcgttcaaggctgcatcagtacattcgacctcttggattgctctggtttggatgatatattttcctacctatttatcatatgtctctgttaatctagtcttagcatatcaatttagctctatcggctgcttctcgttttagggtttctgccggtatcggctaaatcgcattgctagattagattagcttagacatctaccaccctgaaaactcagtcaacggcttgattgtctagatatcatgtttcttttcatacttagtgttgcatcagttaagtttgatctagtaagtcatgcttagaaccataatctctagcctacttcttgattgccaataagggtttcatcggggtttcagccggtgagttatctggacgttgcatcggctcataaggattgcatatacatataagttgtattgagccgatgacaacaaaggtttcactgtttaatctaatcttgtggatttcatgacatcggacctccagccgatgtgtgatttaaccttcggatcgatgcttatttatcatatcattgctagccgattggtttatattggattatattgttattttattacatcatcatcagccgattgcctttatatcattatccacattgtacatatagccgattgcctaaaccctatcgctatcggctggtatcggcatcagctattatcggctatcggctggaactactccatcggcttgtcagccgattggctgctttgatctactatttgcatatctgcaacttgtcagttgcaggatcaaactgactggcacgcccgcatctcatcatatttggacctgcactggagttaagcagatctcccaggccggtgtgttcgattttttcgtcaacactttccctcaatacaacccccccccccaaaaaaaaaactaaatcagatgcaacaatcctaatctgacattgtccctgggcttcactgagcccacggccccgaggcccggaccaaaactagttgatcatctttccgatgtctccaactcagtctgcttgctccttcgcggttgccggagagagacaagcgagcgacgagccaggctaccaccaccagcgccgccgcggcgatggcggtggagatgatctatgatgtgaaaactcgcccatcttccgcttgttcctcacccagaggcggcgcttcgcttcctccaacaataggtaagtgatgccccgcccctcccctcattccttcttccagaaccataatcttttgcttccgcaatgccctattgcttcaaaactcaaaaatccttcctgtcatgtcattggaagtattaattttgttttatcaggctgacagttttgcccaaagcaaaatgttactccctctgtttcaaaatatagtaatttatagctatttatctagacaagcatttcagacatatagctaaaaattactatattttgataccaaggtgtagttaactgctaaacggcatgacatttcataactgtatacacaatggtacatttcagatggttagtaaatggcaattgcttttgtgaccgaagagtcttttttaatacagtatgtgataaagatgaatataccgctgacgggttactaggtttgatgacgggggacctttggttatctacgtgttttgagcatcgtacattcttaaaaaaaattaagtttgaaagatactactttatataccatctgactagaaaccctatcttgatgctcacatgctgtagaaggaacatgccaaattaacggttaggtttatatacatgatgttctgttggagggttggaaacctctctcctctgcacgcaaaacagagcaatagattaacgcatgattacttaaatattaacttaaaaaacttgaaaataaattaatatgatttttaaagcaactttcatatataattttttttcaaaacacgtaccatttagcagtttgaaaagcgtgcacgcggaacaaaatgtgtactatgttttgagaaataacatgtttgaaaagcgtgcacacagaacaaaatacgtactatgttttgagaaacaacatgttttggcaaaagctggttgtatatgatccaacacggatttgggcttttgccaactaaagggctaaggccagccatacaaatgggcttctctgcttatttttcttcaaacagtaaggttgttttgggcagaaataagttcatccgaggtcccttaacttgtcaatgaatctgatttccgtccttcaaccggaaaaccagatacaaaaccagtggaaaataagtctcaagccagtttagacagcggtttcagttgacgtggtgctcacatggctaatttaactcggtatttatctgacatggcacataaagcaaaatttaacaatttaataaataaaacaaaatatgtgggcccacatgtcagtcaaataataagattaaaaaatagtggggcacatatgtcaatgggccccacttcctccacctcatcccctctcaacttcttcctcttccctagatgtggcaggcacatgcatcgaccggcatgccagcgagcgatagcggaggcgtggggaggctggcgagcgggggtggcaccgggaggcatggaggtgggcgagccactcaccgtgagatggaaggcgggcacgacgactggggaagaagacgaccgctaacacaactccaccgccctagacttgagtgagggccgcacttttgctccccctcctcccctcttcgttcccccatccacttctggttgtggcccctgacgtggctcagtcccctcctccgcctcctccgacgtacggtgagggcggagctggagcctgtctgggcatcgcgccaccgacgctctcgggcttgtataagggaagaggaagagaggttgccatcaatgcgagcgcgaccgacagggtgcggccgaagaacacaacggccaagatgggacgatgcatcgctcaagctcatcagctccctctccctcacctccatcctctcctcatcgaggaacctggccaccgaccgtcttctctctctaggcgtgacgcccatcgtctctacttgctcctctcctaacggccgctttgcaccaccccttctccccactggccaccgccctttccccgccgctcgtcagccgtcgtgcctagagagaggagaagagaaaggagaggggagagagatgaagagaggggagatggggagatagaggaggaagaagcccgccaggacagaggcgatagaagaggaggtgccacgcccggaaattcactaataatttccgaactaatttgtgcataaaatcctcgtccaggaatcagccgaggtacacaaactgataatttaatatacaaatccatcataataataacgttacatacttacaaaagaaaagaaaacagcagcggaataacagtctagcgatggcttcagctccactcccacaggcagctcaactggggtataagccaaacgtcttctccttctggatcctttttctttaattgaggttgattgattattgcaagaatgagcatatgacatactcaacaagccacacagcaaatatgcaagtgcacaaggattccgaaggatggcataatatagggttcatttgcgaagacaacatttagcaaacatttaagagaagtaaaacagtagagtaattaatcatcaattttaatcaacactgaatagcaccccaatgctgcacaggcccaaccaaacctgaacaaccaaccccggtcgtacagatcaaacctccaaaccaggagctaaacaaattattaccagttatagcatcaataattatttgtgagatgtgtgagactaatcacgaaaaacattgctcaacccgcccataaccgcgggcacggctattcgaatagttttactctggccagaggtgtaccactgtacccacaagacacagcctcaacatcatgtctaccatgcgtcgcgatactagaaagtacccgaatagaggctgtgacaataccccctgcacaacacaactcaccacagtgcaccattcctgaatcataatcaccccctctataaatataaccagaggcatggactccccagcgacccccacggacttctcgccgcttctcagtctgatgccccgcaatgaatcatgctatacaaaaggtaaagccgttgcccacgctggcttgtggttggtacggttaatgtttcacaacagtagctcgcgaaccggtccttaattgtcatgagcacgaccttcaaaaccatgtgctcacaacccaccattaatcatattttaattaccaattaattatcataacacgattaaccatcgtgagctaccattaaatataaccataaataataatgtagtatatatgattcatcccattagtgagctaatgtttctaagcatggctaagcaattatatatataacatttagctgaaccaaaccaatacataaggttcaagctaatcaatttattacccaaggtatcaaggaatagggcattcaatgcaaattggccataacaaaggaaaaggttcacaccacccggtgacattcgaaaataaatgcacagttaaaataaatagagaatttaaatatagaatcaacatgctcaaaggattgtgtttaggatctgtgtgacttgccttgcaataatcggtcttcaattaatcttcttgaacacttccgacgcactcacgaaccttcgcaacgacggaaacgacaagctaacacgcaaaacgaagaaaaagactaagaaaaaccaaataaacagtacaaaacaagcataaacagtacatgtggatatttttaacatgtagattttgattttagatgaatttagcaacttgaaccactcgaatccgagttacgatgatttagttatgaatttccgaagtttaatcgattttcatctaataaagaaaacctagaaaaagggatttatgacgtcatcactgacgtcatcatcgccggccatggcacggttgtcacgaccaccggcaaaagagggctcggttgggccatccgaggacacctacgcgtagaggacgacgacgcgaactcaccggtgcaaagaacaacgacggacgacgacgaacgacggccggcgacgaggttcaatggcggcacggttcggcttgacggcggcgatggcgctccggtggtcttcggcggctgcgaaggggcggacggggttcctctcctccgtgcgcacccgacgacggcgacggacggcagcggcgacggctaccgcggcagcgcaacgcggccggaggatcgccggcaacggcggcggctagagcaaggcggcggcggctctacgggcgacgggggagctcgggagttggggcaaacgaaagaggacgaccaggggatgctatttataggcttggattgaagagatcggactccaaccgagaggaatcgaagccggaaaaaccgagggttagttggagagataaactcgaaaacgaattcgattccgcgttgatttcttcgggataaagtccgattcttgggggaaaagatagaggaggataagaggaatatttcccctcaactaattttgcaagcggagcatgggatgcggcggatttggtggaggaagcggcgtcggctagagcacaggacggcagctcgggcttctgtccaagcttgaagatgaacagtatacgggacgcaattagactttcgtcttgggctggctgaaaaacaaaggaaagaaagaaagagaaggggagctcggctgggccgacttgggctgcacagcacgcgcgcgaaggagagagatgttgggctgaaatcagcccaacggcttaggagaggatttaacaactttccaattaaaataatcactgaaatgatctttgaattgttaaaaatacttccaatgctcaaatagtttcaagaaaaatcctgaaaatacttggacactcaaagtacttaaaaaaattataagcagaccatttaatgattaatttaatatgtgaataattactgaaatgttctttgtatggttaaaattaagagttgagctccgaaaaatccgaaaaaattccagagaatataattaaccatggagaatttaatagaaattaaatccagccatgctttttatttagaaaattttatttcccacatttaacttctcttgtaaattaatgaacatttaatataacttctaataataatttattaaataatttataaatcctgaaacgaaaatcaggatgtgacaggaggggagtgagaatgacatgttgggcccacgcggacccctccattttaattattttttgttgtaactgacatgtgggcctacaatttttattattttccagatcacattgccacgtctttgccacgttggatgaagacttagttaaaggagccacgtaggcatcacgtcaaccaaaaccggggtcagcactaccgagggatctcgtttgcactagttttgtaaattggggatgtgttgtttccggttttttggttcaaggatgaaaatcgtattcggtgtaagttaagggacctcgaataaacttattccttttgggtacatgacatctcatatcggtgtttgctgtgtcggccttatgccagcatcctgcatcattattggtgttacttctgttattattgatatgtctgttgaaagttggaaccatgtatttattgtatctctctgtatcctctttgatgaactaatggtttgtgtacatttctgaattcttatttatagccttatggtccagcttcagacatctgagactgatagctcagtcaataaattcagacaactcatctcacctcgtgaattgtgcagtaatttagatagtttaagcattatggatatgatttcgttactagaggtgtaatagcgtgttacatcgggtatattatatagggtatcgtatgggatgttcgggcactaataaaaaaactaattataaaatctgccagtagtccgcgagaaaaatttattaagcctaattaatccgtcattaataaatgttttactgtagcaccacattgtcaaatcatggagcaattaggcttaaaagatttgtctcacaaattagtcacaatctatacaattagttatttttcagcctgtatttaatacttcatacatgtgttcaaacgttcgatgtgatagggtaaaatattttagggtgggatttaaacaggcccataatctaacttttttattattatgaacaaaacaaggaccataattgaggtacaaaatgtgcctttttttctcttttacttatatcatcaaaaatatattttctcacattatccttatatcatcgcaaaccatcctttttccattattttgtgttctaacatgccaaaatcattttgtatttaccttctcgatattcgatagacatggaagtattatttgtattcgtcttcgtccttcattataatgttcacattatggcttacttttccatagtgagaactattcacagtccagaaattatacagaggccaatttgagtatttctgtaccaactatttgccttaatatttatgtgctattaatgaagcaccgatatgataggttctctagttacgagtgtatatttagtactcctgtatgttgattatttcatttggcaattttcaggtaattataaatcatctgcataagcagtgttatcccccgaccagtgattgacccggtcaggtcttcggttgaaccgtaggttttctttgcatacgttcattcagggattatgggcttgcttactttgacgttactaccaatcctattaaattttgatatgagtaaattgcatattcacggtacatcaacttagtaagttggtgcaatttagtgaaggaatttgagaaataagcatgctatgacaacaacatgctaagtggatgcaacgtagtacaacaacttaataaatgagtttatgggtacgactatttgaaaggtgggtgtgattttgatgcaataacttgagaagtggtgtaaaaacttaattatgtatttttggctatatgtaaacagtttttacttacccagttgttaataaacttatgtagatttgtacaagcatattttctttgtcattctagtaactaaaagtctgagtaaaaaaatttaaaagtaaaaaaaattactgtgtagaaattttctagttgatatttgagatggtaaaaaaaaatctaaatcaatggtgcaaattaggtgaacaatatattcttacagattacatcaaacattataagattaattatatctacggaattgctatgtgatgacatattaacatcgtgaaaaaacttacatagcactcattaaccaaggtagcacatatctagccaagttattgcaccaaaatattaaattatcaaattcttgtattaaagtgcacccacttgctaagttattgcactttagacgtcacattcttcttgtcctaaatagaacccacgtatcaacgtgttgtactgtgggtgtaatttactcttttgataaagtaaaaaactgaacttatacatatatagcaatgctatcttaccaatatttggtaactttacggcttactcggtttggaggaatttgaatccataggaataggaaaaatgaaggaatataaatgtttgtacacatcaatctattggaatttttctaagagatttgactggatggaataattcttatgtttcctctatataacttgtagaaaaggaattttttttctttggttttcttatacttcaatcatataaattgaatgacactcataagaattgatctttaggaatccaaattctttgtttttcctccaaaacgaacaagcccttacaagatttcactattgaaaattccctcaaattgtaaggttttaaactaaacatatccaacagtattaaaatttgataatgtacaaatgtggcaaattttagtagggtaaaaagtggctacaaagttaacaagcccttatatatgattggttggttgtatcacgtgggtcagaaaagactaggtagttctatgggttttcgctggtctaaatcgactcgactccagagatattcccttcgtcctaaaaaaactcaacttctggaatttgagttttatctcataaaaaatcaacttctaacactctatctactctcagcatataaaacgacaagttttatcccttaaataccctatacctacctatcactattactactttttctaataatgataggtattttggtcatttttactctccactactttcttaggattatagggtttgatattttgtgggactgagggagaagtctaatagcctggactgaacaggtgaaggtgttaggtctggccaaatcgtggtcctagcgtttcgagtgacttgaaacgataatttactcgttattctttaaaatgattttcaaattactaaactgttattgtgtgaaaaaaattatatagaaatttctttaaaaattatattaatctaattttaagtttgtaataactaatatttgattaaaattatacgctaatgacttatctagttttttctcagccaacactgctggagagatgcacatctctcccagttcgtaaccccctttattcccgggtaacgaaccggaagaaaaaatccgggattaaaaatggatttttagtcccggttggagactccaaccgggagtaaaaataaaagcgccacgtagcgctttctctttctcttttctttttttattttttttgctactttcatattgattttgcactgaagtcaataataaattcatccacacagacaaaatcattcaacatcacagattcatttgtaacttcatagaaatatctgaaaatcatccacaaatttacatcacaaaatcatccacaaatccacaaatccgtcagcggccgcctcccatccgcgccgccttctccctgcgcccgccgcctctaccaccgcgccgtcgccacgcggggccgctgtcacccgccacgcacaggccgccgcctccctctaccgctacgcgggctgccgtcgcccaccacggtcaccgcctgctgctgctcaccccgccgggcgcggccctaccgccgctggccgcctgcccgctgccgcggatgacaggaggggaggggacgagaggaggaagggatctgaggtgttggaggctctcaaatccaatcttatctagatattttggtgaggaggaaagtctcgtctgggacttaaccgaacaaatatggtagagaaatatttactcacggttagagttaccagccggaactaaagatggattttcagtcccgggagtaaagatctaaataatctttaatcccggttggtagtaccaactgggactaaagtggtgatctttagtctcggttggtatcaaccgggactaaagctcctcggccccctgacaggggatgaatcaggactaaatatcatctttagtttttaaccaggactaaatatcaaaaaaatttaaaccgggactgaagaacaccaaccgggattaaagatcaatttttctttaactgggactaaaaacattttttgttagaaccaaaactattatgaaaatcagccgacccagtaaagatcacttctcctgtagtgcaaaatgctaagtagaacttaccctaataacacaatacaccagtactgtacaaggttaaaagacccataaaattgtcctgaattacatgaaaaataataaaagtgaacagcgatcaatatttatgcgtataatatgatatttaacaagttagtatctgaatgcatttactttcggctgcaaaatgcaaattacaagttgcttttagaagaagcttgcacatatattttcacgccaaaattggaagtttggttgaaattggaatgatgtgacgaaaaagttgaaagtttgtgtgtgtaagaaagttttgatgtgatggaaaagttggaagatcgaagaaaaattttggaactaaactcggccttatatagactttacgcctttacttgccaggaaaatgctctctgttgtacctgggcacattttataggtgtatgctataaaattgtgcacatcttatgagtgtgttaagttcacgctaaaattggaaatttggttgaaattgaaacgacgtgatgaaaaagttaaaagtttatgtatgtagaaaagttttatgtgacgaaaaagttaaaaatttgaagaaaaagtttggaaataaactcggcctaggtatctacatatgtgaaagcaacaagctttctcaaaaagccaggtcatgtgaataataatagccttaggatgagagtaggaataaaattggaccgttggatccatttgtgttataccaatcacacatcaggaaagttccagattaataggtcctatgcatcgatcggtgtatatacatatagtttcatatggtagtagtgaaagcaaaactagtatagatggagagcaccagcagctcgtctcattgacccgcaactacagaaatccatccaccgtagtgccaattctattaggccctgtttagttcaaaaataaaaaattttatgctaccatatcgaataaattggacacatgcatggattattaaatgtaggcaaaaaaaaccaattacacaaattacgtgtaaattgcgagatgaatcttttaagtcttattctgccatgatttgacaatatgattcaacagtaaacatttgctattgatggattaattaggcttaataaattcgtctcgcagtttcctaacggaatctctacgtttaatacttcaaatgtgtgtccgtatatccgatgtgacaaccaaacccaaaaattttccccagttaaacaaggccctactcccttcatctcaaaatatagctacctttaatatatataatttatcctacttcacatattccttcatctcaaccaactacaaccattttctatttaatttcatcatatacttctttatcttaatcaaccataaccttcacagtttctatcaaaaacaaaaataaaacacaaccctcccatttaattttattgccctctccttaatcccttcaaaaaaacataaaggtatctactctctatctacaaatataagcatcacaaatgtttaaaatttattcaaaaatataaggatttatataataacttaccttcaatctaacctcccattaaagaaaaaatatcttactctcgactattttctcaactcctatcatttctcggtaaagggatataaagttttatatgatcgaacataatctttcttaaacaatataaaaatccttatatttgaaaacagagagaatagtctcacaaaaattatcctgtaattatcaagatcagtcgtcaactcctatatgctggttatgccagcgctcagggtcgcgcgaagcgggactgggtggctagtttaggtgcttctagctgcaacaacaaaaaatgcgaacgctagctgcaacaaaatcactgcaatgaaagtaaatctctgataccgatttctgggtctaggctcttgtttttcattaggcgcgtggcaccctacaaatttagttagagctcactcaaaaactgccatgtgtgatgggtgaagtattcgcatcgaaagagatcgggaaaaaaaacgtaaacgtttgcctgcgtgcgtgtgcgggatgggctttgcatctagctagactgtgcgaccttgggcctgggcctggccctggcgccccacggccttttctgcaatatgtaccgcagtccgcagtactggtgcatggcctcttcacgcagcggtaagcatgttcgttcaaaagaaaagggaagaaaaacagcgtgaaggactgaagtgtatagagccagtatagaacaaaataatagtaataaaaagaaaaggagaaaaactaaaaataataggattatgcaatcaactacaattactcaaatgagggaaagtcacttcatgttagcatcatgtgtttctagaaaattagaaaaaatagtgaaattaaatggaaaaaaatatagcagcagcaaggattgtgttaggacaatcgaaagcctccaaataaatacaatctagaatgtttacttcaaacgaggaaaatacctaaaattctatagaatggaaagaataaaaagtgaaattagatgaacagatgtattctctgttaaccgacaagttcagcactactttcctattaattcagagcattttgtttttcctttattaatcctcaccttatactttttctggatgctaggaatccatttattttggaacatgggtaagtaacgacaataattttgctatattttttgtttgtgaaacacaatgtagatgatatacacacgagcaccttttaagactaggccgtcagacatatatttggattgataaagatcggtaggttgcctatcattgaaacaacaaatagtggtaaaatgtaagaactcgttctaagtctataagtctattgacctgaacctgtataggcacggaacctaaccagctgagctgcattagaatagctggatatataaaaacaagataagtatctttaccatgtcgatgtccctttctctaaataaaaccagtataaataaacaggtaaccgaagacacattatatgtatttcggactaattatacaaactatatgacttgcaagtttataacaatcgcgttgaatattaataaaaacacatttttttcactaatatatatgatctttaattatttcttaacgtaaatattccgttcagcatgataagaccacaaattaggataattttactattctaactttcttttacaaacataaaatttgaaaaaaaaattaaataatcattttaaacctattatttctaaaagaaaatatacacatgctataaactagctagcgtgccaacgggcacgctcattttctagtgttttcctaaatgtagaactggtgtaacagaaagcagtttttatagagcgctgtagttctttaaaattgtagcaatgccatactggaatttttgcagggtggagttgtagctgggtcaatgttgcctgcatagtgcatttaatacagtccactactgatcagtactttgccaggaacatcaatgcatctgcatctaccagttcggaatatgcacgtaagtttccggtacacacctcgtacgcaactagcaaatatcatacttcctccgttttataatgtaagttattctagcatttttcatatttatattgatgttaataaatttatctagatatatatgtctagattcattaacatatagaatgacttacattatgaaacggagggagtataaaattttagaaaaaaacacacatatttccactaatatatatatctagatgtgaaatcttatcttcaaattcattatgttttagccttaaaaagacaaaattatgacatttttaccctcaaaattatcagatttttcacaaatataatgaatttgaatagtaggagattttacaaatatgtgtaatactattagacgtaaatgtctatttttttataaattttttatgacatttactagttggtgttaatgaatcgtgaaaaggaagtttgtatgcataagatatgtcccctaactagttctctttaggtgttgatatgatactccctccgtcctaaaatataagaaccttgtactggatgggac

SEQ ID NO: 10247 - DNA, 18844 bp, Oryza sativa
gccccaaccctccatattcttcttgggccgcctaccaccacatccaattcataattggcccataaataagcagccaaagtgtctaattttaatcctgcgtatgtgatgcttttctgagtcaatttctcgacactgctcacccccgtccccttctatagttaggtgcctaatgtttttctctctctcccttctaagcaaaataataatcatcttattctgggtatgcgatatcttctcatatatttattttttaaaagatatctatcaaccattctttatgaattgattcatatttacaaattgatatgtttactagtatctttttgagagaatctattatatgccactgactttgtcacgcgtctacgattttaatatctatctttttatgtatggcgcaaaatttattactttattttaatatcatttttgtttttttgtttgccttaatttattgattatactatatgtttatatgattacaacataaatatgatatttttgcgtttagttgttcttattgagatgagcatcttcgccccatttttattttaatcctgcatccgccactgctttgatcaatctatcacaaaattacatatttaaaaaagtatattagaaaactacatattaaacaatattttttcacaaaactatagatttattaatatatcatattaattagtaaactacagatttaatatcagttttatcatataactataacttttataaactcaatagtgttatatatggatataaactctaaagtatacttggataacttcgttactaaatctgtaattttattatacgatactttattaaatctaaagtatactttgatattttgattaaattatatataattttgtgaaatttactattttatactccctctattcaaaagtctaatatctattccattctatggcttttccaaaagtcttaagttctatttgttatcactatgtgttaaattaaatggttgatcgaaacctaaaaagctatttttgtatttattggttgcatgttcattaattttgtcacatggtggatgagtattatattccttggtcttggtgccaaaagaaataggtattagactttttgaatggagggagtaaatacttaaaaatgatgtcatgatattatgttgcatcgtaagcacaagctagcgtaaagttccgtttatcgtagtctaaccaattgaaaaattattaatgttcaaagttgaataatgccggtcaactgtgaagaacgtagagcgtattaatttagaccattttgatcagtgatctaattgcatttaatttgtcccaattattgtgtatcactaatatcattgggggtttgtaaattgtcacaatattcaggtagcgttgcaggctctggcaaagacaatgcaaaaggatctcaatacgattgctgccaaggtggacactactaaaacagcgtcgctacaaattcatgttaacgggtaatataatgcgatttgttgatttctctaaaccctaaattcattcttgcagtcggctgttatacattattgattctacactgcacaatttgatacttagagtagaagagaaatttatatatgttcatgccccatttgtgcagagacgatatgttccttgaaccgtcagaaagattactggttctcttcagccttatcggtaagaaaaatatacaattttcagaacctttaatttcgagacaaacgcaacgtttttgtgttccactaatttatgaccctgtgaattaactcaccgtgttttgttatttgggtgtacatttaattttaggctgatgtgaaaaaaacagtcgacgaaatcgattcttgggaggagcattttgataagatttctattgaggagaggagcaaaactgatgaagaaactctatttaacgtggagggaatcaagataagtaaaaaatactccaaaaatcctgaaagctgcagaaaagagtacatagtggtatgcaaaattttcctaagcttgcatatatgcttacaggattttttttttctcgtcagtggttgccttggaactctatatctaattaatgatcgattgaggcatgcttttttactaagatatttgtttggggattattgtcaaatcatgcagttaaccattattcttgctgctgagggaaaactgaagtttccccaaatcagaagcgccgatgatctgcgattagtactgggaatgctcaacggtatacatgcaagtgaaattaaggtatattagcatgcatgttattcatttcatttacacgtcctcttatcttatatatatgcaccaattttttaaataaatgaaaatggtttacatatctgatttctgacaatcggcacacaaacacacaaccaatatttaaaattaaggatactgcatctcctgcaatgcaacctcattaattcttgtgagtaatcattcactctcaaattaatcatatcctaatcctaactatattggacctattgtttcagggtgttcaaattctatggactccacaagaagaggatgatgctctttcagaagagaggctactaaaggactatccatatctgaggcccctaaaacaagttttaattggagagtcaaaacaacttttacttggagagtcaaaattcaaacaaattttgtttggagagtcagaagagaagcaacttttgcttggagagccaaaagaaccgtcagtacaagaagatcctaataatactaagggataggaactttgttcttgctgttttacttgcatgcaaaaaaatgtgaattatatggagtttattagaggtggatgtcagttcgatctatgtacccactcatattcaaatctcaattaatttcatcatacctaaaataacatttttaaaagtagcagggagtacttaaaccaaacaaccttaatacaaaatcaacttaaaattttcatatacggtctatattttaaaattttaagagtaaatttcacaaaactacagatactatgaccaaattatcacaaaactacagatttaactcagtgtatcacaaaactacacatttaacaccaaatttatcacaaaactacaaatttaagatgaagtgtcacaaaactacatgtttagtaactaaattatcacaaaactacatgtttagaaccaatttagtcacaaagcaataatgtttatagctccaacataacaattgtgctataaatttaaacttcaaaagctgtagttttgtgataacttcaatattaaatatgcatttttgtgatacttaagcataaatgtgtagttttgtgataaatttggtgctaaatctttagttttgtgatacaacgccttaaatctgtagttttgtgataatttggtcaaaatacccgtagttttgtgaaatttgctcaaattttaaattagtgtgtgctcaacatgtatagcggtgggttttgtgttactaatcacagtagttagttttgtgtaatttcaaccataaaacatgggtttcgtgacatttgttctttagaaacataaacgaacaaacagattgactgctgctacttgtctgcttcttacacttctgacacatcatactgaatttacaattgaattttctggatcacggcaagaatatcttatttaagacacactaaataatttggagcagtgacaataatggtaaattgcgtctttccgaaactttaattattcaataattattaacagtgaaatttggtaatcggcaaagacatcatcggcttagaatcattatcggctgtagcatctcggaatcagccgatgggagttatcaagtcgccaatagtcggattcctgctatattcggttaaggaaatcaatctactaaaggaagcttatctctaagtgaccgagtttaaagagaatacggcatggcaatttatctattaattaggaataatttgttagtttctttttatctttaggaaagtgtgtttagtgtccaataaggactttatattttccttttatctttaggttagtttctttcttgtccgacaaggacttgtatcaacccatgggtataaatatgtacacccggggtctatgtaatctatctctatgatcaatacaattcgacgcatcgccaccctttttacttctatttttgttttttacgttctggcggaacttggcacccgacgcggggctgcatcatcttcaatctccggcgaagggataagtccaatgttccgtcggcccaagcaattgtctcatctacatcggcgttatttaaggctgcatcagtacattcgacctcttggattgctctagtttggatgatatatttgcctacatatttatcatatgtctctattaatctagtcttagcatatcaatttagctctatcggctgcttctcattttagggtttctgccgatatcggctaaatcgcgttgctagattagattagctcatacatctaccaccctaaaaatcagtcaactgcttgattgtctagatattatgtttcttttcatacttagtgctgcatcagttaaatttgatctactaagtcatgcttagaaccataatctctagcctacttcttgatgccaataagggtttcatcggggtttcagccggtgagttatctggacgttgcatcggctcataaggattgcacatacatataagttggatttcgccgatgacaacaaaggtttcactgtttaatctaatcttgtggatttcatgacatcggacctctagacaatgtgtgctttaaccttcggatcgatgcttatttatcatatcattgctagctgattggtttatactggattatattgttattttattacatcatcatcagtcgattgcctttatatcattatctacattggacatatagccgattgcttaaaccctatcgctatcggctggtatcagcatcgactattattggctaccggctagaactactccatcggcttgtcagccgatcggctgttttgatctactatttgcatatcttgtcagttgcaggatcaaactgactgacacgcccacatctcatcatatttggacctgcactggagctaagcatatctcctaggtcggggtgttcgattttttcgtcaacaataatttaatcaaatgcatattcacttaactttatgttaattttttagataatggaaataaatcatgcttcacttaaaaagagctacaaccacttattacacaaacttattcaacaaccaacacacaccatagagttcacaatacacactccgaaattaacaatactcggagcacaaaatagacaccaacacaagataaagaaaacacaattattgaatcctagttgtaaatctccacccaaagttgacgaaaatatgcatgatcgttgactcaaatttgcgatgtgcattatttattagcttgatctgagcccaaaccagaaccaatgcatataagattttgatgatgatttgtaaaaaaaaaacatattatttctattaagtcatagaagaatatataacagatgatcctacgaggataagtttctttaatacatttgaatggattaggcttcgtttaatccagtatgtattcagccttcactcgttaagccctaaaccctaaacgctctgtctctctctccttctcgaccacggcaatggcgatcgccgcgcgcctcctctccacagcgccatgccgctcgccctcgtcgtggccgctgccgccgtccaaaccctacctccgcttcccctccgcgccgctcctcctcctcctccggtcacccgccgccgcctcggtgatccatctgagtcctccgccggtaactcccctcgccgtcgcgtgtgatgatcggcacgcgctccccgactcggacgagccgcgcaaccggaacccacctgaccatcccgctccgctgctcgccgccgccgccgccgccgctgccgcggtggccagcccgcacgccgcgctcgccttgtccggtggatccatgggcgggtgctcggacacctcatcctcctattcctcctccttctcctcctcgtcgtcctccgattccttttcttcgtggtcctcgagcagcgactcatggaggtcatcgtcttcttcctcctcctctccgccgaagaagaagaaggtggtggtggtggagagcgcagatctggagactcacgaatcggtcggcacggcggcttctccgccgccgccgcctccggtggccctgaccccgtgggagaagttctggatcagcgtcgcggtggtgctcggcgtcggtgggctagtgttcggcctcatcttcctcatcaagagaagcatccccccgccgaggaccatcagtgtggtcaagcttcaggttaatttctctgaatctgatcttagagtgtccatgagcaattcagagtttcagactgggtttcttgatatgatcagtgatcgatcactgattcaaaattgtatatatactgattggatgatctatcttcgtctctgttactcgcaatttagattgcattgggtggtgtggctgcggcgaagtcgttccagaaggatctgaaccggattgctgagagggtgcaaggctctagccgacgttggtacaagttcatactgagcggtaatgcctattctgaatttcttgcacatcaaatctatttattctcctcgcaaaaaaaaaagaatctatttattctgaattcttgcacatcgaattctgctttggtggttccatgctaattacttaattgcagatggattatatttgacactagctagtagctttaaatataaatcgcacttaaaatgtctttaataataagacaagtagcaacaaaattaataatatttacataaatttattgaaccaagacaaatggtcaaactttgtagccaaagtcattcacgccaaatatttattatcggagggagtagtatgttagttttactgttttaaaccggaataatatcctggcttctgaatctgaagataaacaaagtcacaacgtcagtctcttatctaggttgccctctaatgagggtttcaagtgtgcaatcagctccacatataggattagttggcaacttttatggatcattaggagtaggaaggggaaatatatatttgtgcttaggccacacacggcacgcaccttgcagaaagttcagagatatatatattgagcatgtttttccatgtgtgcttatggatgtagatctgttcaagaagtactactatcaagtaatagcattttttgcagaaattaatctatttgtgcataggactcaatttagtattaaagtgatggtaaaatattcttttttgtcgggatgaccgaaggagatggtaaaatgtacctataataaggttataaaataatgttactgttaacacttcatataacttagatacttatgaccactatcaattgtccaatgtatcatggtagcttattttttatgttctggtgactcatcttatttcagataccatatcttcattgcaccgccacaaggattactgcatctctacaagcttatcagtaagaaataaaaacagttttaacattcttttggtagactgacagacatagtttgtgttcgcttctagtttctctccctcgatttgacagcctttgtatgttccgcccactgcaattacgtactgaatcgtataattttgctgaaccatttattttaggttgatataaaagacagcgactcttggaatggtcattttaagaaaatttcgttggaagaaaggggcaaatttgatgaagaaacgctttctaatttggaaggcgttaagagaaataaagaatactctacaaagatggatgggagcaaaaacgagtatatagtggtatgttagacttgttactttgtgaaatgcttcttgaaatatttgccatcgatctgctgattatgatgataaaaggacactttcttgacaaaaaaaatggcgttcttatttgtttgatgtctaatgactgatttgttctgatctccaaatcatccagttaaccattcttgttgctacggatggaacaatggatttccccaaattgatcacaaacgctgcagatctgaaagttgctttgacaaagctctactctacacccgaaacaggtcttgaggtatggggaatatttccatttgtatttcgtaaatcgtaagctagcacaactgcttcttggtatattattgaacaagctagggaaaacgcagcttgaatttactagttactcatatcacttttaccacttttctgataagtattattatctgtttgttgagtgcctaatgaattggacaaactaattttgttcagggtattcacgttttatgggcacctcaagacaaggatgatattctttcgaaggagaggatgcaaaaggattatccatatctgaagcccttgagtgtctgattagggcggccttctcttcgtgtccttggaggaaacccatacaagaagtgaagaagagcattatcatagtcccagttattttgtagttagaacttagaagaacacatacagatcattaggcaattacactattataggtctatagtctatatactcctatatactggtaattgagatcagctcattgttttggttgccagtcaggaatcagggcacctttctaagcctcaggaaatgctctgtaaatggtgatgaacttgtaatagagcacagtggtacacaagaattttcagctgattaacatgatcaaggttgattttataattccatggaactattattgtatttattaccatattttcatataaaataatctcaaaatggaggaaaataatcttagactccatactccctccgtcctaaaaaaaaccaactagctatgtatttggacatgcgtcatgtctagatgcatagttaggagttttaaggacagagtgagtatgttactccagcagctatagtgatgttgatttgagaaatttaatatgctattttttaaatatttacatatactccttccggtctgaatatttggcgttccccgacccatcgccggaggagaactcccgtgctcgccgccgacgttgctacagctgtggttggccagctccccgtgttcgcctagaccgttaccattataattgtcatattttcatgaaaaattcttaacatggaggaaaacgttccaagcttccatatgacactctaggagctagagtgatgttttatgagatacagcactcttcccttgctatactcccagattaacatgacacttttaatacttcctccttctttaataatgacggataacattgatatacttaaatattctgagtaaatttactttacaccattataaaaattagaatacaaaatgggtctgataatacaattttttttttataatataaatacagattacatgtagattaaggggctgtttagttccccaaaaactttttctaaaaacatcacatcaaatctttggacacatgtataaagcataaatatagataaaaagaaactaattgtacaatttacatgtaaatcgcaagatgaatcttttgagcctaattagtccatgattaggcataagtgctatagtaaccaacaagtgctaatgacgaattaattaggctcaaaagattcgtctcacggtttccagacgagttatgaaattagtttttgtcggagaatgaactccttcaccagggaaccgtgaggccccccctttgtgagttcggccgggggcagcgggtgagattcgagggcttggtgagcgaagctgtgtcatcttgagggggttcaatcccccaaagacaatgagacaaaatgggtttatacaggttcgggccgctaagaagcgtaataccctactcctgtgcttgattgattgagtgtacaacacaagtgcttggggttgcgagactcaagcgccagttcgctcgaaagtcctccccccctcttctcactaggcctggacctccttttatacctcaaggggttatcacatagacccaacaacctaacttcgtcaaaaattattaccatctttgcatatgcatgtcttgttccttaacttggaagccgcatacacgtcgcctcggtcgtggggcctaccaaacaatgctgcctgacacaaggggcgcccatgtcattcatcatttaatgggtgaagacttttaggctcctattacaccgggaaacaggaacctatctttgaccagagcgtgagaccgactctggctgggataagaggatgagaacctctgaccatcattatttgatgggacatgtcaggctgcacgccgcctgacacacgagcagcgcataagtgcactagccagtcacatcggtcattcgaccggttgagtacactgcacgccgtattaaatgcggagtggcgcgaccgctcaggtcgctataaatgcgggtaggtgagcacctgtaggcggacacctaacccacagtacgtggtgacctagagagggggtcgggggagcccgacccctagtcacgggagggggcggtcgccgcccgacctcgggcccaatcccccctcgggggagggccacgtggcgtttggggcagccttctccctctagtctcgaccagggagtggccgccgccctacctcgggcacgactccccttagggagggccacgtggcattgggaggcagcctcctccgactagtctttgggaaggagtggccgccaccccacctcgggcctgacttcccttgggagagggccacgtggcattggggggcagcctcctccctctaaacatgatacccccgggaccatatcaccgacagtttttcattcgtgtccgaaaaccccttccgacatccggtcaaacgttcgatgtgacatccaaaaattttcatttcaccaattaaacaagccttaaacggacaaatcttcttcagggaaaaaaaaaagaaaagagaaaaacggtcacattagagcatctccaagagtatggccaaatgccactccaagctaaattatagccaacatatgaaaaaaaaaagaccttaactctctggccaagccatcccactggccaaatcctgctagcagctggccaaatctagccagccacaaccgctggccaaacggtgggccccatgccccctccccttccatccagccggccaccgccgcccccgccgctgccgcggccgcatccggcgccgccgcccccatgcccagccgcatccttgcagatgtcggagatgcacagcagcaggcaggaggagggcgtcctcctcaccttctccgtcgccgactgcatcgcaagactgcgtactactacaaaggtgaggcagagcagcatcaggctccaagaacgattcaagatggttgagacaggaagtaaaacatgcgcagattcgaaggcgaaagtatgcgggtcttcgaagggattgattccaaccagatcaaagccaagaacatggtaaagtctgcctttcttcagaaggttttgggttttagccgattgccaagaagaaaaacatcaaaaattgcaaacaaacaaacaaagaacttcgccgtatattcttgcacagtcatgagtactcagtaatcactaatcagtgtaccttcagtgaccagcccaagaagctccaagaaccgccattgaattcttgcgcgcctgcacggattcaaggagccaaaagcctaaaagaaaaagctgcagcccggccgcatccagcgccgccgcccccgcgcccggccgcatccgccgcggccgcctccacgcctggccatgcccccacgctcggccacatccgacgcggccgcccgcagccctcccatcgtcggcgtcgctcctctctgtcttgccacgccgctgcatccgaaaagtgccaagaaaagagaaaaagggagagaaagaggaagaaggtatagcagaggctgacgtgtgggtcccagtgtcggagagtgtagttagagaggctgttgaagtgggtaatgagtttagcttgacaaatcaattggaaagctagctatataaatgctcttacatttggacacgccaaataagatgacagagaggagagagggatgccgcgtgccaagcatgagcgcgaccgcgtgggagtgggagtgtgggacccaccccttaatccccaacagctcacgccgcacaacaaaaatgaaacgaaacgaaacgaaacaaatccaccgccaccgaacggacgccatcacgccgcgcaccggacgcgccgcgccgcgccgactccgtcatgcccgccgccgacgccaagccccgcctccacctccacctaccccgctcccttcttctgctcctcatacccttcctctccctcctcctcctctactcctactgcttcttccctcctcctcctcccgtcgcgttcgccgtcccgctctccccgaccccgccctcgccgcacatccgcatgcgccgcgcggggttccgctcctacgaggactacctccgccaccagctcaacaagacgctcgacccgcgcctccgccgcgtctgggccacccgcgactggcaccgcaaggtggacgccttcgcccgggccttcgccgcgctcctccgcgacgacggcggggggaagctcctctccaacgcctcccgcgcgctctgcgtcggcgcgcgcctcggccaggaggtcgcggcgctccgcctcgtcggcgtccgcgacgccgtcggcatcgacctcgccccggccccgccgctcgtcgtcaggggcgacttccacgcgcagccgttcgccaacgacaccttcgacttcgagttctccaacgtgttcgaccacgcgctctacccgggccgcttcgtcgccgagatcgagcgcacgctccgccccggcggcgtcgccgtcctgcacgtcgcggtgcaccgccgcggcgacaagtactcggccaacgatctgctcgacgtccacggcctcgtcggcctcttccgccgctccgacgtggtcaggatctccaaggtcgacgccttcggcctcgacaccgaggtcatcctccgcaagaagaggtcttcaccctaaccaccaccacatccacatgcaactctctcaattctccacacacaattcaactctccaaacagaaaaaggaacacaaattttcttccaatttccactccgatttttttgggttcgatttgttctttgcaaatgctgcaagtgtagttagttaattaggtaggcgattattttctactaggacatgcatgcatcgtaggcaacaagttactaaaaaaactgaaaatttcccggttaaaagaagtgaaagaagaaagttaaaaagattagtagtgatttggttgtcactttcccttcttttcttgatcactttcaccaattgttcttccctttctcttttatccttgtccactttacggaaagattctttgattgatttgggtgggggtgtgtgatcagtagctgtactaatcgagtatatcggcggcataactgtgtccgtgcactgcacatcagctagaataatactgtcattgacatttgcagctgagacattgatgtggatgccgtagctgttgttgagttgtaatgtgggggatagtacgttggaaacttggaattttgcaggaatgtatggatcatgtatattctctttgttttatgtataaagagagagagaaaaaaatcccatcttatgttcattttctgcaaggatattattgtcacgagcacaacagggccatgaaaacgttcttgcattgcatggagtacataaatgtgagtgcttggattacccctagaaatcacctgcatttattcaaatgctaatgttttagtgccagaagttgcaatgaaagtgacaactgagagcaggtacaatagcaaactatacaatagcaaactataagtcagcaataaacacatttcgatgagataaaagaagagagagaaaatcagtggactacagatttgtagccagctgcagtacagactctaagatacatatgtatgacaggtgggaccaagtatgaattgtgtagtattccctccgtttcaaaatgtttgacaccgtttactttctagtacgtgtttaaccattcgtcttattaaaaaaattaagtaattatttattcttttcatatcatttgattcattgttaaataaactttcatgtacacatataattttacatatttcacaaatttttttaataggacgaacagtcaaatatgtgctaacaagttaactgtgtcaaatattttaaaatggagggagtatatgttatacgtaactattgtatgagttaactactaaattgactatacatgatttggagaaagtagttgcctataatattaaacttgctctgagaagagggatcttttcagtgttctgaatctttcctactgtgatgggaatgacaaaatttatcacagaaattacggcgggtattcaggtaaaggcatcagctggagcaacccttttggctcttttgggtgagagactgacaaaagagtactagaaacttgcaagagcatagtagcctagtactcctgtactgtgcatggagtgcaaattaagtcaattatttgggacagctctcttgacctgaaatgagaaaccatctttgcctaagagcaagtttaataagtttaatagtatagctcactactggctctaaatcatctatagccaatacaatagccaattcatacaatagttgcttactatactattaatatctggtcccacctgtcatacacacattacgtcttggagtccgtgctgcagctggctacagatttgtagcccgctgcttttatctctcttcctttctctatttaaaatatgtctatagctggcttatagtctactattgtaccgctctaaacgaaatttcagaaacatgcattcatcccaatactgcggttttttttttctgttcacacagaactgtacagtgtacaagaggcagggaaggaggcacatgcatgtgacaattttttaggagaactaaaaagtagttgtatggggagtggggattaactaaccacctgatcaggcggcctaattaatagcaaggccagctcagtgcatgagacaattgtcccccatacaccaagacacgatccacacagaatgtgtcacatggcctctcacacacaccaacaatttgtactaaacttcggtaaatttttgtatagctgatggatgcctgccacagagtactccactagcttagctcgtgaaactgaatttgagctccaaattcacgcgcaaaaggaatgggggaaaaatgaacgttgatttttacaaagtgttactcctgccagaatattactatcataaatttatttacgggtcacaaatttgttagaaaaaccatgcgctcatgaataatatgcacgcacaagttaactttcaccaaaaatttagtgagattaaaatcgtgctgctaattttcgtctctttaagtgtgtgttatgggacgtattcgtgtatgtgtaaacgtggtattgtgtgtgtagttgtgtgtacgcatattcatttaggccccctttgattcaaaggaaattcataggaattttaaaggatttaattcctataggaattttttctatatagcgctttgaatcaaaggaataaatcctatggaatcctataaaattcctatggaatgcctcttcccatgcaaattttgaaggaaatttaacatgaggttctacctcatgttaagaatcctttgagtctttctctctcctcaaattcctgtgtttttcctgcggctcaatcaaacggtcattcctatgtttttcctgtgttttgcaatcctctgttttacacttgtattcctatcagaatcctatgtttttcctattcccccgtttttttattcctgtgattcaaagggggccttatcgtataatcgagaaaaaaatataaacaaagtactacctaaaaaattatcgaacagagtgggtaaggccttgtttagttaccaaatttttttctcaaaaacgtcacatcgaatctttgtacacatgcattgagtattaaatatagataaaataaaaaactaattacacagtttatatgtaaatcacgagacgaaacttttaagcctattttgtccatgattagccataagtactacagtaacccacatgtgctaatgatggattaatgtagacccccgtttttataacaggaatcaatcgtgtaaacagtaccatttccctggatcaagtagtctggtacacacgaattcatagctgaaataccaagtgcacatacacgagtgtctaatacgaattattacatcataagcccgtaggcatagtcttaaatcatcggaccgagcggtccggaatacatccaaaagcagaaatagataaggcagcggaattcaggcagcggcatgccattgccacaggcaacgaccatactaagacctactgagtgccatcgtcttcatctccctcctggtagtaggcatagggatcctccgaggcttcatctcccgcttctgattaattttatatttgcaagggtgagtaccaaccgtactcagcaagccatcacagcaatgatgcacatgacagaggaattcaaaggatggctatggttctttcgcgcaaagcaagttttgcaattcttttcacaagcctaagacctagcatagactgatcaagtttttaataccagtgttcatattaaacaatgacggttctgtccaccatccattgtgatcccaaggatagcttcccgtcattgagtcgttatggttttctgaggacgtccacattcccgcctctcaggaagtggctccatcagcataaaaatcatcatgcaatatcccatcccacacaagttaaagaatttagagtctagccaagtgtaatacatgtcccggtgctcaataaccgcgagcacggctattcgaatagattcggtttactcacactgcagtggatgtacactttacccgcactccgcgactgcccaacacatgagcctcatcccaacacatgagacgcgtcacggcaaagcttttcgataacctcgcattggcagtacccgctccatgaacttaaatcctcatgcactctaggcgtccatgtttctagcagtgagaggagttctggcgctcccggggaaagagaagtctcacacgcatattaaattatggttcaagttaagttctctctctcacacactcatggcagtcctaccaatggcaacaccgatgtagggcacgcctctcggccctacctcaacggctgtcccatcgtaacgcacctgcctcactcaggggtgaaccatctatgcagggatactgcctccgctcggctatctaatctgttaggtctatacccattcgagaagtacggttgtacgggggtcgtttcatgcttaacttcatggctcggtccttaattaactggggacggtactagccttttccagataccacccaaatcctccatccgccccagtcgaaaacagttgttttaattttatttctcctttcacaaatcatgtcatcaacatcatggtaatgtggcgctcatgtctccacatgccgcatctcaattaccttcccgaaggtaattgcccaagcatatagcatttgataaatatgagtatgcatgattctagaatagcatttctaagcaattgtcatagttgactagggactcatacgtaaatatggttacaaagatttaagggtaaacaataatcaaggcatggcataatcacaagtaggatgttcatcattgcatgcaattttatttgtaaacaaaacaatttcgcaattgggatcaacatgttcaaggaatagtgatgacttgccttgctcaaagtcttgcgggtcttggccttcgcttggatccgcaactccctcgggctctatagttacgtgcaaaaattgatttgaattcgattagaattcaaataaaaatccaaataaatccaaatggaagtcgaacgcgaaagtcgattcttttatattaactttactattcgcgtactagggcaaacccaatttcgattcaaactattttgcgggtataaatgttttgttctcacaagtttttaatttaatctacccgagcattatatccatataataggttagaaatttctatcgcgagctaaatatcggacggaatcctagaattattatacgatttaatttagtctatgactaaataattaaatataatacacgggtaaaattcctagtaattaaatccgaatttctaccgtgaaccgatgacttatagagattaccaaaaataatctataataatctataagaattcatctaattgtttagttattaattatatctaaattactaccaattttaatctaatttgatcaagaaacatatttttataattaactcggaatttcgaccgaaatactattacgctcgaggaatttccaaaaataatctatgattaaccccgaccatttttatttcctaaatcctcctaatttctcccccaatttcccttctattttctccttttcttcttttctattttccctctttttctctccctctctttctttttctctcttttctctccctctctttctcggctctatcccacccgagcggcggcggtggacgcaaggggaaaggagggcggctcaccggcggcggcagcggcgacgacggcggcggcgacggtggcgcacggcggcgcgggagcggcgacacggcggcacgggaacggcggcgcggaaacggcggcacggcggcacgagagcgacggcgcggcggcacgggaacggcggctcggtggcacgagagcggcggcgcagtggagagggaagaggggaggaagggtgagatggggtgggggaaaa

SEQ ID NO: 10248 - DNA, 4116 bp, Oryza sativa
gaacagttgggcacatcatggctgaactgaactgaattgctgttattttcatcctatgagacataatccacactgcatctctgcacctgaaggctcacaacttgcagccccagggcagaagaactgatttggacatgatgaggactggagaactaaacaaaataactaacagatcatgtacacgcgaagaagcgatggagagatgcataatgatgcatccaccatggcattggagagagcagggaaggctatgtaagcagctggagctggctttctctatgtgattgcggcgccttccttctcctttatgaaacggccctgcagtgcagcgatgcaagaaatgccaaaaggtttcatcaggacagagtttcatcaagtaaaagaaatgtatggactatgggtagaagatggttcttgcacttccaggatgcaaagtctagcaggtttcaattcatgaatcaacactgttaagttcttagtttgtcggtttgcggacacacagttatatcaatgaacataaattttacataagagattcttctatcagctagaaagtgaaaccataaagtgcattttgatgctttctagttcagaaagtgaaagatcaacatgtccagccacggatgtgtgaattcatcatgtttttcagttcagttatcacctaatactagaagttcaatactatgtatgatccattggctttgctcagagtgtgcctgaagtgtactaatcttctgataagcaattagcagacaactgaagctttattaaggaatttcagacaaaaaaacagaaatatatcatgagagctaactaaaaaaggatatagtggaaatgcctaacctatttttttcagatattagaaataaattagcctatacaataaggtctgaaacccacacttcagcagcttacatctactaagaagtagaatctaatcctgttgcctccaagttaattaatcgttcgattcctagtccctaccaaagttccatgcttacattccttattcagtattcagtaattcctgaagataataaactgaatccaaccagttagactaaactgattcggaatgataatgctggtccatgccaaatccaagatgacaagatgaatcatttacactacaaagtacaagtcttttacagtttatgggactggagacaattactgaagaatcaataaatgagcaaatccagttcagctcagttcaggtaagaatttttctgaacttatgaagcatgcagcaactagttcaggttgagataagttggtcaccttcaggcgcggccgcttgacggcattgagccggcgaacctcgtaccggatccgcttcgcgaacagccgcccctgccgcttctccttgtaccgcctcaccttctccgccctcgccgccggctccgacacgctccatgccgccgccgccgccgcgggctcaggcgacgccgacacctcgacgaacacctgcacgagcatgcgccgccggtgtcagtgtcaccacggggcgtgtccaagaagagtggggcgagtggggcgcttacggagtcgagctccagctccgccgcggcgttgtccgtgccaccggcggtggcggcggcggcgccgccgatgtagagcgagccgcggcccggccaggcggcgaggatctcctcgtagtcgagcttcagcagcagcgaccgcgccgcggcgccgccgcttgaggcgcccgtgctcgccgcggaggagcacgaggacgacgtcgtggtggtggtggtggtcgtcgcgctcggggacgagctgctacagtacacccaccgctcccgcccccgtagcgcgcgccgcgccaggtcatcctcctcgccggagagctccttcccgccagaaacgcccggcgaggccgcggacgacgactcgcccccgccaccgccgccgccgccagcggaggcgccgaggatgtcggtgagcgacggcgccgccgcgaacagcgtggacggctcaggatgcagcgcgaacggctccatctgcggcttttcctcctcatcctcacctccatccccaccgtcctccggcgacgacggcgcctcatccttgggcaccaactccggcgacctcaccgccaccaccaccacctcctcctcctcctccttcttaatcaagaaccgactaagactcagatacttggtcctcctcttcacattccccctccctccccggcgacccttcctccgccgcgcgccgccgctcgccattgcccccctcccaaccaacgcaaataccacgcaacctgagggacctcgctgcaaaaaaagcgcgggagaagagaagcagcgagccaagctatttggagggaaagtgagggggatctctccgcttttccgtgatcccttgctgacgtggcgagtcggggtgacgtggcggcgcgccattgggcggccggattgcggtgtcgccttttcccccgccgtactcgatgtggtggggtggtcggaggaagaaaaaaggagaggaggatttttatgggaatcacgggggttttgtgatggattagggtggatgttcacgtcatcgccgttggatctgtactatcagtcatcagctcctattttactctagaatattactctgttttatgttatgaaattatcttttaagaaattatagatctcgaatggaagttagcatagtcgatcatgtctgtgtctttgactgttatgtgttcaatgtcgatccttagtttggtgaacttgtatagatatagaagaacgccgttttaagtgaatccacatgaaaatgatgtttactcgtagacgatcgtttattttcttgtgagtatcctaaattattttcgagcttgacatggaacacaactattatatgttctgatagtacaatttgacttcagctatttttttctttctgacatatatgtatttactatattttttatccagtgtttgtttcaccttgctccaaaatttattcaattttactagctccaaaatttgttcctctttctctttctctttctctctctattagtaggagtagctgctaagctgtgcctgtaatcctgtactatcagtatgatgaagcaaaacgtgcagatgctgacgtggtgggccatcccggccgacacatcacggcgcatatatgtgatctgcactgcacgaaggcagtactacgacaatgcgtccatacaggcaaggcaagggcacggcgatccgatagatggccagaagggtcaaacaaaggccgagtttacttccaaactttttctttaaactttcaacttttttatcagatcaaaacttttctatagacacaaacttccaacttttccatcacatcgtttcaatttcaatcaaacttttaattttggcgtgaactaaggctgtgtttagtttctgaaattggggagaagtttagggaaagttgttagtttggaaaaaaagttaggagtttatgtgagtagaaaagttttagatgtgatgtgatgtgatgaaaagttaaaggtttgagggaagtttagtctgaactaaacaggacataaatacacccaaacaaaacaaggaggtaaaagtcaaaatgtttcactgtacaacacatgttttacagttcaacccctctcagtgagaggaaaactcaagggcggcctccgtactcgtactctcgtaggagtagtggccgtagtctcgcgggacgagggagatggggaatacgaggacgcatcgtggcgtgtgacgacgcagccaggcagccttgctgctcagcctcactggctttcaggcgtcttcctccaagccaagagtcaaagccgcaagggcatgcgatgctttgaccttgaccgtctaggtactgtaatttatttttcttttccccctactctgtagcagtttttaattcacaagaaatttagtttaactagataaataccccgtcatgatgctgcgggaaattaagtcgcataattatcgacgagtggtactcatggaccggatgagttgagtatttgggtacgttgaaacgagtatctatgtagtacgacatcaagcagacaaaaggcaaggattataatggttcagaccccacaaaaggcaaggattataatggttcagaccccttgtcaggtaatag

SEQ ID NO: 10249 - DNA, 40427 bp, Oryza sativa
ataacaattgctatggaccgcaaaaacagggagaaagagatggcttcaattcttctatcctcattaagcatggaattgttctcaacagaagacattgtcaagggtttcataatgcttcttgaatctgcagaagataccgcacttgatatattggatgcctcagatgagctgggactgttcctagccagagcagtgattgatgatgtgcttgcgcctctgaacttagatgagataagcggcaagcttccaccaaactgcagcggggctgaaacattgaacatggcgcgctcccttgccactgcccgccatgcaggagagaggcttctgagatgctggggcggtgggacaggatgggttgtggaggacacaaaggacaagatagcaaagcttctggaggagtacgagagcggaggcgatgtaggagaagcttgcaactgcatccgcgagctgcacatgccgttcttcaatcatgaggtggtcaagaaggcgcttgtcatggcaatggaaaagaagaacgacaggatcctcggtctgctgcaggagtgctttggtgaagggatcatcaccatcaaccagatgaccaaggggttctcaagggtgagggatgggcttgatgatctggctctcgatattcctgatgccagggagaagttcctgtcctatgtggagcatgccaagaagagcggatggcttctaccctcattcggcgtcgctacttcagcttgaaccaatgttatgagtgagcaggaagcatcaagctggaccggaccgatgaacaacgaagcaagaaggcacatgccgtgatatttgctgcatccaagatattccaagttgatgattttcatttgcgttttctgatgcttgtcgttgtgcttgcgcgtgtaggtagcggagcgagcccctcttacttgtggttgttgtggtggcttatgtgtctagatctttcacctctgacacacccgttgctgttgttagttgcattccatttttaacttcccccatagacccttttttacttcacaagtaaaaacagagaaaagaacccccgtcatgtaaaagttgctccctgcctcagcatttgcatctgttgcttacctcatttactgtacgttctcgcctgcagcgataagtagcttgatgtgttcttttttaaaaaaaaaatactaggagtagatgttaattgtctttctgtgatgatcaaggcgacagagcacagttgcgctttgtttagctggttttacaatggggattggattggcaccaacattgtgtcagtgaatcatatctgttgggctgttgggtcagtggtatatcaatcatcagaaagacgcaatcaacatgccagctgtactgttttgcatcttggcgcaatcaacatgccaatggtatatcacatcttcatttccaaggattttccaagcatcctaggcttctgcgagcagctaggtgacgacaaaggcatcaaggttgtagcgatgaacgagcagaaagaccctatttcttcctcagcattggtactacctccgttcaaagggaaaattggaaccatgctattataattttgtaaaatttgagatataccatccttacccacatgtcattgacttatgtgggtcctatatgtcattgagatatcaatggcatatctcaaactttaaaaaattataatggcatggttccaatttaccaaaaagaatgtactagctatctactatccaattgaatctttatagagatatcgactgttcagatttatattattaggatgtgttcaattaaatactaggcaactagtttattttaaaacagaagaagtatgtgctagtttggtttagtaccctaccaatatattggtagtgccaaactctagacaagttttggcactaccaatattttagtaggatagatctgtaaatgagtgtgtttagtttatgccaattgagagccaaattttaaattgtggcgaagaatattttagaattgtgtcaaattaagtataggtattaccaaacatttggcttcaaaccaaatcttcacatttactatttaaactaccaaaaaaattggtatggcaatattttggtattaaaccaaaacgctcctatatgttgtttgtcctgaatgctgaagccatcatgtgctagcgtatgcgtcattctggtgtgaatcatcaatcaataactcccctaaccccactgtttttctcatttttatgaatttttttttggttatctggatggtttacacgtcgctcctcattccggctcctcgcgtacgcctgcgtgaccgctcgtaagcggtcaccggtccaacgatttttttgggcgcgggttggagccggtttgactaaaaggatattttgcaaaaaagtccttgtatttccacgaaatatcgtatacgtccttggactggttcacacccgttgtgtttgttgcgaaaaagccctcctatttcacaaatatacaatgtgaagaagagaaaattccgttttaggggtagagctgtaaatattaaaaactaaggggttttttcgaaaaacaaccacttataccccaaaccctaaccacgggctgttccctactccctcaccgcgcggccgccgccccacccacgccccgtgctcggcgctggcgccggcgcgggactcccctcgcctccgtccgccctccccgagtcacctccgtcgtcgtccgccctccacccgccgccgccgacgtcgtccgtcctccccccgctctccgttgcctctccttgcaggccgtgcgacggcgcggctcgtggcctcgtctccggtgccgccgtagccagatccggccctcccacggctggatccagctccgccgccgctgtatctggcggccggaggagacggcgcgacggaggaggatggccgcgatagcttcggacgacgaagcggcggagggccttccccgcgaggggttccgctgccgccaccgtcacccgtcgcctccgcatgcccacacacaccacgatctgccgccggtgcctcctccctccttacccctccccttgtggtgacgtcgacgggacggaaggcggacgcgtccatcagggcttgaggtggcggcggagctgaccgcgcgaccgccgcccgtcggagccggtactccctagccccttcttcatgcgccaccgccgcctcctcgttcttccctagccgtcgtcaccgcccgtactcttcatctccccaatgccgccgcttcctctctctcgccctctcgccccgctcggtggggtgtcggatttgacgagcaaggtcagcggcgaggagcagggccagcggatgtggcaaggtggcgaaggcctcagcagccggcggtgggcgctcaaagcggacgaaagcgaggccgccggcggccccatcaaccgccctacccaccacccctaaccccccgcgccatgtcgtcctcccgctcaggtgcctatttccaccaccccccccccccccaacacccgtgcctcctgccgccgtcgctcccaccccaccaccggcggtcctcttcctcccggtcgacgttgctagccgatgccccttctacctatcaaccctatggctgcagtctgtaccgtcccatactcccgacgctgagccgtcctcggggaatgccggatctggcaccttgtcgccggattggccccggtctagggccggacgattgcaactcgctgtggctcaagttttgttgtcggctcttcctccttccgaaatacggacgcattggttggatgacagcagacatcagcccatgattaagcgttgcgggcggcgacgacgaccttgccgtatctgtgtaagtgatgagttttatggagtctttattcttcagactactggaagtttctttttgtccaaccaggttcttgcgatgtactggaagttcctaaacctttttttttcctgaacgtgttcctaagaacacttgaggctgttattttggtcgattgcaaagcaatttgaattaacaaatcccaaagcaaagcggtagtgacgagttttttatgtgcatgttttactgcctcggcggtgatgcaatcattcaggttttttgttcgactgcatcttacctattcaaactgcaggaaagtattgaattattgtgggttctggtggtttttatgctgacttgttcagttgttctcggtggtgttcttttttttattattggaccactgtatgtgcctcgtgttagtctgtttcttgttaaaaaaaattgcatggctcattatagtatcctactaggcttttcatgctctaggttcattgatatacaacttttctgaatgtgaatgagctccttgaacctggattttggttaggcagattatctgcattatcttttacactattgtatttggttaattgggttatctatgtgaggccagatgtagtgattggtcttacttgtgatgctaacaagcatgctttcaaaaggtagacatacttacagaattgttcttttggaaaaatggaacatgaactgtgatttaacgctcttatcagtcaatagccatccttttaattgtaattttcatatatagagcagaactacctagcatttccctgatgctatcataacacatgaaactgacagcgaaaattgaagggcctaatatttattttgtcctacaatgttgcactttgtaaaactataaataaaattataactcattgagccgcatcctttcagaacatgttaaagtctataaggctctcatgcctagcttgacagttaaagctcaattggaactgaagatctattaccatctaacgttcattgcatactgaaaattggattaggttcttttagagcttaatagggcctgtttttttataggttatggtgttttgccacacttgactttattattaaccagatctacagtccttgacaatactcctacttcaaagcattcattggatgatcgcagacccttgatcagtaagcaaccgatttatggcttgtggttgctgcttgatctcctcacctctcttgcaggggtaagaaaaagcaatgtacgaagcaccataaaaggtaattaattttctcatcataatatcgcagatagaagcttagaaaatacctacttttggttgctagggcgaattaccaaaagtggtgtacaatcaaatggtttgctgcaatccttttgcttacctacatgccctaatatattagatcgatcccaaattgctttatgtatcgtgtatcttattatatgtgcataggtcctaaaagagttgttgaaaaatacatctctgttgtcccacatagaatacatgatctctgttgttccatggcttgcatggattacctagctaatatattctactcctatcctcctttatttatttttaattatttatcttatttacttctgcaaattattcccataccaaactaattcagttgtgccttcttgcttgcaggtaaggatgtgctccatgtaaggactttggagttgctggcatagcagagaattgaatgactgcttttctaagtgcaagcaattgtgttctttgggttttatactaattctcaaacttgatgatattgggctggtcgcctctatattagctaactcaatagagcccttttccgttatagcatctttactttccaaattttttaatttgtaatttctttttatatgagcaattggtactatgaatgtacgagacatatggtcctacatcctgtatgtctggggaacgggaattggttgggaaaaaaggttaccatgtggacttatttttgttaggcccatgttgttcaactagccctgatagtttcctaaaactttgtttaatttaagaagctatgtaatgattctatttttggtgtacaagatattggcattatgttacacatagatgtgttttgaaagctaaataaaattacatagcaacatttggtcaacaatagctatatgtttaacagtagctttgcttaagctgttaatcatatccttgtgtgcgcagctgcgcgcggcgtggcgccgcgcttatacttctagtatatctggtgcttcttcctcaacctctcttgtcctccctgctgctgctccgagaacatgaatggattcataaagttgattcgtgtaattaaatgccacattctgcaactatggacggtggcacggcgcgagtgtgtgcgacattggctggtgactgatagtatttgtggcgtgtgcgcggttgatcatttatttgtctcactcttccgcaactagcctgtacttgttcttgctgagaatgctaacaattcctttacgtaaatttggcttccttgctgtatttgcttgcagtatctcagtcgtcgttgatttcgactagcagatcttctatctcgagcttgatggaggtaaaaaagaaccaaggaaaagacgcaattttgctttacagtatataaatcgtcggtgcaatttgttcggaaataaatagtggactggcacgcgcaatcacaggaagagttttctttaattttgtggcttaatggagagtgactagatgataaattgaatcaaagaagaaagaagatttcagtttgttcttttttgcaggaaaaaaaaagaatgcagtttttgtaagatcggattcagacttaaatgcggctcatactaattggcccagaatgggatttcgattccgtgaggcctatatatatgttgggacgtgaggcccataaatattgggccagaacgggatttcgatttcaagaggcccaataacgggagtaggagttacgtgcggcccatattaggcctaacgggattctgacttgtgggccacaatgattgggccgcaactggatttcgattacgtgcggcccagtcaacgggcttggagcttcgcatggctttggacttacgtgaagcccattttcgctgggcccgttgatatatggggcccaggaaagttaatccgaccgccgcgaaaaaacagcagtccagatgagtaacatggaccatctctgcaactgcagttgatttacaccatgatttgatgattgatttaactcagataaagaaaggcatagtttatcaacgaggcaaaataggatgtgaatatgtgatccaactgatggtcaatcattgagctactaccagagatgttcaaaacatttcagtcagtgatgcgcatctattgtgtcagaactcacaagagagatgcagttaacagattcacatactttcatctaaactgaggtgatcttaacccagagcccatctaaaataacagtatacaagaatggacaacttgtagtcagcttcaaccaaatgaaattcatcatcttgatcatcaacccttgtttcagtttttactgtgcccttggaacccatcagtttcttccactttcgtcttgcagtctggtctgatcttgcagaaacagcatttgaacagtcccctgcgaggcaaagctccattttgataaggagcaccagcacggcgctgtagaagcttcgagaaacagcctcggcgagctctggcttcgtcaacctttggtgtgtgccctccagctttgaaggaaccatttcctggagtggatgcttcaggtatgactgaaatcttctgatagctcaagatcctcgactcggtatccaccgcgtcgccatctgtagcatggaggcaccccagaatgtgcgacggcttctcctttggttgcaccgcgagtggagaagggcactcttttcttgatgaagctactgttctgcaacctgcggcaactggatcttctgtctcctgatcttctctggattgcatgaccaggcttactgatgaattcttggatacaactctgttgctggtggagattggggaaagattgatcctgatatccacattgcactttagcaaattctgcagagaaaccacaaatggattccaaaagctctctgttgtaggtacatcctcggggtggcagaactgcagctcagcaactgctacacctgcaatccaaaattaaacagaatgagttcgacttgaaaattctgcagtgccggcatgcaatgatgctactaacatgcagtttggattcatggccagtgctgaacggcaattactacagaactatgggaagatatgtgttaaaagcatactgacaattatctgccaccttatcaagaacactagcttatccacagatatacctgtttactatacatgacacatcatacatcagttcagacaaacatgtgctttctggaaagcaacattgatcaactggctgaataagacgtatgatggatcagcaggaaacatagtaggaagtatggaaatgttcttgttatagataagatgacaaatgaatctgcctcccaaacaaaacagaagaaaaaggatccaacacacagttacatggattaccttgagtggtgtacagggatgacaacttcccatcttttctcaacagactatgaagtggtttagacgtgcagttctcaagagccttaatccatatggtctcgagcacatctggatctcctaagttcatatctaaacaaccgattttgttctgatagcaaagatgagaactggtatctaagctttcgtctttcaagatagcagccccatcatctgcataataaatagctttcagtgagcatgagaaagtgactcagtcatcagagtttcgttccataacgatattatacaggaaacagattaacccccatgggtacaaaataactgacactaatgtaataccatatgaagtagagaatgccatttacctgtctgactctctgtgaacatgcttgaaactgcagcatcatctaggcagtacggctctctcatattaaactgtaacagcgctgctgtaagccatgtagactggttctttgtggttttcagctgcttttcagtttcagaaagtatttccagtgcatttctaagtttgtgcacatcaatttcagccgctgtaaagttaagatacaggattagatgatatgtgtatgacacattaatgtgaactgtgagcataataattatcatatataataatgctaagctaatatgtcatgtttaaaggttggaattatcttcaagataaggactccatattgcagtgttatgttcggcattaacaataacagatctgcaggtaatccgtgtgtagattgtacaattttaaagtttgtttgggagggaaggagcatacatgtatgtttaccagtaacctttctaacttcttgggaatctgactggtgcctcccagctaaaatatccatgataagatttgcaagctgagctaataactgcagggggtcaacctttgagctcaaaagctccctagccctcctgacaatggtagcagcatccgatgaaaaagccagattaagaagatcaagcaactcctcatctgagacatcgcctatctgaaaaaaaaaaacagcatagcaagttgatgtatgttcactgaatatgaaacaaggcaatttattttatggtggtaaatatttcaaggctagaaaagctgattgattaacttactaggtcatatgttactgatttgctgatcctttttcctagcagagtaagctggtcaagcatttgaactgcatctcgaatggaaccgttggccttgcgagcaataagctccagtgcttcggcctcgaactccataccttcatttatgcaaatcctactcaatcggagggcgatctctgcttcgtctaccttgcaaaacctgtagctctggcaccatccaactgaattacttggcagtttatcaatgtcagatgtgatcatcacaaagattgagctgtcagggatgccttcaaggctactgtagacagagtaccatccctccttatccatgtgttggcaatcatccacaataagaaccttgaagtgcgaagaagcaggaacttcacaggcattcctcagcaaggcagcaactctagatttgcaatccagtttagaagcatcaatctctatcacactgctactgtttcctgagaatatggccatgcattcctcacagtgcccacaaggctggttcccacctgaagagtggcaattcagtgatgcggcaaatattctagctgcagatgtctttcctatgccatgtggaccatggaagagatagattggagcaagttttcctttcaaaacagcacttgaaagagactgagcaacaacattttgtccagccagctcagagaaagccttgggccggtacttttgaagcaaacttctcgcgctttcttgaaatgtagctccctccctccgacccaattgctctccttcaatcatcaaagaggatgccctgtcctttgttgcccttgacatccccgagatcaccgaggagcaggtctggttatgaagcgccgccttgaccctcgcattggccttgatgatgttgatcggcgagttcaccagccgaccagacctcgcgctgtccccaaactcctccctcctcctctggagatgatcatacatgttgtaactaaagctgtgcctaccataattgctcccctccaggtcatcttcctcgagagaacaaccctcccagatggtcttcttcgccgagaacttggccagcgagttggtctcagggtccctcagagatctggacctcatgacggccagtagagccctcgaaatcgggatgtcaacggagtgcctcctcccctcaatcatcttgcaaggccccaatgaactatgctgcaatgcagataaataacgaggaacaattcagtcttcagtagagaaaggatgtgcaattaggcattgcacagtcaacacaatcttcaaacatggtgcacactccacaaaaaaactaatcttttttcgatcttgtatgcaaggagcagagaaaccatcaacgcaaaatctgcagaaacaatcgctacctgcggttttacctaaccagcattgccatgcaaacaacttgccgagataggcggagccaagaaaaaaattgcagattgtagatggaagtcaatcgggcgcctggatgcaaacatccatagaaaaaccttgcaacttgcaaaggagagcataataaaactcaaatgcaaaatgcatccaagaacatgaaaaaaaaagaaacaaaagaaatggagaatttcaaggcctacatagtacataccgaacgatctcgcaggcggtacaaaaacctcgcaaaagggggcaaaagaagaagagaggaaacgacgcacaattccccatagaggaattaacctcaaagaacagatagaaccaaaaaaacaaaaagaaaattggaaacattttcgcagctccagacgacgtggcacgcaggccgaagaatccaggagaaaggacaaacaaacaaacaccaccgaccgagagcagcaagaacggaagagaaagatggggattcggaaccgaagcatttacctcccccccaaacacgaacgacaaccacaacgacgacgacgcaagacaacaacgccgcggcttttccgcacctccacctccaccgccacggccgcgcgccgctccctccctcctccgttcaccaccaccaccaccacattaatagcgcgagcacggcatggagactcgaggagagagagagcgagaggagcaagtgagcgaagcagcaggaggggggactaggcgagactagactagagtggcagagacgtaaatacgcgccaaggtgaggggtagttttgccccgggaggcgcggggaggaggcgggcttaggggtggatatcaagctggctcggctcggtctagctcgttaggataacgagctagattaccggctcggctcggctcgtgtgtcagctcgagccagctcgtttagctcgtgagccacaacaaggaaaaagagtagtggcgtgtgcagtgggaggaggaagagggcaaatgctcacaaaccaacagatttcaaaggaaaatggatatgatgatatatcactagcttgcactgatcgattactgcaaaacaaatgcaattcagtggccggattaaaccgctactgcaacagaaatcaaggggcattccagaactgaaaaatgcaaatgaggaatcaataaaaatacgcaaagagataatcatcttgaaagagatgcacaaatgatggcttgggtggtctcgttcaccctcctgactcctgctccctcggggtgtagttgcactgatgccgacgaagccacggaggcgagggctggcagcggggccgattgaggcgagggttggcgtcactatggcctacgagcaatctacacgcgacctcgtcggcgggcggcgcaaggcgccgtgagacgcggggagcgagcggcgctctcgtcgcgcggcggcgtgaggagcggagagcaagcggcgctagagtagaaaggggatctgggattcacagaatcacagtgcgtagacaagtcacgtgcgtgtgtttctccatctagggctagtgctattttttttcttgatgggccagctcgaccgcttcatattatctctttggactattgggcagctgggatctttggctgttgggcttggctcgttaggctcgtgagcagctcacgagccagctcgagctggctcgttataacaaacgagctaaaaccctagctcggctcgttgacaaatttaaacgagccgagccgagctaggcacgagtcgaacgagttatcgagccacgagttttctgtccaggccgagggaggagggagaagaagaggaggccacgatggcacccacccgtaaatacgcgggggattcgaggggcgtttccgtcatttcgtggctccgtccgtggcacaaccccgaaccgtaaaacggacgggacagcgtggagcggcggtggcgcgggtacaggttgatgacaggtgggccccgggcccacctgtcagtgagagggcgacgtgggtggggggagacgttgcgaagggcgtggcggtgtcgtcagatttactgttgcggcatgcgaggccccgtgaccccaccgctgctgctttttttttttactgatttttttcatctcttgccacctgtgctgcaataatttgttttttttcttttttttattttgttgtgattctcttttatcctctgtcatagaattttggcaacaggatgactaaaaagataggactattgtcgtgtagcctgaggtgtgatttaacttttttgactcggaaaatgtttgtcattaacccatagtacaagtttgtatcagggtggtaggagtactagtacaagttattagttgatcaaattacacgtcatttgattatgtgtgagctttgaaaatctgtttcatgcttttatatgtatactaaactctaaaactggccttaatatgttcagtaatcagtcgtgtactaaaaatttgtcaggagtatggtttagaagatttgtggcttttattcaaaacatatagctagaggcaaattacttgtgtttgttgccgcatgccaacaatgctttcttgctatattagtttatcagtatgataacaacattgtcagatataattaattaatgtgttctgaattttcttatatcctttctcagttctcaccgatataaaagcagctggcaatcgatgtggttttgagcagggaaactactccaacaccataatctgtttctctcttcttttaacaaggattcggtagaaatgatccacaaggggggggggaccaagactagttggttccggcgacttgtttggtgattttctaatcattgtttagtgattgatcaatggtccaacatgcatatggcacagtcttcgaatccaatcaactcaagcatgcatttgtatttgtcgctttattaacttgtaggacagaacgatagcctcttgatctttgcatcattcaagagttgatcgatcgggttatcatcatcagaaacatggccggccctgctcatcatgcatttctccaacttaatcttttcatttgtaactgaggattaattatccactgtaaaaatgtttgtgtggctaataaacagtcaaacagcatttcgaagttattttaagtattcatactttataactttaactatgttatctgcacttggagtggatgatacgtctctaatcataatcaaatcagtagtagtagatagtatcataatgtgtagagaggtatagccgtatagggggtaagacaaacagtgtagcttgcggtgacagtaggtcgtctcgtctgaaaagattcgaccttaattagtttgactcttggtttagcagtttagcttacgctggagctaagacaacaggggcaaacagacacagctgacaaccgagcccaacgttgaaaaggctatcataaattcataattatgctagacacattagagatttgtttactcacctggttagcttattctaatcatcattcgacacccacatgggcacaatagtaaaaaaaattatactaagcaaactggtacagttgttctaattgcaaaacaatgtaaaaaaaagtacagtataaccaacactgttctctcttcttcttcctcttcatgtaaaaagagttgcacacgctgcaatcagccgtagaggagcctgtgctgtcgccagtcgcctgaattttctggaggaggcagacaagacgggctcatttccatgcttgtgttgcattgctgcacgatcttcctgtccatgagattgtgacttgtaatggcgaaatcttcagaaaaattctccattgaattgccaccgaatgtccatgaaccctaggtgaagtacgagcggcagtatcacagctctggctggctagctagatctcgtttaagctggcaatggaaggtactactgtactgtcagtgaagtgatattaacgcagatacagtgaccccatcgctgggacaggatcttcttcatggtgcaggagtaattaaacgcctcttcaacggggttcttgattttacctgtctggtgcaggacacggtactacatgtacaccaacttcttctgaaccgagagaggtttcaatgtaacggatggacccccaccacacgatctcttattgcacaaccagaatccttctttagaggacatgaactgataaaaggggaacttgaatagtagtaatatgtttttttcagtactaaaattatgtcttgaacataggcctcactcccgcgagggcggcacgggtggtgctaccgtcgccgcccatctccccctccctctgccttgccatcgctagagcgagcgggcgacaagacgtgtagcgtgctaggatagcaacggtggggctctcaactatagatataggggctttggataatagggggcggtgccgcggcgtgccatcccagctcacaaatcacgatggcggtgttaggtgcaagtgacaacttgacggtgagagcaatgcgtcgtcgaggttgtgcagtgattagcaacccattgaacgaggtgcaggtgcaaccagggaagcgaggcgacaaggtgtggccttgaaggtaaggtggccggtgcttcgtgggccctactggcaattgatggttgcagcctcctcccttcacgatggtggtgatggtgggcatccatcatccacaacgggtgcacaacaaggtacgaaggaggacaggagacaacaacgtgtcagatcccatgccagggaagggtgagtgcacccaacctttgtgatgatctagggtacaaaggtttggggcggcggcgatatgtcacgtccagaaatttagcccaaatttccagactatttttgtgtattaaatccctgtccaggaccagccagggtacacaaaacaacaagtaataaacagttccaaacgtaaataaagcgtaaaatatttacagaagaggcacttagtcctcacaccgaaagagaacgacagcagcggaaagaggcgatcctagcggggcttcaactccactcctcaggcaaaactcaactgggtctgagccttggtcttctaacttcgtcttcagctcagaagcactacacttctgaaaagggggaataatagcaaggctgagtacaaccaccgtactcagcaagccacaccaaagatgcagacgtgcaaggggatacaaggatggcttgtggctatttgcataaaggcgattgtaaagtattttattaagcaaaacggtaaaactgttgagtaattaaagtaatattaaatctccactgatcaacgctacaccacgttgaacaggcccaaccaacccacctgaactacagtgcattgggtcgatttattaagtgtgagactaatcacggtgattctggtcgatcgcccataaccgcgggcacggctattcgaatagttttactctggccagaggtgcacaactgtacccacaagacacaatccaccggcatgtcactgtgcccggccggacacgtcaccatgtcgagtgattatgacaagacccttcatataccccactctgaccaagcataccacacctcaggtttcacccccgcccctagcaggcagcgggcagtcccctctcgtgcctaggtgaatccggaagcgacagaggcagtcgcagggcccgccccgctccatcacgcccatccttgcctggatgcgtcagccagagaaaagctatacttcaagtcaggcagttaccctttcccgcttgtggcaagcgttgtatgtcttccagtgcatcccgcgaaccagtccttaattgccatgggtgcgaccagcaaaaccatgcacccacagcccaccattcagtcgcattttagttggataattacgaccatgaaacatagccaaatgtctcgagcacgcagcttgttctgatactaacaaggtctaatactgcaattatcccatcgactgagctagtggtaattaagcatggctaagcatatagttctagctagatcaacataagtgacacaagctagtcgaattatcacccacggttgacaaaggacaggtatcaagtaaacatggcacaagcgagcagataggtaattcccagatcccatgtaactagcaagacatgcattatttgcaaatggtaaaacacttgtaaattaggatcaaaatgctcaaggggaatgtgtgatttgccttgcttcttcaaacaatcttctgaactcttatcctcgcgaccgcgatcttccgaaacgacggaaactacacgctggcatgcaaaacgaggaaaaaccctaataaaaaccaagtaaacagtacaaaaaaagtaaacaaacatgtagagctacattttagatgaattttgcaagttgaacggctcaattcggagttcatatgaattagatatgaattttagaagtttttagccgtttaaatgaatttctagaattaaactcgatttattgcgcaattattaattattttctcaagggaatggttgctgctgacgtcatcaaaagggggagggcggcgctggcaagcgggccccaccggtcagcggcacaagggcaccagtccaccgtggaccgggaccaccgagtcggtccaccgtcggtccatgggatccgacggcccggatcggccctagccgatcgggcggccacggggcggcgcagccgagacacaggcactgctcaggccggcccgaccgagcgacggcgcgcggcaacgcggccaccggcgacggcgcggggggcggcggcgcatgcgggcggcggcggcgcacgctagggagcggcggcgcggcgcgatgcggcaaggtgaggcggcagccgtgtaagttcaagtgccttaatttggtttcggtgattaatgacaaatctaattatataagactaacgtttttatgagcctttctttgactagtctcatttagatatgaaagtaaaaataatgagaggtatgtattaaacttcacatattctaacttggtctctcttgtggatccaaaatataatgtgagcttcctatttgatctttattgattatgtgcatatgtgttccttcatatccatatgtatgcacatcttgagggggagcttattctatattttgtttattataatatttctatcttgatttgaaatcatttttcatctcatctctctatattgtttatatcgggttattatccatcaccaaagagagaaaagattgaaagatcttggattaaacaatttgtgtaattgttactttggtgatagatgataaaccgatgtttatgggattaacctctcttttgcataagttgtcggttatttcccgataatgagatgtggaagacatgcattcttttgtgatggaccttaatcatgacaaggatgaaatgcatggagataaaatgatatgtaccacttcttatctcctactttttgataggttcatatatatgatttccatgttattgatatataagtgtgagactaatgtttactcgaatgttatcttatttagtctcatttacattgagaacatacatatgccttctctatatgtataagataaacccccattggtcattctctaattatacatacacttgcatctcttgtatatttatttgtatgcatatatttagagggagcaaatcctatacatttattgtgcatgttctagatccatgttgttcacctattatttatactggatctttgcacttgagcttgcatacgagtatatgacacttgtgatgttaatgaatactcaacaaacatatacatatctttcatatgcaaccggttggtcatcaagtgaaggatgacaaccgatttgttgagactaatgttctcctttgaggtgtgaaaaggaataggtcccattacgatgaggctaatgaatgacaccatggtttagtggtcaccaagccaaggacatcgtcatgttggcaagaatgaagtcaagcttgtgatgagaataaagtcttgacaaaggatggacaagacctcggcataaacatggttcaaccggatggtcacaagtgttgatctcggctcaagcttgaccccaagatggatggcgcaaggcaaaggtataatgtagctaagaatgttttcttagtattttcccggtcttggtgtttggtgtagaccggatttgctagataggcgccgtactatcaagagtggtctatgaagcgagcttgtggatgatcttgtgccatattagttcatatgcatgtaggtgcattttgtgggcttgtctaaccaagtgtagaagtgggcatgtccaataggagtgagtgacatcttgtgggtatgtccggtggatatcctttggagtgtgagccatttatccttgacttaagttgtgtttcttggatggatttttcatgggttggatggccctttgaataagctttccatagagtccaagaacgccaaattctgagacccgagtcaagagatatcgccgttttactaacggtcggttgagctgaaaagtgacctgcggtctgaccgtgggccttaggccggtctgaccggccggcgtggtaaggccagtatgaccggccccactggtctgttgcactggtctagtttttggtggcgatacagagccgccagagccgcaaccggtcagaccgagccgacggcggtctgaccgagccgtggacggtctgaccaaccactacactgcggtcagaccggccaggttgagtgggctcaatgattgccctgtaacggctagaagtagtccggtctgaccggcctcacaacggtggtctgaccggcagagcacaaagttggggatttcggttccaacggctagttttggtggttgggggtatatatacccactccccagcagcaagggtaaggttttggcactccattgcattatcttgaacccttgcaagagctctcacacccttgtacacttagtttatctagtgaggtgttagagagtgagttaagccaatccaagtgcattgcttgattgttatagctagtgtggcacttgatcatcctcggcaagcatcctagacttgttactcttgtaggttgccgcctcctagacggcttgtggaggtgttgcccggtgacctctccgaggagattgtggaggaggcccggcaccgtttatgagtgatttggagttcaccaccttcggagtgaaggaagaactaccccgagtgatcgaggcttgggtagtcctctccgtgggccggctcccgccttgcccaccccttgacaaagggggcgtgcggtggcttcgtggttgagcggtggagttgggctcgcctgtcacgcccggaatttctatccaaaattccaaacgcttacatgtgtgtgaaccctcgtccaggaatcagccgaggcacacaataacaaattgataatagagtacaattattactctaattaataggcgaataaaatgtcattacagaggtagatagttcctctcaatcaataaagatctaagcaacggaaaataagataaacggcgcagacggctccactccacaggcagcttgaccaaggctacacctaatcctccacaccatcagcatcattgtagaactcttcctctgatgaatgattgcaaggtgagtatatgacatactcagcaagccacgcagcaaatatgcaagtgcacaaggataccaaaggatggcataatagggttccatttgcataaacagcatttagcaaacatttcagaatttaataaaacagttaagtaaaaattaaacaatattaatccaacgctatacaacataccctgttgtataggcccaaccattctggacaaccacacccggctgtacagatctatctccaaaccaggaatataccattccaaaccaggagctaaacaaattattaccagttatagcatcttttattatgatgagaggtttgagactaatcacgaaagacattgttagacccgcccataaccgcggtcacggctattcgaatagttttactctgatcagaggtgtaccactgtacccacaagacacagctccacatcatgtcaccatgtgccttaataccaccacggtacctcggaaaggagctgtgacaataccccttacataacacaatccaccgcagtgcaccattcctggatcataatcacccccttataaacaaggcatggactccccagcgacccctgtgggcttatctccgccacttctcagtctggtgccccgcaatgaaccatgctatacaaaagataaagccgttgcccacgctggcttgtggttggcacggttaatgtttcacaaccgaaactcgtgaaccggtccttaattgccatgagcacgactctcaaaaccatgtgctcacaacccaccattatcaggttttagttagcacattaattaattaaccaatcatgattgtccgtcgtgaactatcattaagccatctttaaataatagtgaatcataagttatcccaatagtgtgctaatgtttctaagcatggctaagcaatcacatctaatatctagctgaaccaatatataaagcccaactagtcaagttataataacccaaggtatcaaggaataaaggaaccaataacaaaaagggctataacaaacaataggttaattccacccaatgacattcgaaaataaatgcaatagttgaatagaaacagtagctttaaacgggatcaatacgctcaaagggttgtttgggatctgggtgacttgccttgctggccttgaaactcttcaaattcttctcctgcgaaaacggactctctggaaacgtcggaatctaaacagaaaaaagcaaaaacaccaaaacagcacataaacaagcacgaacagtaatgtggatatttttaacatgtagatctcaattttagaaaaatttagagacttgaaccaactaaatccgagctaagatgaattagttatgaatttttgaagatttaatcggattaaaacacttatatggattttaattgaattatgacgcaataatgaattatttttgaaaaggaaaacggggtttattgtgtcagcggctagggtttgcggtggaccgggtgcacggcggcggttcacgggaacggacggccgagatcgatccatccaaaacggacggccgagatcgagtggtccacgaccggctcacggcaaacggccacgatgacgtcagcggtgacgtcaccaccggcggcggctcgggcggcgcaggcgcacttgctcgccggcgaacgacggcgcggcggcgcgaacggaggacacccacgggtagcggacggcacggcgaactcaccggcgaccaaagcgacggcggaagatcaacggacggcgacggcgtcgaggttgaaacggcggagaagatcgggtcgacggcggcgacgggtcttcagcgacggcgaaggggcagacgaggacggcgacgcgacagcgaccacgaaggcgacctccccgagcgacgacgacgaccggaacggcggcggcgcatggctggagcggcggcgacgacggcggctcgaggttacacggcgctagggcgcttccgacggcgagaggcgaaaacaagggtggcggcgggtagaggagacaccggggatccttttaaagggtctaggaggcggtggcaaaggcccacggcggccggcgacgagaaagaaacttcggggtttgaaggaaagagaccgatccgattcgacctcgaatccacaaatttccaaagcgagatagacgatgattccaaaagagaaaaggtagaggagatcccgaagattgtttcctctcaattgatttcaccggaaacggaaaggatcggccgaatttggaaggagacggcggcggcttgcgctagggtttcgggcggcggcggccggaggtagacgacgacctgacaagcgggcctcacctgtcagcgagcgagggcgcgcgcgcggctgcggcggactgggccgacttgggccggggagagagaaagagggttttgggccgactttcggcccaaagccaaaagagacttttaaaaacatttttctatttaaattattcatgaaatgcaattccatttattaaaaatacttccttagctcaaataaatcccagaaaaatctaggaattatagaattaagcaaagtatttaatgaaattttatctggccccattttatattggaatttattaattaaaattagatcttctcttctaggcttttaaaataaattctaataattccaattaaacaacaatttatatatttaggatttttagggtgtgacatcgcctcaacggggattaggaaaccggcaagtttccgaaccttggtgaaaaattccttgtctcttgtctcatttatttgttgcatttacatttgtgctatttatattcatagagacatatttaagcccatatcacttaggtttgcaaaacttaacttagttgcttagttaaccttgcacctcaccttccctagcaacttaggttagttttgtttaagtgccattaagttttaaaaccgcctattcaccccccctctagtcggcctccttgatcctacaagccggctgcccggcacagccagcagcggcacggcgcggagcacggcggcggcgacccggtcgaacggccaccggcggcgacggcgcgtcacgggcaggcccgggaggcggccagcgaaggggaggaagagggagagggagaggagtgctcaccgagaggtcaaacagcggaaggaggcggccgacagcgagcaaggtgacggcggacgcctcgagatgacggtgggatggcgctccggcgattcccggcgaagaccacagcgtggccaagaaccggcaggagctggggaaggtatagaagggagctggagtgagggagatgacgcggaacgacggcaaaaaggcggccggaacccggcgggaaaggccgaactcaccttgagcagaggggaggtattttcggcggcgattcgcgaagacagaggggtggccgacgtgcggctcgacaccacggagacggagggggcgtcggcacggccggacgtggctccgaatgccagcggcgagcggctggtggctgaggagttgaagcggctcgggtgtggtggtgcaatggcggttccagtggtggagggggaaaatggagcggaggccagggtggagctcggcggggcgatgccggcggtggcggcggtggctagagcggcgaggaggggcggccggagctcgtcggtgagtggtggagagagggagcgcggtggggaggtggttccggcgatggaatggggaaacggagcgggggccgaggtgtggcaccgtgcggcggagcctacggcggtggctacgcggcgtggcgaccactagggcgagcggcggcgatggggtgcggcggtgtcgcggtggtttccgggcacgggagggctcgggagagaggggaaaagagagaaggaggtgcggggatcgttttatagagctcgggaggtggaaatcgtggccgggagaggcgggatcggctgacggaagcgggacgccgacgtggggtggtggcggctcggccggcgccggtttttgtgggacgagtggggggaaatggtggggaagaaggtgggcgacgaccacgtcgcacacgcgcgcgggagcggcatgggcgcgcgagaaaacgccgctatgtggggcggcaatggcggcatgggcggttgccggccagggaggccgaaggttggggatgacaggtggggcccatgggtcccacctgtcggggagggggagagagacagttggaagggggaggaaaagaagacttgagagagatgggcctacgacccgagagagggagagagggggcgcgggccgcgggaggggggaaagggacttgggccgaaaatggcccaagggggatggagggagattttatttgttttccttttattttatttgattatatgaactttgtattattataattatttcttgagctccgaaaattcacggaaaaatctggagagtatttgaaggcacaaagaatattacaaaatattcccggccaatgatttttaaaaggaaatttctaattccctcaataattcacttgattaaattgatttaacttttattaaatttctagaaaatacattatttaaacgatttttaatcccgaacgaaaatcggggcatcacacgatctgtgattggtgatggaccagatctaatgtgggtaggatgggtatgctcggccttgtaatgatctggcccatgacgagaacaacattgagggttcgtgaggtcggtggcagtaggaccaatccacgacagcgagggacatgtgtgctcgcccttttgtgacggttttggcttgtgcggcgatcctaccatgcaaaggtgagataaggctagccggtggaggggcgtttgtgcaagggttcttcacactagtggtagttggatgctggtggggtaatgcagttgcgattgcaggggtgtataggttgcaggtaaaagcgttgtccaataaattgtaggctagcaacggtaacactttcaagtgctgtgatccctctagaatacgtttgccgaggagcctcgctctccccttggtaggacactccaagtgaaaaccatgtccagatttcttaggcgggcgacaacgcattatggcgtcacatcctcgttgaaggtgtcatctagaaggttctgtttttggctttctaccttaaacagttggggcaatgcttatggatgacggtaggtttgtacgaggaatgagtactgagtagatctttcttgttgcttgccctatacctctgcaacccctctcggaccactaatttcagttgtttgaaggtgttgtcgggtggttaaaatgtggatgtggtggtggcatccgtcggtgtggcactagacatttggtttgtgtaggagctacagcatgtggtggtggttttgtttttctattttcgttattaactcccataattttagtcttatagtagtaattttgtactagtactatattaatatgaaacatcacagtggatggtgttgtttgtttcaaaaatatcaaaataaaatgtcttgaacgcaagggaccttttgttttgaattgttgaacaacaacaatttactcctaactaggaagaaagcccgcgcagatgcgcgggcagttttatgaagacaatttttaaaaaaggtaatatctcaccatttataagccgagaaatatattgcatactttaatatatttaagtaataaggttatctcctagattaaataaaatcactttgcctctggttacatacaaattttcttgttgtcacttcaacctattatcactgtttaaaagccaagtatctattcatagatgaactatgtaatgtatcaataaaataagcctaatacatcattaatacattgaaatatccactacacgtaagtgtttcgtgcctcaccaattttcaaaactatatataaatattgtaaaaataccacttgtacaaattaatagaataacatcaagttatacataaatgcttctctaatgcgtgaagccgattgtagtggcgagactttctctgtctattgccttgaaacatgggtcccatatcgatgtagttgtgcacctccagactaacctggagtacaattttaatgcctaatttactatcacatccttatcgagttgtgcatcggtaagtagtaagttgagcactattggtgactgtggtctccactgggaccgccttaactcccatatgtacgtccatgttatacttatagcaacgtagcaaactatgttattcatgcttatgcccttcatgaaaggaaaaagagaagatggatgtgatcaaaagaatgttttttttttatgttttgagagtagattcatggtatagagtagacaccacgtgcttatggtgttaaacattatgcaatttgaaaatgagcgaagttgtaattcgacggtactaaaagagaagatggagatgatcaaaagatttttttttttaagttttgagtagattcctggtatagagtagacaccatgtgtgtttatggtgttaaacatttatattttgacaaacatctatagtttagcgcttggtttattttcaatacttattgttgataatcacatgagacacctttactaattcgaagaatatatttatttttttcaaatttattaataataactaatatgtgggagtatatgggagttttttattttttttgtatgatactatatacgtatattttttttggttctatcttttttgacacgatggctttattcttttaccgtacgtatgtaggttttattgttccttttcattcttacgtacttacttttttttttggcgaacctattctctctcgtatgtataggtggaaagtattagtattagagatataaatatctaatctaatgatctaaataatggatccatcaatttaagtgaaaatcaacggtatagatatagatataatctaatggtctaaaataacgggtccaccaatttaaatgaaaatcgacggtgagattaaatagtaccacgtggcggtttaggagcgtttataagaatgccacgtatcgtcttgagagtgtttgtaggtcgttcaatagacttttagtatatgatagatagatagatagatggcgtaaggatatcaagatcgagaatggccttgtaaaatacgggcctttagtgggctaggagcttatggtggagtatagcaatatgggcttctgatacaaggccctggagctcgcttggtgcttaatcatccggctatgctatataagcaagctctttgatctaaaaaccagcttgagaaagaattatttgcattttagccggtcatgttttggtactatactagtataatttgaacaaaaatacacatttatatttgaactctctaggctattcccctattacatgtagcatgacatcagagtcaaaacagatacgcactataaatttagtttcatcatatgcaacaaatgacattatacatagcaatgacatcagagttaaaatgaagagaacaaaaagaaaaaaaattcaaataacctccccaaaaatcaaatccaaatcaactggctctctagaaagcaaccctgttccttaagcaacttccctttgtcttcttcccagcggcccataagtagtccacatctccactctcttgaccacgaaacggcccaacacccaaaacccccgggcccacatgtcatcctctcccccaaccctagcgccaccggcattccgatccctcctacccctggccccacatgtcagtgacccgaaaacgcctcagggtatatatacccagctgtgcctaagccgggcacacgccctctgaccccgatagaaagggaggaaaaaaaaaagagaaggcgaaaccccaaatccgccgcgatggccgccgccgccctcctccgccgctcgccggcggcgcgcgccctcctctccccggcgctctcctcccgcctcgtcgcctccaagccccactcgtcgtcccccgcgccgccgccgccgccgtcgaaggcgggggcgaacaccaagacgttctcgatctacaggtgggatcccgactcgccgtcgacgaagccccacctcaaggactacaaggtggacctctccgactgcgggccgatggtgctcgacgtgctgctcaagatcaagaacgagcaggacccgtcgctcaccttccgccgcagctgccgcgaggggatctgcgggagctgcgcgatgaacatcgacggcgacaatggcctcgcctgcctcaccaagatctcgtcggcgtcctcggcctccacgatctcgccgctcccccacatgttcgtcatcaaggacctcgtcgtcgacatgaccaacttctacaaccagtacaagagcgtggagccgtggctcaagcgcaaggacgcgccgccgcagcccgggaaggagatcccgcagaccaaggccgaccgcgccaagctcgacggcatgtacgagtgcatcctctgcgcctgctgctccacctcctgcccctcctactggtggaaccccgaggagtacctcggccccgccgcgctcctccacgccaacaggtataccaccaccttcccaaatgctcttggtgtcgtgatgttgttcttgtttgttgattcgttggatccgtttgctagttgacttgtttgtgattcatcgggtgatgaattgtgctctggtgattgtgaaatggtttgcttgttgattgatgcgtagattgatctgacctggatgcttgtttaggcgatgcttgtgtggaaatgattttcattaggacgatagtttatttttccgatactctgatgtggtcatgaattacgtgatcctcttatgtgacgatccaatatttgtttggtagctagtagaaacttggtaaagcggtttggatgatcataagtgaatacagtgtggtgatgaaatgtgttaaacacgtgtgtggttctatagtcataactgactaggcgcattcaaggcattcgctgccccacaagtattctgccttttgtgcctgacctactgatcagaaatttgatatccaaccaaggaatagtttgcaagcctcactgtggtaaaactcatacttggatagtggtagtgtttgattgctttccgtagtttccacctctgctagcatacagcggctgatgatttagctgatctacgacgttaaatacttttggtgtgcattcctttggcacttatttgccttaacttgaattatagttgtctaatatgattattgtttttttatgtaagctttaggatgttgctaagtccatgacacgttcaccctttttaggcttccgctgttggggacgctaatcaaaccaaaacccaacatgttcatgcacatccaagctcgaggatatcacggggtatcggagaagagaaacttgctggatcacaaacgtagattgcttgcagcaaaatatgaactgaaaggaaagctttataaggctgtttgtagggaccctgatcttccagcagatatgcaggaccagtttcgctataagctgtccaagttgccaagaaatagctccatgacacgccttagaaaccgctgtatcttcacgggccgctcgcgcgctgtttacaagaaattccgcatgtctcgtattgtgttccggtcattggctaataagggtgaattgttgggtgttaagaaagcgtcttggtagatgctaacaaccagtagatcaaagcactagctctgcagtagtccagcacaataagtttgcctccatgcagtttttcagtgtttgcaacctgaaactatatttcaatcttatgaccagcagccaatctggcactctttcaattatttagttgaaccaatgtactgtactgtttttctgcctattgagcatttatgaagttaaaagttttggaccattctttttcccctgcccctatatatatggtatttttgaattcggagatactttttttaccatcaaggtgcgctcagtcatgataaatacctttacttttgacagtttacttgtagaattagttatacttactgataactgtttcgcagtatgtagattaatttgcttagctttgggttacttgaattctgttctatatgttattgctgtgcctatgtattgttgaaagttaataatcacacattctagcgaactctggtgcatgctactggttgctcttgcaatcgcattaaacatggaattttgttaattaaggcatttgacctgttgtgccatcagttcaagatgtagtgcttcataatttcaccgttcatgggcttaatgagtggatcctcccttgttttccctagatttcagcaacaaattcctttcctgttcctgctgagttcctgtttgatgtaacttgtttgttgatgttcaagtattaaatcttctagatgaataactcagttttcactgcctgattatatttgtaaagagaactagttaacatatcaatcttttagtgtctgatttggttcaggtcccctaattttgttcatattgtgcaattttgcctgattctatgtgcagttgtgaactgggttttgtattagatcatcttacgaattgaccggtttgcagcttggataatcattatagctgctgtctatatataatgatattattgtatttgattctatagtgtaaataagctaaggcaggtttttgttttgtctgatctaattttgtcatgaagcaaaaatcttaaacatgatctgatatgactggtctgttggtttaggccgtttgtcctgccccaatttttgcaaatgcccatacccttgtgattgctctgtcctatgaacatccattccctgtttcaggtggatacaggacagccgtgaccagttcactaaggagcgcctggattccatcaacgacgagttcaagctgtaccgctgccacaccatcaagaactgcacacacgcctgccccaagggcctcaacccagcgaagcacatcgacacaatcaagaagctccagctcgaggcctgagtgagcagtatatctctcttcatgagatgaaactctgtcgaaaaattgtaatcagccagcctcttgtttctctgcctttttagtccatcgcctgacgaataattgctggaacgcaggattcccttctgggcctccgatctgatgacttccatttccatcagatggagggagcattgtagggagtgaataatttgctaccgtattttacgttttgttctgtatctaattcggtttgttgttcaccgtccattccattatgtcgtgcggtttatgcatgaagtaattcatggattttacctttgtttttgtgatgttgaacatgcccttcatatttttaacccggaaatcaacaagcattctccgtaatctctggttagtgatcgggtttagccatatagtgaatcttaaattgaagcaaaacgaatcggatttggttcctgtgcagttcttggtattactgcaacttaggcggtcatattgtggctgtaggatgcaaatccaaaggcccaaatttaataggacactgtttattcagacaatccagcacaaaattattataacaatcatagtggcaaattaaagcgtgtaatgatgcatctaccaaatgctaaattgctaatggtgggatattccagataacactagaatgattcagacaggccaagcctcccaaggttttccatctcaccagcaggtgggacccacccccgttttgctcccagccaatggcgtcgcgaggcgcgagataaggctgcaaacctggagcacacactcgcctccttccatcgctgatgcagataagccgcgatcgcatccaccgttctagaaacgcagcgacattgcactcaccatctcagaaattgcatccaacagcagctgccatagttgcaagtgagctagagctcagagaagagaaggaagaagaaggcgtcaatggcgccccccatagctgcgatggccatgcttaagccgtccaagatcgtggcgcggtcatcgccggccccgtcggggagcggcagggtgcctagcatctcgctcaagagcctggccaagaagggcatgtcggtgttgtcgtcgtcgacggcggcggcgcccgtgtcggcggcggcgatggcgggcgcgttcttctcgggcgctgggcgtcgacggaacgcggcgctcgcggcgcagcagatcgcggacgtcgccgcggcggcggcgggtgccaacgacaaccgcgggctggcgttgctgctaccgatcgcgccggccatcgcgtgggtgctttacaacatcctccagccggcgctgaaccagctgaaccgcatgcggtcggagcaggtgctcgtcgccgggctcggcctgggcgcgacgacgggtcccgggctcgcgttcccgcccgaggcgtcgacggcgcagaaggtggcaaggctggcggcggagccgtcgccggcggagggcggcgacaaccgcggcctgctgctgctgttcgtggtggcgccggcgatcgcctgggttctctacaacatcctgcagccggcgttgaaccagctaaaccgcatgcggtcagactgagagcttgagcttgaagattgcatccgtacatgtgtgtacgtggtgtgttttgagggtggtggagtggagtggagtggtagtgacgtggaatgtggtgtacttatgccttaattaatcctgttcctaatcctctcttcccttgaacaaaaattcagtacagctcttcttcttatttgaattcatctagttaatttatttgtcttattgatcaatgtttgtttttgtttccccagtccggtagatgagcacacatgcacaccatagtacacttactagaaaaaaaatactagtggatcgacacatcgacctgtgaacccacttaaagtacaaataagtggataatcttaacatgttagtttcccatttatatgtttcctatttatatgtactataagtgaattcacgagccgactctcttacatccttcttacttaggtttgagtggattacttatttttcatccactcgaaccttttgaaaaaaaattcctatttctatgagagcacatatatagttttatcacagttatatagtttttacacttctatagttttgccgctgacaagtataatcgttatatcctgccctagtaaaagacgcgaatagtaaggaataacctaatatcaaataattaaaaggagtgatattttgaatccaggtcatctagcccaccattttgtggggatagccggaatacctctaggtatttctcatatcctgccctagtaatcttatctcatatatttatatagttcatcccactaagtgttgttaatgctatttcttttttctctcagtaagccacatcactctaattatttctagctattggatgatagatctatggttcaaattgtcacgtctttcttctctcataacaccaagtaatctcaattatttttaggccttaaaattcataagtatctatttgttttagttttaatattcatattgcatcttatttgtatatattattgtcagggttacagataaggcataccttttatcctacgacttatggaatataccgatatggtataccttcacgtatacggattgtttccatatacgttgttggaatctgttgcaaattacataaatatctctacaagataagtgatttccaaaatcctactcggaaggaatagatattctgttataccgtaccagatcaaatatctccaggccttacttgggggtcaagatgatccacggtataaaagggacctccagggaggggtgcaaggcatcgaatttcatcgcctacacacccaccatagttcacgaggccggagttcacggcgccaagtcgtcggatcttgtccaattcatcaactacgatctcgccggtatcgtctgtttcgtttacttcctttgtaatctgtgattcctcatcatcaatctcatataaaccagactagggctattacctgacaaggggtctgaaccattataatccttgccttttgtggggtctgaaccattataatccttgccttttgtctgcttgatgtcgtactacatagatactcgtttcaacgtacccaaatactcaactcatccggtccatgagtaccactcgtcgataattatgcgacttaatttcccgcagcatcatgacggggtatttatctagttaaactaaatttcttgtgaattaaaaactgctacagagtagggggaaaagaaaaataaattacagtacctagacggtcaaggtcaaagcatcgcatgcccttgcggctttgactcttggcttggaggaagacgcctgaaagccagtgaggctgagcagcaaggctgcctggctgcgtcgtcacacgccacgatgcgtcctcgtattccccatctccctcgtcccgcgagactacggccactactcctacgagagtacgagtacggaggccgcccttgagttttcctctcactgagaggggttgaactgtaaaacatgtgttgtacagtgaaacattttgacttttacctccttgttttgtttgggtgtatttatgtcctgtttagttcagactaaacttccctcaaacctttaacttttcatcacatcacatcacatctaaaacttttctactcacataaactcctaactttttttccaaactaacaactttccctaaacttctccccaatttcagaaactaaacacagccttagttcacgccaaaattaaaagtttgattgaaattgaaacgatgtgatggaaaagttggaagtttgtgtctatagaaaagttttgatctgataaaaaagttgaaagtttaaagaaaaagtttggaagtaaactcggcctttgtttgacccttctggccatctatcggatcgccgtgcccttgccttgcctgtatggacgcattgtcgtagtactgccttcgtgcagtgcagatcacatatatgcgccgtgatgtgtcggccgggatggcccaccacgtcagcatctgcacgttttgcttcatcatactgatagtacaggattacaggcacagcttagcagctactcctactaatagagagagaaagagaaagagaaagaggaacaaattttggagctagtaaaattgaataaattttggagcaaggtgaaacaaacactggataaaaaatatagtaaatacatatatgtcagaaagaaaaaaatagctgaagtcaaattgtactatcagaacatataatagttgtgttccatgtcaagctcgaaaataatttaggatactcacaagaaaataaacgatcgtctacgagtaaacatcatttccatgtggattcacttaaaacggcgttcttctatatctatacaagttcaccaaactaaggatcgacattgaacacataacagtcaaagacacagacatgatcgactatgctaacttccattcgagatctataatttcttaaaagataatttcataacataaaacagagtaatattctagagtaaaataggagctgatgactgatagtacagatccaacggcgatgacgtgaacatccaccctaatccatcacaaaacccccgtgattcccataaaaatcctcctctccttttttcttcctccgaccaccccaccacatcgagtacggcgggggaaaaggcgacaccgcaatccggccgcccaatggcgcgccgccacgtcaccccgactcgccacgtcagcaagggatcacggaaaagcggagagatccccctcactttccctccaaatagcttggctcgctgcttctcttctcccgcgctttttttgcagcgaggtccctcaggttgcgtggtatttgcgttggttgggaggggggcaatggcgagcggcggcgcgcggcggaggaagggtcgccggggagggagggggaatgtgaagaggaggaccaagtatctgagtcttagtcggttcttgattaagaaggaggaggaggaggaggtggtggtggtggcggtgaggtcgccggagttggtgcccaaggatgaggcgccgtcgtcgccggaggacggtggggatggaggtgaggatgaggaggaaaagccgcagatggagccgttcgcgctgcatcctgagccgtccacgctgttcgcggcggcgccgtcgctcaccgacatcctcggcgcctccgctggcggcggcggcggtggcgggggcgagtcgtcgtccgcggcctcgccgggcgtttctggcgggaaggagctctccggcgaggaggatgacctggcgcggcgcgcgctacgggggcgggagcggtgggtgtactgtagcagctcgtccccgagcgcgacgaccaccaccaccaccacgacgtcgtcctcgtgctcctccgcggcgagcacgggcgcctcaagcggcggcgccgcggcgcggtcgctgctgctgaagctcgactacgaggagatcctcgccgcctgggcgggccgcggctcgctctacatcggcggcgccgccgccgccaccgccggtggcacggacaacgccgcggcggagctggagctcgactccgtaagcgccccactcgccccactcttcttggacacgccccgtggtgacactgacaccggcggcgcatgctcgtgcaggtgttcgtcgaggtgtcggcgtcgcctgagcccgcggcggcggcggcggcatggagcgtggcggagccggcggcgagggcggagaaggtgaggcggtacaaggagaagcggcaggggcggctgttcgcgaagcggatccggtacgaggttcgccggctcaatgccgtcaagcggccgcgcctgaaggtgaccaacttatctcaacctgaactagttgctgcatgcttcataagttcagaaaaattcttacctgaactgagctgaactggatttgctcatttattgattcttcagtaattgtctccagtcccataaactgtaaaagacttgtactttgtagtgtaaatgattcatcttgtcatcttggatttggcatggaccagcattatcattccgaatcagtttagtctaactggttggattcagtttattatcttcaggaattactgaatactgaataaggaatgtaagcatggaactttggtagggactaggaatcgaacgattaattaacttggaggcaacaggattagattctacttcttagtagatgtaagctgctgaagtgtgggtttcagaccttattgtataggctaatttatttctaatatctgaaaaaaataggttaggcatttccactatatccttttttagttagctctcatgatatatttctgtttttttgtctgaaattccttaataaagcttcagttgtctgctaattgcttatcagaagattagtacacttcaggcacactctgagcaaagccaatggatcatacatagtattgaacttctagtattaggtgataactgaactgaaaaacatgatgaattcacacatccgtggctggacatgttgatctttcactttctgaactagaaagcatcaaaatgcactttatggtttcactttctagctgatagaagaatctcttatgtaaaatttatgttcattgatataactgtgtgtccgcaaaccgacaaactaagaacttaacagtgttgattcatgaattgaaacctgctagactttgcatcctggaagtgcaagaaccatcttctacccatagtccatacatttcttttacttgatgaaactctgtcctgatgaaaccttttggcatttcttgcatcgctgcactgcagggccgtttcataaaggagaaggaaggcgccgcaatcacatagagaaagccagctccagctgcttacatagccttccctgctctctccaatgccatggtggatgcatcattatgcatctctccatcgcttcttcgcgtgtacatgatctgttagttattttgtttagttctccagtcctcatcatgtccaaatcagttcttctgccctggggctgcaagttgtgagccttcaggtgcagagatgcagtgtggattatgtctcataggatgaaaataacagcaattcagttcagttcagccatgatgtgcccaactgttcatcaacgatcagttcaacattttgtaatgtcttcaggtgctggttgtcgttgagagatttaatattggcttctccacaaaatagggcaaaatcatcttccattatttgtaaagaaccagtaatgccttatttggggaattcgagatttggacaggtaactgttgagtaccaaataatcggtgaaaatctagaaaactgggattgttatcccttgacttctagtttattttttaaaaaattttataactatatattcttaaaatttaaataggaatctatttagggagctagagattctttaaaaacctaacagaaactcttcaaacagaaccaataaactgacagaaactcttcaaacagaacgcaatcgaagggaattcatcaagggcaagagatgtcaggatcagaatcgtctaaccagtgcacagttcaactgatctgctccgtttaatcatcctggaaatggactgtattagcggagtaatagtattagttggtgtaatttttctgaagaaattactgatgatactgtagtatgcagctggagcagatgcttccggtggcggtggagccgttgcatgcaccgttctgccgccgctgcaagtccagtgtcagctcacgtgagtgactcatggccccacctgtcagcgtgcatcggtactcagtgtgttgtccttttgcttgtggctgccaggtgggccccactggcaggcggtttggccgtgcgtggggagcagcatccgtggtcaaacttatgctgttcccagtaaaactgtaaaaaggtggtgtaaccaacagctttcgacctgttcactttgacgtaaaaaaaacattaccaatttttggtatagttgttaaaaattgtcaaaattttggcagtatttcttatatagttataaaaatttgacaataaactaaatagccattttttaaacaactttatcaaaatttggtaagattgaaaatggcaccaaagtgaacaggtacttcgtgtcgggactcggggtggtaaaagaaaaaagcgtgagatcagacggtgaatatcgaacggtggggagagagccgaggagaaatggacggttctcgttagcgttgttgtacagagcctcgcgagatgggctgggcctccgtggaatagtagaaggcccaaatggactaaacaaggccgctcatgtgaatacaagcacacggccttttttttaatttatgggcttttctgagagcccatcacttttaggacttggttagttcgcgaatagaaaatttttaggtgtcacatcgaacgtttgaccggatgttggaaggggttttagacacgaatgaaaatactaattccataactcgtctaaaaactgcgagacggatttttaagcctaattaattgtaacaccctgaaaattcgaccgacaaaatcaaaactctaaaaatacggattttcaaaaactttttaaattaattgcatcatgccgatcttattcgtctattttacctggatttgatctcgaagattattaatcgtgagtaaagaatagttaattaggagtaaaccgtaaaaacaaaattggtaaaatacatacaaattaaaataaagattaggtggggatagaaataaataaaatattatcgcgactatatttggatcaattaaatttaaatacgatggaataagaattaaccctaattaaaactcaaataaattatataaaaataaaatatgagtaatattaatctagggtgaattcattagttaagataacacaaatattgagtaaaatgcatatatgcaaaattaagaattgtggaatcaaatttatatggaaaatacactaaaatcgggttaattagaaaacggtactgttcattgcacctaaggtattcgacgcggtcccctaacccagctcctcctctttccccctctccctcgtcgcctgccgccgagccaccgtcgccatcgccatctcatcgccgcggccgcgccgtcgccgtc

SEQ ID NO: 10250 - DNA, 26703 bp, Oryza sativa
gatcaaagtatttgtagttttgtgaaatttacttataaaacaatttacaaaaaaggtgaccagttcaaaatttaaatatgaatattgagggattaaggttataaaccaattgaatttaaactttaaagctaggttgggtatttttgtatggtcgataaactcacctggagcttgacgacggtagtcttctggttgctggccaaggtgcagagaaagatgatagtgataccgacggcggcggccaacagcacgtacggacatatagggcagctggtggtatgggccgccggagtcggcggcgatgatgacctcgtcggtgatggcgggtagtagtggtagtgtctcaccgacggagatgacgacgacgacgacgacgatgacgacgagtaggaggagggggatggggaggtgtcgcggccgcccatgacgcccccggacgccgcgtgcgcggtgcgcggtgtggccgccgcaacgacggcggcggcggcgccgagcagtagtagagagagatcagtgggcccctgcttcgggaggaggcgccctcgctcgccgcgaacgcgagggtaggcggcggcggtggcggcgccatggccgcacgactgggccagaagagatggcggcggaatacagtcgacggtgacggcgacggcgaggccggcggcgcgcggcatggcgttctcgcgagggggagcggcgaagggcggcgcagaccggcggcgatcgccgtcgcgaagcggctgggaagccgaggccactgcatggtttggtttagatagcaagggtttgttcaagagcgatctgtcgtacgtaatcaccagtaaattgttccgacaaattagcccaaaaaatagctaatctcgcgaaaattaattacttgtgtgtcaagcaaataatttgcttcaagattcgtgatgatgactacaagtctatttggttctctatcctaccaattcaatagtagtaccaatatctagattaattttggcactaccaactctttcgatattggtaattcgcgcgtacgcgcgagatcagcaagtcgcgagcgtttcgcgacggcaacgcctcagcttcatgtctgacatgagcctgctgggcctagtgacttttcaacaatgattaacgatgattcaatagtgacacactcaattagtagtagtatatgctaattgtaattggaaaacccactgcatacatacatacattgattagaacatttaactaaactttttaacataagatttaattttaaaattgaaaattttaaaaactttcaactcagaatttgaaaactttccactcagcatgtgaaaacttttgattcaaatttgaaatttttcaattcagaatttgaaaactttccactcagtatttgaaaactttcgattcaaatttgaaagttttcaactcacaattttagaattttcatctcaaaattttaaaactttcgattcaaatttgaaagttttcaactcacatttttagaattttcatctcaaaattttaaaactttcaactcaaaattcgaaactttcaaatcaaattacaaactttcaagtcaaatttcaaaaactttcaacttaattgttgaaactttcgacttaattttgaaaactttcaacttcaatttcaaaaactttcaactcaacttgaaaatttctatgtcaaaattttaaaaagttgaaatcaaaatttaaaactttcaactcaaatttcaaaatcttttgactacaaatttaaaactttcaattacttttctaaaatgattggtaactgaattatttatgtttgttacggttttaaaaataatactaataacagtaattaacactaattatcataattagcggcggcagcgcgcggactagtcgtcagggggacggcgcggctgcgcaagttaagcagcggacgcgcacgcgcctcctaggaacccccaattctttggtaggatagagttcatataatatgtgtttggtttgctaccaatatgctttttatagtgaagaaagttctagagtactaccaaattaggtatgggtattgccaatgcattggctctaatccaaaccaatcaaactactatttaaattaccaaacaattggtatggcacattttgaaatcaatccaaaatggccctaacatgtgcagccggaaacaaacacgagattcaatcgtaaattctactttattttggcactcgttagttgtgcgtttagataaaagataaagttaggccatgaactacaggaaaactattggcacatgactaatgaaattttaattattattataaacttgaaaactcgatttatattaaaatgacttatatatagaaagattacatatgaatgcaccgtttattagtttgaaaaacatgctaacgaaaaccgagataaaatttataccttaatcagaaaaataatgaaacttcaaaacacaatttaaaatgcatcgttgagcgatttgagtcagtttctctcttataccgtcagaccactgttccgtccacctcccatttcttttcttttatcccatggatttgtttcggtccaacaaactatttcttttcttttattccatgatttcttttattccatgagatttgtttcggtccaacaaaaagtacctcaagttaccggtatctcatggtaccaaatcgtttccgatcgttgtttctaacaatgcccatcctaccgagttaaatccaaatatatatgcttcatatatgtgtccaaattatataaatgttatttaatttagatgatgaatagatatcaaaacgtcctttatatatagtatgaaacagaggaatatgcttttataatgccattaccaaactatcggacatgcatggtatatctgtggctgttgtaaatttacaaattacaactcacatattagacttagtggcgaatttccatatgcttgtgaactatttaaaaatcattctcattcacaaagaggaatgagttcgtaaaatgcttctataagtgaatgcattcaaatcattacacctgtcatttttttttcagtatttcatttctttaagaattgagatcttgctaccgtgactacaccatactccctccgtcaaaaaaaagtctacttatggctatatatgtggacataagctatatccagatacatagccagaagttgactcttttttttttactgagagtagcacctatgacataacttttcaaatccccgatgattcttcaagtagttgctgaatcttggcattcttttgtagattcttagttggactgcttagaatcttggtcttcctttgtagattcttggttagactgcttaacatcagtcacattagcaacttcaataaaatattggtcttgcattacagatccttggttagactgcatagtttcggtcacactagaaactgcaaaggaatcttggccttccgttatagatctttggttagattgctcgatttcagttacactggcaactccaagggaatcggattctttcaataagggcttaagatatggatagtcctttagtagcctctcttctggaaggatatcacctatcttttgtggagtccataaaacttgaataccctgaaacaatatgtccaatgcaaatccaattaggaatgattgagtaagcaagcatttgacaaactattactgttccctaatctcatctgtagaagcatctgctcaaacttaagaaaattatacctcaattttgtttgcatgtatagagttgagaattcccagtactgtggtcagatcagaagcgcttctgactatggggaactccaattttccctcagcagcaagaagaatggttaactgcatgatttgtccaatcatcccaagatcatatatatgttaaagaatgtaaccaacatgcctcgatcaaaagaaattcatgtgtaaatgcatttgataagccatggagagtttatatatacataccaccagatactcgttttcttttccgaggccgggtttcaaatattttttcttcatcttgattccttgcacgttgtatagagtttcttcatcaaacttgctcctctcctcgatagaaattttatcaaaatgtttctcccagcaatcaccccagaaaagcagtctcttttgcaagtcagcctaagttaaaatggcacgcccaaattacatgaggtttgtcatctcaaagggaagaattaattaggtaggaataagaatgttatatatcgccaaaagagtaataaaattgtgtaaatttcttaccgataagcttgaagagatgcagatatctttgtgacggttcaaggagcatatggtctctgtacaaatggtgagcaaggaacatacataaacaaaactaccaaggaatgataaacaagctaagctagcagtttttttaagataatggataaaatccagcctctatatccaaagtggatatacacagccaaagctaagctagcagttgatgtattagtgatacaaattgtacatatctactagagacatatatgcagattacagagataccattgttggatgattgttgaaatgttctgcacacacatgcgcatgaaaggtcaaatataaatgacctatctagctatgattgaagaaagaagaacaaaaatcgagttcagttcaagatatcgccacttcacagctgcggtctggctcttgagatacctatatgctaccccaagctaacttctgttgaagttgaattgggtatataccatttgatcagaattgcagatcaaatgtatatctaatcgcaaattgcagtatatatagaatcaaatgtataactgaaaaagaaaagaaagactgaagctgatgactttaaagctaaacaaaagacagacttcaattcaaagctaaagaaaagactggttacgaacgtaggatgcattaaccatatataggtgcaaacaagaatttagaaaccgcattaccggtcaacatgaacttgtcccaactccggttggaagtgtccaccttcctagcaatcccgttgagatccctctgtattatttttgtcagcccacgaaatgcaacctgaaaaaaaattcagacaatttaatcgcaaacccccaacgagattagtgtagcgatagatgcatacataccaattgtgtgacaaatgcaaattagactattgaaattgtgacaattacaatataagattagtgaaattgtaacagatgaaattatatttttgctagtctctataacatcaaattagttcaaatgaatccattttaaatatatccttatggtatatttatttttagatcagtaaaattgtgacaaatacaattatttttagctctactaccggaaaataactaatttttgttagcttagtactacagggaacttgaaacggcgaaatatgcaatattttgtgctagatttggggagaatatttggcacgtacgaatcaactgcaacccaacaaacttcacacacaacccatatgaagcacttcttgaatgatggagtaaggaaacacgcaagaccaatgcaatgaaaacacttcatatgctattatccttagtcactttgaattatcctaagtcaactcccttgaaatttgatcaattttacagaaaaaaatattaataatatctataacatcaaatgagttcaaattaatccatattaaatatatccttacagtatatttatttttagatcagtaaaattgtgacaaatacaatttagattagtactgatattgtgggagtggattttcatccatcgaggagatattctcttgttatttgcatgtcattcaaataattatgcaaaaatttgaaaaaaaaattgagaaaatgtattaacatgtgatatattactccacaaatatgcaagttcaaattcagcttctacatctcgcaacgaaaaaataaattaaactacaactagttaacgtatattcttagtcaaatttgtttttttcgttgcgagatatagaagctgaatttgaacttgcatgtttgtagagcgatatatcacatgttaatatatcttctcaatttttttataaccatttgaatgacatgcatacaatgaggggatatcccctcgagggatgaaaatagtttcccctcatattgtgacagatgcaattagattagcacgtgatcatcaattcaaagctaggttgggtgtgatatggtagactaactaacctggagcttaacgacggtggtcgccgacctgggccggaggaggtgagcggcgatgtaaaccacaccgcacgccacgtaagccccaacgcaagccacgccgtacgccacaaccacggcgcccgcgactatcaccgagatgacggactcgtcctcccgcgacgacggcgacgacgacgacgacgaagaggacgacgacgatgacgacgacgacgacgtccttctgcagtaagatgatggggacgacgagcggcggccgcccatgacgccgccggacgccgcgtgcgcgtctcgcggggtggccgccgcggcgactgccgcgccggcggcggcggtgagcagcagggagagctcgagagggcttctccttccgccggcctcatggtgggagctgctgctcccggaggaggaggaggccccctcgcgcgccgccatggccgccgccgcacggctgggccagaacaggaggcgggatccgggcggcggccgcggcagcgacggcgtcaatggcggcggcggaggcgtgctgatgcatggcgttctcgcgaggggatggagcggcggagggcggcgcataccggcggcgatcgccgtcgagaagcgggcggtgagccgaggccacgtcatggttgggtttagctagctagctagggtttgggagcgatttgccgtttgcgcgtaatcaccgtaactttgccctaataatctaatctactgcaaaaattacttgtgggtcacgccattaatttgctttgagatcggtgatgacttatgacttatgagtgcacattcgtgatgactttataacagaagatgaaagggatggcaactttgccgcggatacccgacccgatttgcatgagcgttggtattatttgtgatgttaactgatataaaaagttatgatgtaattcaaattatcgttgataactgatctctactattataaaaattaaagatgtttttgccggtacttttgatacgtcatctgtgtttgaatcggtttttaagttcaatcgtttttggaaatacagatccgtgtttgagttggtatttaattttgttcatttttagaaatacaggagtcgtataagaagtctctttaaaaaaacttgcatgctaacttgagacgatcgaacccctaattgcggttgatgattttgtaaaaagaatatgaattcccacagtgaattttcaccttagctaaaccatacaacaataataagattaaaatatccttcacccgttgcaacgcacgtgtatttttctagtaatttgataatttttttattttatttctttttattaaattacctatcttttgagttattatttatgtgagatcccttgtatacccactgaacaggcagggaaagttttgctcgttaactttagtgggtagggttcgggtgggccaggaaagttttgctcgctaactttagtgggtagggttcgggcggacggcgttgggtatggttttactctacccgtgctatacccaaaccattgccatcctttaattgcattctaaggtgtaaatattttctatatggtagtatataaataatatagaccatcttaaggtcctaaaattgcaattaaaggtgtaaatattttctatagaccatcttaaggtagacatattttgagtgaaaatgtttatctgactgtagcaattgcatgctaacaaaagtacagaagcacacattgtgaagtcataactcataaccttcctgaggcatcatgcaaacgtgaattaatttccacgtcatcattattagtgttagcttcggccttatatgaagttcgctgcaatggccaaaccttaccccacgtgaacagcaacaacaaaaaggaaaagaactccacagaaaaatggatgaattgcagcaaaatgcatccaagaggatagctgattgaataaactaccaactgattcagtctctggttcaaaagcaccattctttaacgccagaatttacagggtttaaattttgatgggcggaatgtacggatcaaactggcaatcatgagaacaactagtttgactaatgtactacctcgagtcacataatgcagaggtcgtctcaaaaatatttgtgcggaactgagtcgaagtcatcgtaatcgaatcttccaccacgctctcttccagtctgcatcaaatccataaacttaggaaacagtgggcagtgacaacgaaaaaaaaaaagctgaaacctttctgatgaaaatctgagctaaccttcattaaatatgcaggatcgcacgagatgttctcatcaatagaagacagcttcttggacaaagccatcaacctgacatacatatgttttgagactgaatcatctgatacaactcaaaaacgattaatgtttcattcatattaatttccaactcagcttaggggtggcgcactattagaaggatatgcagttatgctgactaagttattggtagcttcttttcttttgctttattcccttctcttttctgttttactgttatgcttctttagatttatttgaaaaattaggctgtgtgcacctagtgtgccggcaatgtaaaattttccattatctaaaaaaaacagccagtacgccaccaatttaactaagagtaaactcagaaactgagtatgaaaacaaacaaggttgccctctggccatgatatacctcagtgaagttctccaaaatcataaggttgcatattgtactagatacgatttttgtaagtgaaagctacatgcaatgtgccaagagctgaagagcagcacgaagggtccttgattctcttctcttggcaccttgcgtacatgcccaagatatacgtagcagtcaagagtggtaaacagaagacacatacctttgaatagacgagtcaatatgctcaaccatctcacagcttttatattgctcaggatcttcatgaaagctgaccatcccatccttctggtttatggttgcatggatctcaccatcttcaatctggattggcaaaaagtaaaaatatgtgatagtacagataatgtgatcagactgtatggggcaaaaaacacctaccatcctaagcacatgcatctcagcctccttcggggttttaagttgaacagagctggcaatatcctcaagcgaaagagtcaagtaggtctgtgtcaacctctggatgtttcgcttgtacattgaggagagcacttgcttcacaagtccaaggttgttgtcctgaaaaagaaaaaaaaaacagaggaaaggaaggaggtggttcagataaatctacaaatgggtttgccatgcagaactgtcaacaaaataatgcgtagcacgtcaagtagatagcaacttaagtacagttcctgataaggaaatagatatagtaaggagggcagctcaagcaactgacaaaggaaatactcaccgattgaaacttctcagcattcagctggatatactcctctaattcagagtagttacctttgctgtagcatgttgacaggtcaacataaacctgaaataaaagaacagcgcagagcactaatgacttcagaagcaacctaaaaagggtgtatgcagttaaacactaaaaaggatgaacttgcatcaagagcaaaatttagcctttatatctagggtggcatagacggtaacgtagaacataaaaatgtgagcattgcctctagtgagtaaaacaaatgtacttgataccgagaacaaactatgcagcaaaacaaaaaaagaaggtaaagcattgaccatgccaaaaatgaatcaaaaaccactaaatcaaaaaccaaacgatgagacaaagcatggggcatggctaacacttatagcattacattaaacagcatgcgactatcaagcatacattctttcatgggacagatgaaactaggattccctgaatatacctgagcatgatttttgaggttcctttgagcagttgaagatgtgtactttggaaatgatggaacctgtcatttaaatggcataaatctcagcttgtaatcctcctttttatataaactattgaacataacaacctattagcattgctatggaggggcaaccagtaaattggagagaataaatcttttgatgagcacatgtagaaatgtccagcttatagctcataatacaattatgaagattatataccacatcagttcaactggcagttcttataccacaggatgatctatcaacataacaaattttaggagatctgagctctcattaaagaccagaagctaaagctgagtgcacgtgtgcaaattcgacattttcgggaaaactaaatatcctgatacaagaagtgggaagagaatgcatgatcagaaatttagtagtgataaactaactagagtagtatatctctgtctatcaaggttaaaccacctgcttatggatttggatccctatgagttgggtaccatactgcttttctgctgccaatttttaacccatttacaaaaccgtagttgttttcatttgagagcccaaaatattggaccaattaaagatggcaacactaagattgtgatcacaattcagcggatgcaaacctaggcatccagcctattatcccattaacacaggaaaaaggacagtacccaattagcttggaattagaggttgactaaacttatctttcatcacctgtgtacatgttcctatcattacatgcattatactttgtttcacaagcttaccataaatatagactcacctttatctagcaatggtatctgaatttctcaaccatatatcacatatgttttaccacaaatcttatcttagccagagctggtgtatatcaattagagagcaccagatcgctggtcaaagctaaggaaaaacaagctttccctaaaagtcccacaattccacacactaaagcagcagaggacgcaaagcaggaagtggtgaacatacctgcccattctgaatgagcgaaactaggatgtatttcttgtaagcttcaacagcaatagcattcaatgatgacattgggacggtaacagcctgtaaaaatgcataacattgtaaacactgaaccattaaacatcaaacacaaaattaacatgtttaaagcctcacattgtgaagaaaatccagtgctatagtgaacttcttcagcccaatgtatatcattcccctgcaagagaaggaaaaccgttaagtaaacaaacggtacatattaaaaaaccataaaggataaagcacattcgtccatatacccatagtagcaatagaggaataagtcctttggctgatcaacttcgagtatgtcgtcttccaggacgcttaggccagccttgtactgcttcgcaagcaggcacaggagaaggtaatccgcatggatcggggtcagctcttcagacgaagtctgaatcttgcggattgccgcccgcagaggggcaatccctctaatcggcgcgttgagctgcatgacctcattcttgaacaccctacacacactcagaactgcacatacaaaatacaaatcgaagaaaaaaaaaggtggaatgtttagtccacgaataatgttctagtactagtaacgaataatcgatgcatgacagaattagatagattcgatttgatcattgaacagcacgcacacttatcaggcgccaagcgtatctgctccgccgagcaggagacgaggaaatcggccgtggtgaccaggaagtccccgccgccctgcgccctcaggttggaagccgaagacgcgaacgcctccctgcatcacggacgaaacaaccccccgcaaggtgggggaaaagtagattagcgcgacggattggattcggcgagcatacgggattagggttttcgcggacggcggcatcaaggggacgggactcacaggaggtagaggaagccgagggagtgggcgctcgggtggagctgggcgaggaaggggaggagggcggcggagtgggcgcgcaggggctcgccgtcggcctgccggagaaggttgtggaggtgggccagctcctccccgctcccggagaggccctggatgtgcgccaccagcgtctccaccgtctccatcgccgccgccgtcaccgccgccgccgccgccgggaagtgtgggggttttgcttgccgttcgcgtcgccgcggttggggtttggttttcttgtgctgcggcttcctcttcgcgtcgacctgtttggttggatgcggagagattttgatggcgagatcgatttaattgtgcggggatctggaccgtccgtttgagtgggggggtgtaatctgtgccgtttgtagcagattcagatgtgatctgacaaaatcgaatccaaatatgcttcgaaaggaagtttgattttttttttgttattcaaaacagaagtttgaatttgcagatgctcgtgtgcatttgaatcataaattcactgaactggaggtggtttcgcctgacaatatatggagaaactgtacatcaatttcctgtgtagctcttgcatgtgaatgcaagttttacaaaaactgacgaaattcctacagtccaaactggaggtcaaacagtccacaatcagaaaacaccttgagttgagatagaaacagaggttcatcatgaacagctaccaaactggaatgcagatagtcactccacaatctctgttttacaactattctcagtgcccaggtgacctagcaaaaatggatattacacaggaaactgtattcttttccaaaacttacagacgcttccaagatttcatcggcttcactgatggaatactcaagaactaagatcaaagcaggagatacgatatatcatctatgtaaacaagacagtatagaagaactgataaggaggaaaacaagctggtatacttgcactcgcaagtccagtattcttcattacaaacatataagtgcgtccgcaaaatcgcttacatttatatctatgaaaacagagagacaaaaatgacagccggctgactcctcagaagtcagaatccacaaacataggataggaatactacatatgttgcaggctaggatcacaatctagatccttagactcaagttctttgatctttctcagacaacacacaaacgatatttacatagtgagtttgtgcggcgtcggggatgcatccagatgctggagatgtagggcagcgacaagtccctgccatgtttctccagggcgagctgatgtcttcaattccataagttttctctgtttcctgtagtagtcttccagtagcttggtctgcatattgagagtttcacatttagagtttatcatgttactgtactacaagaacaaagctagagaactccataagaactagtatcatgcctcacaattcctctcagagtttaaacttcttgtttctgaaaatgcaagtttttaggggtgtgcatatagatggcaaattggcaatcttgcccatggatccaggtacccgcgggcgctgtgcccgatgggcatgggttcgattttttgcccaggggcacgctcgacccaagaccttagtgggtgccgccaggttttctattttgcccatgggtaacccatgcccgacccaagttttgtatatctatggctgatttttggccccatctctcccttggcccattcggttatgggtcgggcatgttcctgctccgtccgtgcccaacccaacccaacccattgccatccctaggtatgcaatcaggtgatacataaagcaggcctcattgggtgcatggtgcaatgcaaagctcatcagatcaatgctagtaatagacccaataagtttgggtggcctgaaaatacctgttcagcataagcacgcatcttctccattctcgagtcctccagacctaaaactgcagcatgttgcacctgagaaggccatgtacagctcccaaggctcggattacggtctgaagacgcagttttgctaaaatcaaaaagctgtccacagtgggggcagatgtcaccaccaaaccgcctcttcataaaacagttatcagcacatttgaagttcagaaccaagtcgatatccacaatctcatcgagaatctcctgaaacattcaaaaacagacagatcaatgaaattagtaactgtgttggacataactaaattcaatacatctaatgtcaatgctaattacatgataccgagaactttgttatttagttcaagcagacaaggcaaacaggaacttaccgcctgcatatgagtgcgtgggatcccatcaaggatgaatccagtttcacccttattgtatccctcctcaagacgcttcgtcagcaatccaaatataatgtcctcgggcacaagtttcccttcattcaccgaatttgcaatctgtccatgtcaaatgcagaaacaattcagcatattccaataccctgaaacacttgttgtataacatatccccaaagccacaaaatttccattcagaatatatatctttgcccacttgtgaaatggttctcaacttgtcaaactgctctacccaactagctgattaaccaagccatatatggttctcaacttggcattgtctgcgatgataacttgagaagctctaccgaatactacctgaactatcagctgttcagggaaagctacaggagagccagccaaacgaaggtacaacaaagagggcaaaatgggaagcctgcaaaagaaggcggccgcccgccacaaagattccaagatcgaaagttccaaactttacgacgtgaaaccctaattgtgtggaatccccgaattgcccccatggcatcgtgtggacgcaagcaaattacggagatgcccccgcagccattcgtgcagaggggaggacgctgaccaggacatggccgccacacgccctttctctcagcatcatgcgatccattataatttacaagcaccagagaaatcgaagaatcaaagagtaataatgctgttaaacaacgctcggaaattgtttggtttgccaatttcgtggggaataaggaaaaaataatggatttgcttgctctggtgaaaagttgtggctacggacttacggaaaaacatgaggcaaatatcgaagatttcgtaatgatccaaagatatgtgacaagaaatttccagaagcactcccaaagagtggccaggaaacgcaggaatctagcctactttatgattaattgagcaaaagcctcgcggaaaagctcaaattagagttagagattcgcctcaagaaaagtttccaaaattgctgggagaaagaaaccttccaaaatgtgtggcgcgattccgactcgaaacgacataatcaagcgaaaaaaatatgtgatcgccaaatcaatcgaggggacaaactcaaatcgcaacaaattgaagcgcagaaacatcgatcgaggaaaaaaaagagtcgtataaagaagcgggtggcttggagcgaaatgcgggcgaaccttcttgtagagagaggacgccgggctgagctcctgcctgacgagcgtccccatggagatgtacggcacggcgagcacctcggcgaggcgggcggcgtgggcgtgcttctgcggcccgggcctccccatcaccacccactgcgggccaccgccgccgccgccggtggggcacatctccgcgacgggcgcggactcccgcgccctcgccttctcctcctcctcctcccactcggtccagtacgcctcgtcctccatagccgccgccgccgacgcccccatcctccgtgcggcgggggccagcgcgcgggccagtggggaccgcgcggcgccggcgagccgcaggacgccggccattaccgcgggcggctagggtttgcaggtgtagggtttttgggcgctggtggatgcgatgcgagcgcgtggcggcgcggggaggaggaggagaacgagagggtggtggaggtgaagaggaagaggagagccatttcttcggagagaaaagcgaagatggctttcacatgggccgacatggttgtgggccttaaaacaaagggaagtaaaagggccggcgtgtcggatatggaccggcccataaataaaaactgagggcaaactacataggggcatacataacgatatactccctccatctacttttgataattatatttcatcttggcataatgaccaaggataaataattatacctatcatttatttaaacataaacaagcaattcattaatatttacatttctcgatgcctatgcagtgtggacgaatggagagtcacgcattaaattcaagaaagtcattaaaagaataggtagttggattgaaatatgtctatcaaaagtaatttcttcatatttgaaaatatctctatcaaaagtagatggagtaagtaccattctaacataataacttatgtgtggtaacggtagtgtgacgtaagcgcaatatcggtattggatctagtatcatggtaccatacacgatactcataggtaccattatgaggttagcatggttagctatttcgttggaacagtattactgttttataatgttttaatttttttatgtaagaattttaaagaatttttgggggaattgaactgattcctaaaaaaacatgtaaaattcatatgaacaagtcctaaaatgtttttcaaataagcgctgattcactcttaaaaaattaagcgctgattcggcacaccaatggctgcataattacacttacacgccactgataaatagaaaaatcctacgaattccaacgtttgccgtggatgaaagaaaccaagaacaggaacacggctagctagccattcatcgatcgatgtgctaagtcatcgtcatgagctcgtcgtgatcaacgccacgacggcggcggcggcgaggaggcgaggcggccgaggagggcggagaagtcgcgctcggagcaggggatggtgaggccgccgccgccgcagtggtcgaagccgtactcctcctccacgctcttcagcagcgccacgaacgccggctgcctcaggtacgccgtcggcaccacgaacctcgcccgagcctcgccgacgtacaccgcgaagtgtcccctcggcacgtccctcgccgcgccgccgccgccgcccttcccagccaggtgaagcctctccatgagatgctgcagcttacctcccattctagctcactctctcacagctgcagctaagcttcactggatcacagattcactgtcactatgtcagtctgaactcgtccttgcagtatttgctacagtgatagttacggcaacttgataactgtctgtctgcgcactatagtctctgaaactctgaattttcgatgtgaattcttctgaattttgcagcaggtcgacaagggtgatgccgtatatatagtgctcgttttagtgcagggttaagactaaatggaattaagtgtttctcaaggtttatcgtggtgatgactgatgaccaagagacagtgtcacatgatggttctctgatgtgttcctttctcactagaatgagactggatttctatgaggacttttaatgattataatcccttgtatcagcatgcccacatatgctgctaaaatggactcttgttgagctttcatgtcatcccttgtgagaagtcctggtgctttttcaaattctgatgtttgcatttcagataacatacctaactaaccgattgtcatagtctaatttttcagtcaatcattttctgaaagaatttttttatttcagttctctgtcagtgcagggttcagtagtttgctgatttttctttttctttttgcagaaagtagaaacactagtacttttttaatgaaatccacgcaagacgcatatcccgtcgcgcgacaaacacgaaaaatatatcaatatcaatggccattccaatataaatcctgcataaaaaaaagaactggtggtggccgttcgttcacgtcacaacaaaaccggctcacttggcatgctgcatgagaaaatgcttgttgtttagccagcatgctgctgctgcaacaagtggacatgcagatggacccccaagtgtgcaaaatttcaattcaactcgtgtacaaatactcagagacatggccgtatgggtatccatcctcatgtgcttgaccaccaaatcattaggacctgaaaatggaggatcaatggagccaaatctctgaatttgaaggccaaaatgttcagatttcagactgaaaaggctataatcttcagaggtgttcagagttcaggcacagtagtacattacatcccagaggacatctgctgcatcaagatatcatccagctcggcacccacagcttcctgaccatggtaatatggtattggctcttctgtggcctagaattgcgcaatgtgcggtgcagcggcgcatgatcgatcgctggacagctaaggcgactcgtcgcgaaatgagtgacagtgtcgatcaatctatcatggctgcaactgcaagagaacatgcggcatgctgccgagatcaagtacatgatccggcacatttccctgacagacttgttcggatgtaggctcagtgatgactggggttgcataactgcataagcagatcttggatcgggaggttgtgttgcatgattgtgcagtgaattatgactttgaggttcttgctgaacaatttgttttcagtcaaagttcgattactgaagttaaagactgaggttggacaaaggaagtaaaacttccggtctttgcatcagctaaggatatatattaagatgaaatctaaattataagaacaacaacaacaacaaaatatcaggtgcaaccaaaaaaagaataaaacaatagagatgaaatataaattacaagagcaacaaaaaaaaagagcagatgcaacaaaagaaaaacagagatgaattctgaattgttggccaaagattcagcttaacaaaagagagagtgtcctaagatgaaatctagattacaagcagatgtgcagtctgagttgttgtccaaagatccagcttaacaaattagaagaaatgcagagatgaaatctgagttgtttgccaaagattcagctaactaaagagagaatgtcctaagatgaaatctagattacaagcagatggcagtctgagttgttggccaaagatcgagcttaacaaattagaaaatgcagagatgaaatccaagtcgtttgccaaagattcagctaacaaaaagatgcgtttgccgggagtcgaacccgggtctattgcttggaaggcaattatcctaaccgttggactacaaacgctatgcgtacatctgaatgaaaaacaaatattcaaccagtggggcatcttaattcgttcttttttatgatgatgtaggagtagttcataaagtacacgtcttaatatgaacaataaacttagcttatgcttatgtgcaatatgcatcccatgtgtttccattaaagttcttgactctggatagggaacaatagcatcaacggcacctatgcttgtctttcgattcaagagctagctgcatatgtttcagttttaatcaaacagcaggcatgtgtttcagttcgaagttgacaatttctgtccactgtggaaaaagtcaaccgagaacaggaagcacttaatttctatgtcatggatgcaagtctgaatctgacaggcagcgatgcctattaagtactctgtatactgttaagagagcagcagcttgaaggctgccccttgaaatgtattccttttcgttcatttttttgttagtctttgacctgatttggcggtgctcaaagttgaattttggccaatatttcaaaataagttaggcatgaccgcgctgaagtttaagacgcctcttgcttgactagtttgtagtttacacatacgctggctgaaaaattgttccaatgtacacattgtacaggagcttcttcagcatctgcacaactatctcacacgatttcagaaagttcagatagtctgaaacttgaatgagaagatcgatgagttgtctgctcttaccaatttgtcatgtactcgtattttgtaagttatttttcttttcgccgggccgtattttgtaagttttgttgttcaaactcaataatagtaacactgtaacagagaaatatctggaagttgctgtatttaaaagttcattctcagttcctggtcagtacacaccgaagtcataaatttcagtaagatgaagcgatttcgtttaaattttttaaactttcagtacaaataaaagttcgaaaacctgcaagatgaagcggtttcgtttaaattttcaaacttcagtaccaaaaaagtgcgtttgctggaagttgctgtatttaaaagttcattctcagttcctggtcagtacacaccgaagtcataaatttcaataagatgaagcgatttcgtttaatttttttaaactttcagtacaaataaaagttcgaaaacctgcaagatgaagcggtttcgtttaaattttcaaacttcagtaccaaaaaagtgcgtttgccgggagtcgaacccgggtctattgcttggaaggcaattatcctaaccgttggactacaaacgcatcttatggtagatttaaaaaaactgcaatcttatcaacaaatctttaatttctggtgcatcttttttttgtcagaagaggatcaatgctgaggtactgaacctaatgcagtaatgcataattgatgggtatctttttttttagataattaaccgatgactatcttttcgtcaatgagttgtgcatgagacagaccatgtgtttcagatgagcacttaaatgggaaaaacggaagaaaaaaaaagcaacaaggcctagtactttcatatgcgattgttgctccattcttgtttgttcaggaacagcactctgacaaagtgacaatctagtgcactcggtgtctgtccttaaaaaaaatgccaagttgaagcatatataatcatttagttgcacgcggcatgatcaattagcatccggtttcatccatccgtataacagaaaatgatacggaagtctgaatccaggaaaagcacagcaaattcagtgctctgcgctgtcttgagagcactgtgatgggcaccaagtctaggactgtcccaatctgtctctctccaaaaagtttcaggccctgtttagaaggtgtttagatccaggggtgtaaagttttgggccaaaaaaacagcttgcaaaaagtatctcatatagctgataagcaatttttgctgcaacttctttttattaggataggatcaatgctgggggtaccaaacctaatacataacggatgaccatattttgttttacataattattaactgatgatgcctgttttaaatgggaaaaacggagaaaataataaggcctgctactttcatatgcaactgttgctgaattcttctttctccaggaacagcactctgaccatctagtgcacccgctgtctctccgtaacaaaaaatgacaagttgaaacacatatataatcatttagctgcacgcggcataatgaattagcatccggtttcatttcatccgtccgtataccaggaaatgatacggaagtctgaatccaggaaagcacagcaaattcagtgctctgtgcagtcttgaaagctctgtgatgggcaccaagtctaggactgtctcactctctctctatctctcccccacaattttaagctttcaaccaatgctctgaatgtacgatgcaaatctggacagtgatgtttatgaatgcatgcagctcatgtttatcaggatttcagtctcttttcctcgcagtgtccagctcggctatttgcaggttgaaatcacaacgcattggatttgtgtatcttcgtattaatagagagttaaaatcactatactccctgtctctaagactctaacgtctcttccattccatggttatttcacatagatttagctcgatcgggaaaacaaggaaactaggggttcggagtttcattttccgaacccccaccctacaggtttttttttccccaagaatcgccaaaatttaactctgaaatttgatccttctgctacgttcttgcagactagcagtttttcacacctggccctaaaaagcctctgaaaaaaatttctcataatttttcgcattgacttagtgcataaaaacgatgagaaaaggggttcgcgagaataaaactccgaaccccaccaacacttcttttcactctgaaccttctgttccgttcttgcagatccaacgatgcctgacaaaatgttcaggatggctgaaacgatgatgttcttaaacgatgagagagaaaaaaatgaaacataatcccattaatccggatttctgtgtctgtttaattctccatgtacagagaagagtccaactagattgcacgcagcctagtggtaagtgacctgagtagcataccaagcttctgagtttaaatctctgtcgaagcgaatttcagattaggttatttgagggctaagttccctattcgattatctgcatcctgaaagatgaaaattactctattcccccatcctgtaggaatgatgtatgtatccaggttaatgaccgtatcattctgtctgattgtttttttctttttttttcaccgatttagttcgggcaaacgttgaaacatggggttcggagaattggactccgaccccacattcttgaaaaattacttggacatgggtcgaaattggcaacaactttccatcaaatgatgttatcatacaagtagtacaacgaacgatctcatcagcaagaaggattccaattaatcctcagcaacaagaaaagagaacacaaaaatccgagccgtcatagctagctaattaactagaagctactaattaactaattaacagcgagctagtggtggtggtggtcgtcggaggcgatggcttcggcgacgaaggaggcgaagtcgccctcggtggcgcaggggatggtgaggccaccgcagcggtggcagtcgaagccgaattcctcctccacccgcttcagcagcagcacgaacgacgggtgcttcaggtaagccgtcgggatcacgaaccgcttccgcctctcgccgacgtacaccgcgaaatgccccctcggcacgtccgccgccgccgccgccgccgtcgccgccgacgacgacgacgaccggctcctcgccaggtgcatcctcgacatcagctggtacagcttccccgccatattatcacagtgatcgatcgagcttgtttattcttgcttgcaattaactgagctggtgatgctgctgtatgtgtttgtctgaaatctgaagagtgaagtgaagtgaagtggagagtggtgagaggcaaagctgcttatttataggtgagccgtgagctcgatgatcactcgatcagcatcactgcagtagcctagcttctttgttggcaagctggacatgtcacatggacgcatgcatggtcatgcaatataaaaagagagagagaactttacggtatatactgcctctatatactagtagtatatagatgtgcaaaaaggatagaaaattaaaaagcactttcgagtaatttcgtggttgagagttaatccgatttaattgggacatgctcatgccgtcactggatctcatttatgcgcatgagagacgcattgcagtcgaacgattgctgctcaattctaatcattatttaaaaaaatctatgtactttggttatgaccaattaccagttaaataatataagttacatagcaggtgtgtgtaaaaaaacttataaattttaagtgaaaaaataaagtagtttatactattaaatcatttgtactcaatatattggaccatacaagttcttatgtagttgtgcctacatatgtggcatggtcgtgaatataatgcagctgcatccatatagatgatcgaacctggaccagctgccaatgtctgggttcagcaactatgacacagtacagtgcattgtacattgcacagtgagcaagctcgctcgctcgagaggcagctccaccaaccatggaccatggctgccactcgcatcaacgacactcgcactgggattctactgccactcgatcatggagctctccaagaagacgacggcatctatcctgcaatgattggacggtcagctagctagctatagctagcagcctgaattgtttgctgggcgtgtgcaaattggcctgaattatttaggatttttcagacacacgcacacatgggctgcatactgaaatgatagccgtagggacattattctatactctaatacatcccctcattatttgtatgtcattcaaataagtatgaagaaaataaaaaaatcaacaagatatacaaatatatataaggttgaatttaacttgtacaaatatacattaactacatatagctttttttctgttgcaatttgtagaagttaaattttaacatgcatgtttgtggaatgtaatatgtaacttgttggttttttaaataaaattataaccatttacaaaacatgcaatcagaatctactcccgatatccgaatgctccagaattctcgagcaataaactgtaggctaacagcggctggaggataccaaaaccgggggctccaagatcacatctcacatggattcatggatggatggttttggtatcgaggagaatatggaggaaaccaggaaaggggattatttgtctgggcctgaatgaatctgcagagagtacatgtgggcacagagaaattaacctgcatgtctctcgatcaatttgatcatggatggtcctgagaattcagaggtagcagtagaagtgtacggccagccctgtgcaacctgcaacatgcttgtaatttgcatatgccgccttgtgatgaatgttggataatcggtttttgtacgtacgacgtgctcaccgctagagatgcagtaagtctcactacacgtataaaattaaactctatttcatactccatccgttttaaaatgttttacaccattaactttttaatacgtgtttgaccattcatcttattaaaaaaatttaagtaatcatttattcttttcatatcatttgattcattgttaaatatactttcatgtacacacatagttttacatattttacattttttttaataagacgaacggtcaaacatgtgctaaaaagtcaacggtgtcaaacattttgaaacggagggagtagtttatttctcacttaaatgctagtagaaatttggaaaaaaaatagttgaaagaaagctaatattagttgccacatatttgtacttagttgaaagagaagaattgagataataacaaactacatatttgaaactagctacaacacagacttcaatcaacgagctttataagtaagtgaagtataagtagaagcttttttatttgtttttatatttcatctctttttaatataaacttgtgattgtgtgtcttataacagatgtcggacatctaatccatttctattatttaaaaatgattaatgatgtaatatgcatgtatgtgtagctagtcttgtcatatttctctttttttagataatggaaatgaattacatatccggtttatgtcataagacacagccatgagtcttgtcatatctctctgagtcattaacgcgtgaggcttgtttgtttggagggaattttgctagaactgtaactgcctaagcaattgtctaattgttcaatcatacgtgacaaactgtgacaacttaagaccgcaaagcaaacatgccgtaagtttttatttctacgtgctaaaccttctgtaaaaagcggggaccaaacccgagaaaaagtgtggtacggatggtgtgtgtggcccgtccgacgtgggcctccgtattgactgcattttgggcctcactgtgttacaatcgcaatgacaggtagtgggggcccataatctttgacgggccttactattctgaggttgagactgtaggagattgtgggctaccgtattctgggccgtaaagtaagtactcgtgatatgtaggcccaatagcaatgaaaaagatggctgtaggccgctagcagaactgggttgtcaactaagtagtagaataagaagaagagaattgggctgaggaaacatgtcaatccaaactcaataccaaattgacctactagcattttactccctcagtaccaaaataatttcatttttcgcacatccctcatataccaatacaaaaccaaaaacactattgtcgatgatatgggcccggagatatcacgtctagagggaagaggccgccctcaaacccacgtggctccccgcgaggggggatcaaacccggggtggagcggtggctacccccacccagctagagggaggaggccaccctcaaacccacgtggctctccccgaggggggtcgagcccggggtgttgcggcggctgctccctcccagcttggggttgggccgcccccaaacccacgtggctccccccgaggggggtcgagcccggggtggcgcggcggctgccccctccaagctagagggaggaggccgccctcgcttggggtcgagcttccctgaccccctccacgtatcaacccacgtgtacaggggg

SEQ ID NO: 10251 - DNA, 53883 bp, Oryza sativa
  unsure (1)..(53883): unsure at all n locations
aaactaaaggtctctaaatggctgtagattgaagaaactgtgtaagtgagccccccacccccccctaaaatttttgttcctagatccgcccctggccacctcctactgtagcctcttgaatcagaaccgcaagccggcacgccttcttcgcctaagctcgcgtatctttaatcaaaactatatttttttccgccgcttccacgtaggggtgggcatataaaccgagggccgaaaaccgacaccgaaaaaaccgaaaccgtaacctaaaaaaccgaagtcccggtcttcggtcacacgatcagaaagaccgaactaacttcagtgagttcggtcgttagggccagctaaccgaagaccgaaagtaccagcattgcaccaggcctccagcccattgatccctcgcctccagcctattaatcccttggctaatcccatcatcatcagaacagaagtacacgaccaggtcaacaaaataaagaaaagaaagagtcagatcttatcccctcgatctcgccatctcggtaactccctcgtctccatgaccccacgctgatgccatgttgcgctgttcccgtatcccgtcgaggcgttgtgactggcggggttggcgtgcggcggcgttgctgatggcgacgacaacggcgacatacggccgtgatccaatcggagcatccgacttcgccgcgcacgggaccacgtcccgccctccgggagccagctcgtcgatgtcgttgtcctctcttcctcgagccaatcgttgtcttcttccccaccgaggctctgcactgctcgtgcctgttgaagggtttctttccacccatgccgccgcgtgcctccggtctgccctctgatgtcttctccgctgctcttcagggctccgacgcggcgacgcgtgcctcccggctgccgcctgccgttctctccgccagctacctaggctccgggcgctacatgtagtgtttggtcaaactcggttgagaccgaagaccgacccgaaagctcggttaaccgaattgtcggtttctggatttttatggacaacttcggtcatctattttcaaagaccgatcttttaaaaaaaccgaactacccgacccgaactttcggttataaccgattgcccagccctactttcatgaacgttgctaccgagcaaaatccttcccaccggaactgtctcctttatcggatctaaaccctcgcaactgtctgccaccacatccgagcggccgcatcctggtgaacgcagaacatcgaagggagaagcgggagcgaggggaagcgacgtggagcacggaggggcgtgcggggaggatcaggaggaagggaagcttgcggcttcgatttgacatctggaggtgcggagaacgagagagagacgagaggaatacgcgagagagaggaatacgcgagagagaggtggcaattccgggaaggggaagagataagggccttgtttggatcctccgggctattaaatagccctccggaatcttacgatttaggagtattaaacgtaaattactgacaaaacccattccataacccctaagctattttacgagacgaatctaacgatgtatattaatccatggttaacatatgattattgtagcatcactgtagcaaatcgtggattaatatacctcgttagattcgtctagcaaaatagcccaggggttatggaatgggttttgtcagtaatctatatttaatactccttaatagcaagattccggagggctatttaatagatcggaggattcaaacaaggcgaaggtttctgtggtgtgagaggagagaaaggttaccgccctcagtactatggcccacagatagatgcgatacataaaatatctagttttttaggctggaatcgcttctttgtgggacaaatcctcccctccagaaatcgcctctttctgggacggagggagtagtatagtagattgtgttcgctaccactagttgggaacttatctccagcgcacggaaaacagagcgatccattagcgcgtgattaattaagtatatgcttttttttcaaaaatggatcaatatgattttttaagcaactttcgtatagaaaacttttgcaaaaaacatactgtttaataatttgaaaagtgtgcgcgcggaacacgagcgagatgggttgggaacccatcctaccgaactatgccttaaaaagagtgcaagagtcaaaattcagatgaagtaagaattaccagaaatgggaggaaaaaaaacccaaggaacatacaagagcaaaaggcggcttcttacaaagggtggaactctcaggcttttttttctgagatagaagtaaagtacatggtttaaggtaacatctccaaaggggttggagaataacatctgttatgcttcaacgtcttgtcctaccatggagatgttattctcaacagaagcaggcgctgcggcggtcaggtttgcaggtagcttgggcagcagcaagccagcaacagcaggcaacggtgacgggttgggccgacggtagcagcaagcggttgtgccttgcggcttggatgacagcaacaacaggcggtttgggcggcaatggcggcagcattaacaggctgtttgggcagcagcaacaaagccaacacatactacatcactagcagcaggaactgctaggaagattttgtgacctcgtagcaatgttctgttgtgtagtcagggttgtcaattgcaagattttgaatgaatcatatgatgtgttaatctttcaatttcatgggaaggggtattcttgtcctaattttcataaaaaccaatcttctaatggtgtttatctaaactgtcagtccaatagcaagtatattgaattccaaccattttgatggcaaatatgcaattacactttttacagtggcaaatccacgataccggttcaaactagtggcaaatatgcaattggcccttttttccttccatttccggtaattctggtcagaatatctccttcatcgatatatatcctctacgtctctttgatagatgacatcattggcatcgccataacattcgccgtattcaaaatatataaataccacttattttgttgtgacgtgttttatcattaaataaactttacactttagcatatttatattaattttttaataaaacaaataatcaaatgttactttcgccagtttatattaagaaactagacaacataattgactttcgccagttttaccatttgccgtattcaaaatatttatataaatatctcttattttgttgtgacatattttatcattaaataaacttttaaatatgatttacactttaccgtatttatattttttaataaaacgaacagccaaacattatttttcaaaaccaacgttgtcatctactattaaaataattaatacagagctagtataaggcaaacttcttaccttctttttttaaaaaaaaataaagaacaaattctgaattatgactgtagcgactaaaccgcggacggcttgacacgagcagatgattcacttgagcattatgctttgttcgttcctgggagacctgggagattgagagagaacatctcgttttccacgcacacgtttcccaatatactaaaccgtgtatttttttgaaaaaaaatctataggaaagttactttaaaaaataatattaatctatttttaaaatttaaaatagttaatactcaactaatcatgcgttaatggtctcaatcctcttatctcctctcaaacgctcatatatgggaggaagtgtgaatggaagtgtcatatagttgactcacccactagatctcattgccaatagtgatactacatactactatattacataatacgttaaaacggtcaatgagaataccgaaaatactttaaatcggtctactactatactttattgtggaaaaaatcggatgctacttatactttatgtgttctatttttttctcttcacacctacagcctagtgtgtgcttctgctcacacgtgcaacctaccatgtgccttatgtgtaataaaggataaagttttattaccaagttttaaatactttttttcttttaaattactcatcttttcttgaatctatttataccatcgtactaattacaattaaacttcataacaagatctaacatgattatatcgtcaaaataatatatatgtttcgaccgttcaaattcgatgtttcacgtgtgaaaagaaaagagaatctttcagttggaatccaaatatgttgcacattgaatgttttagttggaatccaaatatgttggacatttttaatttttcatgttataatcaatttttatctattgttgtacgtggtgttatgtggatgtgacttattttgatattttgttgattcatttgttaatgttgcaccttgtattatttggatgtttcagtaaatattaagtgatgtttcaatcgttacaccccgatgtttcatatagtatataaaaatgtttcaattaacaatattatcaattgttctcataatatggtcatgcttataaagatttaaattgaagggtgaaaatgaataaaacggcgtaatcggattgtagattgtatcaatcatttagaaaactagatttaaaaaaaaagtttgcatagaagtgaggcaacccgacccatgagaggagagaaaaatacaagctgcagagaatcataccccgatccgtagttatctcctgagaatactaatgtccacgaaacaacaacccaaattcaacctaacactatttaggaaagacagtcaataagcaacgagatgccatgcagcccaggcaaaaaggcgaagagacgctacggcaaagagatgatatttgacccatgccatttgagatcagatcgtaactccaccactccaccgggctaaggtcgcacaaaaaatatgacatacttttcagcaaagcatttcactgcagattgatagtattaattaatgcagataacaggttcagtagttctgaccacatcagttctttttttcctggatagaacttaaccatttaaccaactaaacgtgcacatgaacccccatcggactccaaaatacttacaaccagcacgacatataaaagcagagcatacgtagatacggagtaaggatctaagcaccaagacatcagaggccttgatgccttctactcaaaagcccactggttctccctgcggatctcctcttcctcctcaggggtgaagtcgttcttgatgttgaaggtcttgcggatctcctcaggagtcttccccttgatcatgtcagcaacagtctggcaagtaaggtccagcaaccccttgatgttgaggtagttcgcggcctgtgggatttgagaatcaaataaacatggtataagaagcagtaatcactatggctaaagcacagatcaacattcagccacaaaaggaatacatagttcaactttggaatataaaagaaagcataaatgtagaaatgagaacactatgaactgaaacaaattactttagcacatgattgtgtagcaaatccaaattaaaatgcagaaatactagaaatgggtacatgacaccgtgggatgagaaacaaacaacaaagttagaaataacagatatatgtaaaaacttcaagaaaaaaggcgagtgtgtagcaaatccaaattgaaatgcagaaatactagaaataggtacgtgacaccgtgggatgagaaacaaacaacaaagttagatccgcaatagtggagtacacaaataaaacagtgcatgtgaacaaatacggcattttacaaaaaagaaaaaaaaaaggaccctccatagaaagaagttggtatacaaacacttgagcaacaagttaaaacatgatacattttgttttgcaataatttaacatgcactgataccccataacccgtctcattgtaaaattgcagtgttgttaatagtccaccaccatcaagcaacttaatttagatagtaaattcttgtgacaatcaaagaaaaaaatgagactgccatcatttctcttagatcaagagaagtgttaacaattcatgaaaaaagagcagaaagaataaatgaacaaaataacagaactgtttacaattcatgaacaagagcagagagaatttatgaccccaaactgtagtatgcaatgaattgatcaagagaagaacgaatttgtgatcacaaactgtagtatgcaatgaatttattactggatatcaaagaaatatcacagtgaagatacagagacacaattactcaatgcctgaaacatcataaattagagatacagaacaagtactaaatcccttaagataatgcttcaccattttagcaatacagtagtcaatcatacataaaagatgcatcacaagactacatcaatgtaagatcattatctgtaacagccctaatttccttatgaacataatcataaggaggctgcatcaatgtaaggacataacaaaagcaattgacttatgaacaggaaagaaaaacattacaatcagaagggagagaatttattacaacatagaactacaaacatatatcatgcttgatatatgaatctcaaattcttaccaacacgaaaggaaataatgtataacaacaaacagaagggaacaaatttaaagcttgacctaatctaccaaattggcaagcatgcatctaaacaatcaatttcatactatatcatgcttgttatatagagaagcacaaaatccttatgaacagggaaggaattgtgtaacagttaacaacaaaacagaaggggacgagtttattacaacatggcactagaaacatatttcatacttcaaatatatacaatcgcaaaactgcatagctctttatgtatttctttaactaaatgttgtatttaataaaaacccatggtagcaatacatcaaccgatcataccaaaaaatctgcagaatatcaattaccacatctacgcagtcctgatttacataattaccagtatgaaacaaacaaatagcagggcacatttatccaatcatatggatacaatcatcgaccatacagatgaggatacagaatcataccgttaccccatctgcacaaagtacacttgttttccctaatgatattcacgcaaccatgatttccacaactgacatgaatgaatgcgtgatgcatggaaaccacatccaacccagtaacaaacataccggatgaaatacatcccaaaaagcttggaacagaatgcacctcgagctattgaccaagaaaacaaatccagatctagcaataaccgcagatctgaatccccatcaagaaaaggtaggggcgcgatgggggagggagaggggggggcttttataccaggatgaggtcgaagagggtggcctggtcgaccttgacgaagtcggcgtcccagttcttgaggtcctcgccggagggcggcggcacggctgcggcggcggacgcggcgtcgtcggcggccttggaggccgcggcggccgcggcgtgcacgtgcttgttgcagtactcgatgaccttggagaggatcttggagttgacgttggggagcgggatgccgttgtcggcgcagtcgtcctcgatcatgtggcggatcgtctgcgactccatcgccaccgcctcctccacctcgaactcctccccgtcggagctcttcagggtgatcatcttcttctctccctcagccgccatcgatcgagccctccgaaatcgctcgcggtctcggtcgtcgccgaggaggtgaatcgcacgaaaccctagctttcgcagcggcggcgatggggattgcggcgagattgggggttggattgggggtgggtggggaggtgggggatattattatataggagaaatgggagggcgagggctgcgtggggacacgtggagggcggaggagccgtcggatgcggaggtgtggacggccacgattgggtgtgatggtccgggccgcacgctgggtggggccggccgagcccatagaatccgttgccgaataaaagaagaagaagggaaataataccactctatttgtacttggaataggaataatagactccgtttgatattgtgctttttttttgtacgttttactagggttgggcaaatattccccttttttttaacctctatataggctggagatgggtggaattattgcatgaaaattataccggtaaaattgtgttacggaaatatgggacaatagggccagaaatggtaagtaatagaatttgttttcatattgtttattaattgagtaaataatgaaaattattataattacatattattctctttagtgataataaaatatttgatatttagaataggttagggcgaacttttaaggcttatgttatcaataacttctcaaagtgcatagttcttaaaaaaaatggtataagcatattatattaaaaaatattaaataacattaaaaattattagatgtaatatgaattgatggccaaatttcaaaactttgatgatatcttcgtaccatcaaatatttatgaccatagagagtacaacttaaaagattaagggtttgttcagtttgatgctagaattaacctttcaacaccaaaatttggtaggattgaagtgtgtgggttttacttggtttgctaccaatgccaaatattcttatatattgttatgtgcaaaagtttctagaaaatcaccaattttttaggatggtaagatatggtagattatttggatgtcttcagagtatatagcttagtggatgctacgtaacataaataataagtacttttatagcatagtacttgcaattagaggggaaatttcaaatccatcatccatatagacaattatggtttgttaagatagccaaatctgcattaaataagtgggggaaaagaattattacctgctgcgaagttcagaacaggcttctcttctcccttcatataggtctccttgatcattcattaggcatcgattaaatcacgtactgcgctgttgggctagggcagagaaatgacaggaaatatgctaggttggcgccaatacttcacgcctagcgacgatgcggagagcacagagaagtgcatcctcattgtggaaatagggaatgaggtcatgtaaccggtggcaggaggagagcaaagaaatatgggttgtaggatacaacatgcccccaacggtagggttttatgtaaaaaatgcttagccagtagttttgtgataggtgtgcctatttactcttgagaataagaatatggggattgtgtcaatgaccaattagcacaattttgagtaggtcctctcccaaagatccattttttatgtgtgttaagctaaaacaatataatcacgatattattacaaaattttgctaacatgcttttatcatacaaattgttcatatgttcccgtgcgaggcaagaaaagaagatatggggtcgagcaccacttaaggctgcgttcgagagaaaaggttgggaacttctctttcatacacggaaaatgaggtggctcattagcacatgattaactaagttttaacttaaataaacttgaaaccggattaatataagttttcaaaaacaatttcacttaagtttttattttgcaaaaaagttgcattgttcagtagttcggaaaacgtgctacggaaaatgagatattagaagatggaaacttgtagttccgaacgcaaaccttaggcaatgtctggcattgcattttggtaactaatcctccaagcaaaacagaaggactcattagcacaagtttaattaactaaacaaacttgaaaatagattaatatgattttttaaagcaactttcctaatttttttaatagtttagcaatttgaaaaatgtgcacacgaaaaacgaggaaacataagttaggaaaaggagtatagcacgcaagtatatgacatgtttaaggaaattcagtcatttaaaactcaatatcaaattacatttttaaaaaactcaagaatgaatagttatgttttggttggttcggtccggtctttagtcataaccgaaatgtgtggtagtaaaattgtagcaacttttctctctgcagaacatatatgttgacaattaaatagcacatataacacatcaactcatcaagagcatcaatcatagtaatctagtatacttaaacaattgatccccactaactgtaatcaataccaattctttgttctctggtgtaatcaatagtaccaattttttgttctatggtgcagccacatcatcttactttatgctaaccgttggatctaacttgtgtgtctagattagctcctaatcaccaagtagcaaccagccatatttgatcttctgttaatgttagaccaagcctagcccatctacacttctttacaccggccggttcctcttctattgtcatgcatgcatgcaaccattacaacagatgatcaattgatctcctgaaactgccttctttcctcttctgaaactgccttctttcccctatgtaatacttctggtcattaagtgatcttcagagattgcagttactttttctatctcttagactataaaaatagttagactattgcataaacttctcacttcaaaccacatattgccctccgctttcccttcaatgttagtacatgtgttctttgtctgacttttatattatatatgcatcaattcgatcacacgataccattgatttggtgagttagtctcagattttaaagatgttctgtttttctccccatttgagattgctcgtgggtgtttttctttggcaaattggttgcttgattttattttgtgcggttactcattttgcttaagtgcaacacactctatcaagtaggtttacattttggtacgaacatttgggtctgtcccatgcaattcattttaattttgaatttactatatttttcaaccattcttacatgtttacaacggtcaacgatattattatggtagtttgccttttaccgcattaatggctaatgcactaaactttgacagggaattttttgtttaatctgtaatgatgtggatatgaaaaggatatatgaaaggacaagaatcagctagccctaacgaagaacatgggttatatagatcacagatttgttatccacaatcaattttgtttctttggtacggagtatgttttttcatttagtgtacaatattgagtgttgtggagcataattaatatttttccatatgttcatcctatagtgccgcagcaacacacatggcttttgactagatttaacttacaacttaacaccgatcaagatacataattaggtctatttcctaatgtcaattaatcgagagtgctaaccgaattataaccaaattaatttcggttggttgaagagcctaacaaaaatttctgtctatgagcaagttttatagaagaggcaaatgccacccctaattttatccatgtaagttaagttgtaactcctactctctcttttcttctcccctccaccttaccatattagtttagatagcatattacttgctctaataagagcatctccaacaaaattggctatttttgtggaagagggtattaacctgtaggctgtaggagtcggtgtggattgggcgacgatggcagggctcttgatgacggtggaaaccggagagacgacggtagcatcgagcgcttgatccggggccaacaactttcagtctggggatggcggcggccacaacagtggacgatggcgcggcgatggacaaggggcgtagcagatagacgccggtggcggcgcgcaatagggtcatgcgttggatctaggaagggggcgatggccgtgcgctcaatcgcacactagatctgggaagggggtggtggcctcgtgctcgatctaggagcgcagggagggtgctcgatctgggatggaaagacaatacatacaggaaaggagaaaggggaaaatgtgtggggcccatgcgtggtaagacaactttgtcattttggttggccaactttagctaacgcatagaggactttggccagtcggatggttttcatccggttggcaagtttgttggattaggattttgattcaaaaatatcaaaatttaatttgaagaatgagatagccactctgttggcttcaagttttaacctttatttttttcacaccgcggccacaccgcgtccgcaatgcctccatttcttcctccaactcaaataacccaataatacatatagtccccagcccagcctgctccatccgaaggcccaaccccgctcgcgccagatccccccaaacccaatcgatccccatcgatcaccgcgctccccccggcgccgccgcggcgagaggtagggtttgctcgacgacgcgagggggagcgaccaccgcccgcgacccgataggagggatggcggcggccgagggcgagaagaagatgaccagttttatcgcgaagagctccggcgccgaggagttcgaggcgggggccatccgccgcgcgatcgaggacgactgcgacgacgacgacagcggcatcctgccccccgacgtcctctccggcgagggcctcgataaccgcgacgccggcttcccggtaaagcctccccccccttccccctccccattcgtgcccttctcctcgaatccgaagggattcggattccctttcccatcccaaattcgtgcctcccttctcgaagggattcacagatcttgctggaatagttgcagtcaggtttacgtaatagctcgaggtgcattctcttcgcagcgcagggatgactagaaagagggtgggggttcggttgagttctgtggaaaccaagaccaatttcagggaactgatataactggatttttccccccattttggatgaaactatgctaattgaattcttcgactgaaagatgccctgttggggggaacactatattgagatggtttacatgtgtcatggattcttgctagttctgaaaattgcagttcaatattctttgtattaaaagaaggtgaaagaagaagcatagaatgggaggatcagctttgaagaactgaccagaaaagagtcaacaaccagaaaaggaaagggagaaaaattaagaacgctgctatacatacgacgctagcgttagactgatgtccgactccgttacggcatcacctgcgcatgtcagattctatcacggagtgagacatttgccgtctgagcctttcattgtggccatggtcgtacacagtagccggacaacaaggtcatacgtatatcattttcaaaaaaggaaaccaggctaaatctcgtgacagtgattactgataagacaacctaagaaacttaatcaagggattacaacatcctgaaacaccactcaggatagatagatttaagagtttagccccatgggcgatttacatgcataatgctagaaaagagtgatctaattctatggattgttgcaatgcattatcatttctgtatctacattttgaagaatatttgctacctacacgttattgttatctcatcacaagtcacatatgcaatactcctgcttgtgtagtgttaggagtaggttaccaaatgcataaaaaacgttattaacaagtgagctgtgcattttaagttcatatcaaagtatcaaacatttatgcctgtttgtatccctgctttgagctatgcatgcttttcaatggtttaattttgtttttgatgaatcttataatgccctgtttatttgattctgaaatctcacagccttcacaaagaagcgcctccaagatcacgggagatcgcgcggcggtgaacccggcagccgctgatccaccaatgcccgttccagggttgcaccatcatcctaacatccccgctgcaaaccgccagctccctcctgccgctagactactgatcaactgtggcatcttcctcgtcgccactgccgggtcctccatagttttccacactgctggagacccttccgccatcgacggtcctgcatatgcccttgttgcattcttcttcgtcctcctcggcttgtggtttgtgctgcttggacccgtcgccggccagttccctggagccacgagggtcgccgttgccattgcgaaagcgctcaagggttacctgctcggcggcggcaattgatcaaatatttgattcattctttatataggtatagctttgctagctcacagtagttttctgtttgtttgtatgtcgtgtctataggcgttgtagcccataaactcactgtaaagtgtgaagtgtatatacgtgttcttgtaaggccctgtttctttcagcttaggattattataatctagattattgagttagattactataagctagattgctataatctatagtagaataagcggttagttgtttctttcctagcttattagagcctagattattgggtttttaagtctaaatagggagtggggtggcatggtggataatttttcacccaataatctggaaaaagcttacctaaatgagcttatcagattataataagctgggctctagattataataagctacttcaataagttgtttgtttctttcagcctactctcaataatctagattataataatcctaagttgaaagaaatagggcctaattacatctgtacatgtctgctctgttcaatccgacgttttgataaatattagcttttctgtttctcttttaatgttcggtttcaattatggatacacacagttatttaaaattggtaaagatcgctttaacgtacatgtgtctcgaaagggtaagagtgataactgattatgtcaagaaaaaagttgaaaagagagatgatgctaccaatggtttctctccaaagggtaatactgattatgacagtaacttgatccatctgtagattgcatcaagagctcaggcctgaccttcaattcaatttgtgattggacaatttgaaagggggatcttcggttttaaatcatgaaattctcacaattgttggttcctggttgatttgtgatgtagggcaagaggactaggaatgatggtgttagtccttctcacaagtttattgcaatcataaggaaagttattttcccctcaaaacaaaaaggaaataattttgatttgattggaagaagtataagcccaaaagaagataacccaataagttctttacagcaacacaatatatattcttttttaaaaaattatcgagtctgttgaaattagattaggactggagttttcgtgtgaaatctatcgagtgaggaaaaaagaggaccggtatcgccagtgtgccaccattgatttcaatggatcttaccaggcctaatctaattccaagaatttctttgatttcgatcgccagtcaatagaatataggagtagtaggaatgatcatagtcttgcaagcacaactgttttacccatatcttcacactagtaaaccattgctttaaaatccgaaccactccgctccacacagtaaaataaactatgaaaccaaaagctaacaaactcagcatttttaattctcatctgctacttcttataatatcaagttctcaagttcaccacataggaccaatattattatgaatctactccctccatctttaaatacaattgttttttacaatttaaatttgtccaaagctaccttttaccatctcaaccaatcacaaccatgtaccacttcactatacttgttttcttaatctccatatatacctctaaagatagctatactttgggatggagaaaatagggaaatgtctcctagatcatatatctactaattctttagaggaaaatttgcaaaactcaccccataaaattacttgaagttttacgttcccccacataaatcatttgttgcaaaaacctccctaatatacacatatttaaccgaatcaatttgttttcataaattgtgagcagttaacgtgatcttaatcaaagctaaggctgtgttcggcactacactttcctaaattctactccctcattatccatgcacacgctttccgaactaataaatgatacatttttttaccaaaaaaaatcgtataagaaagttgcttttcaagttttcattaaatcactttttaagttttcaagctaatacttaattaatcatatgctaatctaccactccgtttatgagctggggaaagtttcctaccccaagagaaaacaacctaaatacttttaggtactgtttggctaatgggataaggaaatgatttcccactcaccaaaagacatctttaaatcataaccattcattctctctcttccatttaatcctaacccttcatttattttctaatcccaatctcccctttatttcccattatctaaacacacccttaggagtataatcttgactttatttttttttgagattccataaataaaattgttgatgagagattaaacaatgtcgcacttatttttgctatgtacggtaaaaaaatcgatgaaatataaagaataaatcaaatacaagtacctcgataagattgactcagctagcttagtctgggggtacctctacagtagcaataatagctgatttggttaagccagtgcgcactgggtggttgttacatcaaaactaagtggagtggtgggcatttgaaaaataaataaattacaggatggaatgccaaactgatggtctttataactttccatcattgaaaattttgaaccgtgtgttcaaaccaagtagagtggtgggtatttataacaaagtaagggtgtgtttagttcacgccaaaattagaagtttggttgaaattggaacgatgtgatgaaaaagttagaagtttatatgtgtagaaaagttttgatgtgatataaaagttggaagtttgaagaaaaagtttgtaactaaacaaggcataaattacatggtggaatgtaaaactgatggtttttatagctttttccatccttcaaaaagtttgtgccgtgtgtttggatttctcccacaagggctctcgtgtcaaaatgtgccgtgccagtgtgtgggggcagggggtaggcaggccacacccacaccaccgagtagagcgagtgtacagccaccacgcgtgtccacccctcgcacgagagtctctccaccactcgtcgccgactcgtgcgagcgagagagaagccgctgactgcaccgcaccgcaccgcaccgcacgcaccccaaacgctatccaactcttatccccttcgatcccccctcaaccacggcatggcggccctccgcccccgcgccgccgccgcctccgccgcagtcgcccgcccggtcgccgtacgccgaggcggcgtctcctcctcatcccgctggaagctgcaggtcccccccccccacctcccgcctctctacgttctcggttcctctcttgcccgtgatgtgtaaatccactaggggggatgcgtggagtctcgtggttcctgccttcattgatcgttggtgttcatggcggatgatgattatgatgatgatgacgtggtattttatatttaggggcggtgctttgcataccggagtgattgatttgagatgaggtgtagcaaacgacctcctgcgctgcaattcttcccactcttgtttttggaagttaggagctttggttacgacgtacctgtactgcctaaatgagaggttttacttctcaagtaggctgtttcaaactggattcgagctctttacttaaactgagatgtgtgaaaggagataaatttctaatgtctgtttctattaagttttagtgtttccttgttactgctcaatagtagtcttagtttttatagctttagagtgtatgtttatgtgaagtaaaacttatactttagtttctcttttttttttatttgtcagttgtcgtctttcttctatcagtatcctatccactgcaccgtcaaaattgttttccagacaagatatttcaaaaattcactagtccacagccacaacatgcatctttgattcttaccgaatttagtctgatttattcatgccctctgcattagtttaatctagttgttgcatcattgatttgtgcgtgtgtttcgcctagaatattgtcataacaattgctgccctatcaactttgcaacacagggaagtatgttgaattggaaatctaaatgcagtaccagaagtccacggactacagttgctggtgcaaagcctgatgactctgaatttgaaagtgtcaatgcaccactcgagccccaaacgtgggaaggaagcttcttgtgtggtttgttgaagaaccagccacaagtactcccagttgctgcggcaaagcaacttcaagaactatctaatcaaagaaaggacaccttgatccgctgggaacatagcatcggttctcctgaggactgccttcacaggttagttacaaatgccctttgtcaaaagtgtttagtggtctcaggaggtcgacatgctgctatccttattttttccccattcaagttctctgttatatttcaagcgtaaattgtattaattaattattaaacagacaacgttgcacttttgtgatagaataaaaaacagcattcacttagaatggcattttattttgttgtgctgatgaagaacaaccaattaggtgatacctcttcagtccataagctacctgttatttggacatatatgttggattagaaaatttctcaactaattacagaaataaaatataggttgggttaatgaaatcatgtgaatattgtagattgcaagtgaggcttgaaattataaaagctagcttcaatggttaaatgatgggagacaacctggagctctaacgtcatttctagtctttttaatatgaatcatataggagcgtcacttataatatactagtaaatctacatggaagaatatggagggtcaggtctttctttaatccattctagttgatactgcatcgatatttttgagtcacaagcttcattgttaaaaacttaaaatttaccaaatcatttcatgtagctagcataattgtcactgcaggtgatctatattcggcactaaaaagtctatattgtttgctccttttatctttatattgtatttgcatctgaatattaattgatttgttgggacttctacaaataggaggattgctgaaatgaaggagcatgagtgccagactgctattgaggatatcatgtacactttgattgtttataaatttttcaagattgaagttccattggttccaaatctatcaaagcttatcagcaataaaagactacaaatatggccaccaagggaggcagaactagaatcaattcatggacctgaggtgctaggtttaattagggaacacttgaccagtattatcagatgggtacatagaaatggtcccaagatcaatcgctcaacacttagaatcaaaagaatgcaatttagtcggatttattctgcttcaataatgtacggatactttctgaaatctgtcactacaaggcatcgtttggagctgattcttgctcagtcacaagaattttgcccaccaattcagtttctgaatgcacaatttaatagcacccagaaacaagaacaggaagagtccattggaggttctgcagaaatatcatcttcctcaaaaccgagttctgttgttgatctgcatgacttgaagagttacatgatgggctttgatccaaagaccttggagttatgcgcaaggctgcgctcatgcgaagcttctaatctcattgagaagcacagttgggcactgttcagagaaagcatgaaagatttcctagagcctgatgaggcagtgatactcgatccgtcatccctaaagagattgttgcttgaagccattgcatttggttcctttctttgggatgttgaggattatgttgacgagatttacaagttgcatgatagctgaaaaaagtacatgcaggaaactcctgatgccttgtaaatattcttgaatcttgtatatatgattagatatttagcttcttatgcatgtaaatcttcctgtcaaaattttgctatttctagcatcccagattgccagggtgctgaatgactgccgtaatttgctactcctataaaggttttggtacgatttctggagccaggtacacctcgtacttgtaatttgtgtttttttctccaggaattcctaactgccgctattcattttttacatacggagtatagtttgcagtcttttacataagtactactgtaaaactgaagcttaactcgatgtaatcgtttgaaagcttgaaacatttaatactactaccatgttgtgactctcagagcacctgataacttcagtagtgtttggattggacccagaaaatatggaactgactgaactcatgcccagaattacaccaagcagcatcactgctggcaattggacaattttctcatttgtgaccacatgagcgacagagactcgtgatggcgtatgagagaaggatgctctgctgctcccctggtaaccactgattagcaaatggatggtccagatctgagccaccatgaaccccaccacccctatggttcaatcattcaacaaaattgcacaaaaccaagaatctcaaatgagtttccaaacatgttcagagctccccaaagtccaaattaatgtgtcaaatgagcttcacaataaagaaagaaagaaatcgaccatgaatttttccaaacatgttcagaactccccaagatccaaaaccaatggtaaatctgaacttatttaggctgcgttcgtttctccaacaagagttggatgaaattttggatactcatggcacgttttttaaattgctaaatggtgcgtttcgtgggaaaattatatatatataaaaattgctctaaaatattagattaatatatttttcaagtttgtaataattaaaacttaattaatcacacgttattatcacctcgttttgcgtaaaacacttaatctttatctttatctacagagattcaaacaccaccttaggtgatgttcttttctcctgaagatgaagattaagttttttacgcaaaacgatgtggtattaacgtatgattgattgaattttaattatcacaaactttaaaaatagattaatataatattttagagcaacttttaatataaagctttcgtatgaaacgcaccatttaatagtttttaaaaatatgtcacaaaaatcttaattttcatccaattgaagaaaagaacgggacctggtaaacctgggccactctccttcgatatttgctcctccattgaacagctccagaaaggacacaatggcaggtgcctacaactggctgtctggcactgcattgaatgcacctcctcactcactctcacacacacacacacacaagagaggctctgcctctgcctcctcctccatcaaggaaggagtacatcacaggatacagatccagactccagagccccatagagagagaaaattcagctactcctagatgagaccctgagtgagagaagaagcaaagaaacaacaacaagaagaaagagagatctccctcttccatcaacaatgccaccaccatcaatcaccaccaccaccaccaagctgttcttgctcctcctcctcctccatggaggccactgcctgaagagcttggacatggccatggagatggagatggattcagaggctcacagcaggatgctgtgggagtccagcagcagcaacggcaggaggtacatcagctacgacgccctgaggagcgacgtggtgccgtgctcgaggcagggtgtcccttactataactgcaggatcatgaccaccgccaacccttacacccggggatgcgagaccatcaccaggtgcagggatgtggatccgtgattactactgcactgcctgcttgttttgctggatgatcttgccatgagaggaattgcaggagtggctacctgagatgcaaatcttggtttttattttttttttgtttttcttttaccctctcttctgttctttcttcttctttatgttctgcatttgctgaatcattgtaggtgattcatggatgatttacatgttcaaagatcttatgagtatgtatatgtaagatctggttgcaagctataatattataaggaagcttggatcaggggaggtgtgctgctttgtgcttgaaattgtcggcattgataagatttgatgccatcaattgacatggaaattgctccttttcttcgtttgtacaattgtactggtatgttaaagttggtatacgcaattgagcacgttgaatcttttcggatgctcatcgtttcttcaattttttttaatagctagtcgtgtgatgaaacctggttcgttcttgtttaataaagatattgctttgcagtgttttcaggggaaaaagactcaaatttcaccaattcattattcatggtgtgattcctcctcttttttcttggtgaggaaatcatcagtttgtgtatcaacttccgaacatactgaattgtacagaagagaagggtataagtctgaataaattcagaaagcactcttaatagattatgactggcactgttgcttcataaattcacacatctacttgagtgtctcagtaacaaaacaatgagcattactccgaagtgctactatgttagatattgtaactacagacaagagatatcacatgaatttggatttttttttcgagggagattctttaaagaacagagattttggtgagttaaaaaaaaaaagaagaagaccacatgctgacctgtagtcagccaccaatccttaatgcagagatcacatggatgcaccgacacaatcacacaaatgtcatctacccacatttctcccaccggcctgcgctgcactccccaaatagtgccctactgccctgacaagaaattgactgttgcacagtgtgtttgtatcgcaggtcaatgacgttggcatcgccatggctaaagtgatccacatagatagacccacgtaaagagattttaactatagcaatctccacaatgtatataaatacaaggtagcattaggccatcagcaatgggcacctcctcaacccgtgtctctcctcacggccgtccgcctcccgtcgctttttgaggctgatctgttccctagcaggggagcgcggcgcctcgcaggggacgcggctccctccgcgccttgcctactttttcgtggggggtctgagccaggcactgcattgaagcgtggggagctcgtggacatggcgccctaccccgatatttccccttgtaccctcgccctcatccacagccggcggccggcgacctcctcgtcctcatctgccgccgctgtcgccaccggtggctcgccgttgaccacctcgatgggagagagggagagggatagggagaggcaaatgacggcagtgagagggagagaagaagaccagatctggccacatctcgctgttgaccaccgcatcggcatgccagatccgcgcgtggctccccgtcggtgacaggcagaggaagaggggtggcggcgcggcacacagcctccagcgatgaccccacgacgagagagagagagagagagagagatggatccggtggtggagtaggcggccctcctcgtcgccctcgccgattaagctccggcggtagcggcggcctttctaatctccctcgcactccggccacatctggcgaggaagagtggatggcgagcggcggcggcgggagagagaggagagagaggcgagcagcggcgggggagagaggagggaggtggtggtggcggcgagatgggcgacgacgaagcgaaaagaagcgagaagagagggcggaagaaaagagaaggaaaaggagagtaggctggcaggaaggggtatttggggatttttcatctagggatactttgggccaagacacccattgtgggctatagtatcctcaccgggttgcttcagattttgaggagcccatccaggggtatctcccagtgtgagctgagttcccctacgagtgttcatagttagtgacactctaggagtggctcacattgtggatgctcttaggagatgagagagaaatagagatagatagtattatttatttatgggtagtccatatgcttaatggatatcttttgttgttttctctatatggactagttacataatgttaataggtagctgaataaaatataatattatctatggactatatttgcatcacattgtggatgcctaactgtcgaaggtttcgctggatttttgtttcccagttcatatgaaagttgaaccaattttcatgaaaactgttggaagaagttaggagtattgttcttttcagctatttcactggattaattttgtggattatcgtattgcttagttctcttgttttaagctatttgttaagtatattcatcaaaatatttaatttatacatataatcatctagataatcaactgcaataaaaccggtcttggctggagatgtaaatgagcaacatgaattagaattacaagaacatttcaatggggtaaaatattttttatgtgaatatctgtaaaatcaaaggtgtttttttggttattattctatgatgaacaattgggcattggagattattggttttgttatttggaatttattcacgaagtggtttttggaaatatttagattcacaggtgatcgcaggatttattatttcatgtgaccggtcagaccgggctgtgcatgccggtcagaccggcggtggtcgagcggtcggaccggccagctcacggtctgaccgaccgacgctgtgtcggtttcggtttcgggttgtttgtttggatatccgtgattatttcatgattatggcttctagatggatactatacgtatgtaatactgttgtttgctaactcgatgcctcgggagagtatttgcggtgatggaccgggagtcggcttggggataagacgacgtctgtggtggtcagagatcatgcgagatacttaggctagagttaatgcacgtggttgatggagattccatatggcatacgatggaggtattgtgtgcgtatgagatgcggagtcgaatttggaaggactccaaatttggtacgattggttatgtaaagtttttttcttgtactagagggtttcctaaggtgtttaggactcttagtatgagtttggttcgtgggctttaggctgcctacctcgggtatatatagagagggagtgtgaggcttcccggtatcgctttagagagcaattgagttgagttttgagttatggtttcgagtttagtcgaaatttttgtaaggagtgctgttggtgcactttgtaaacacagagagaatcaataaagtcgtcatctactttaagagttcttcgatttgtgtttcatcgggtttcggcggtctaaccggcgatctaccggcggtcagaccggcggcatacgggcggtcagaccggtggcagcgacaggggcggcaggcttctcggcggttcgaccgatcgatctacatcggtcagaccgacgttcatcaggcggtcagaccggcgcaataccttcggtcagaccgcaatccatcaacttcgaggataacttttatttccgctaaaagttttcggtttttgggtataccaaccattcacccccctctggttggcttagttcttgtgattcgatcctacaatatcatcactatatggccataaatttgtgattagtaataaaattacttcaggttcaaccgttcaatggtagcagaagtgactaaacaagtttgttaaagagtcgcaaaactgtcgcctgtcggacactggcgcggcatgagctggggagccgtctacacgctttgaaggattttcaaagagaaatggaaatgaagtgacagtaatatttgtttaggatgtgtttggaactacatgttttcaacttctattttcttattttacacgtacacgtttcccgaccgtttaattgagtgtattttttaaaaatattctataggcaagttgctttaaaaatcgtatttataaaatttctcaagcttttatagctaatacttaaataatcatgtactaatgagtcatcacgttttacgtgtgcaggagagaaattcccaaccttctctctagaaagcacccttaatccttctcccaatagtctcgaccaatgaagatctaatctcaaagaaaacaacatgaattctacgtggttatttgaaagtacagtgtacccctacaaaagatgacacaagcaggttcgacatcgctagaatatctattatgttgtgatgagaaagcaagtttgattgcctatgtgagtgctcagattctaatcttggtaggtatctggtatatttggtgggagaaaattggttcatggtgagaaggtgcaagaaccaacgagggcggcaatggctattggtgtactcccctaaactattgaaaagccaacccgaggaatataggcattgctagatcgggatggtgtcaaccataagagggaatggttaaattgaatgtagatgccattgccaggagatgttctttgggatgataaagtagagtacatagcattggcaaatgatcgcatggagtattactgcggagattcatgccttgaggaatggaattttactagctagaggtcaacaagttgatcgaatcatcactaagttagattgtatcgaagtcatcacaatgatgcaaaatggagggttctcgacgacagcagctgcggcgatctataatgaatgtgtggttctttctgaagcttctacattggtaactcttgtttactgtcctagagaggctaatttagtttctcacgagcttgctagagcagcctggcttaatccaccatctatttggttggaggagccagtagcttcaattaagcggttagtgagcgatgtaactgctctttgatctaataaagttatgagagttttccttttctaaaaaaggacggcacgtaaggtaaaaaggttacgtgaaaagcacatcaatgttgttgtggttgcagcagcggtgccacacgctcctcacagcatgtgtgggcaccgccaggccagaccgtcctgtacagctagtgtaatggctttctccctttcccttccatggcgagacctaacgccgcacagagatccctacacaattaaacgctagtagccgccaacgcgcgacgcgtaccgtcacgttgcaatctacagcagtcggcgtattggcaatgcgctgcacgacagtggcacatccatgtacccaactctgaaaaattccagcatttctttttttcgtagcttcgcacagtttgatagtttagcaatcccacagaaaacacaaggtaggcagaaatcaaacggattgattattggcaaatacttgacattccatgattccaaaaggcacagctcctagaaattagaaacaagaggaggaaaaaaaccgatgggggatgaggttggcaaccaaaccagaggcagcagcagggtgggggagagagcgttttatgaaacctatcatctcgatgggcagacaaaatccgtaacacagggccagcttgtgccgaggaagaagatgacgacgacggcggtccacgagagcacagctggtcgacgattagcggcggtaggaccatggtttgtgtgtgtttttgttttcctactccttgtacttcatgctgtcgagggtgaagccgggcatgtcgaaggaggtggcgaacttctcgacctccagcttgaggttctcgatgtccttgttgttcaccaggcccttggagaagtccttgaggagcttgccgtgctccttctggatgttgaggcagatggtcacggcctggtggaggaactcgccgatctgctcaaagtccttctcgacaagacccctggatgtcatcgcaggagtacctgaaaaccagccagaatccgtctgagatacttgcttgtgcaaagaaaggtccagtagtagcacttgtgttcgatataactatcatctatggacagaggctctgtagtgaaacatggagcgaagcaattcgcatcagattaattcatgattttgcagagttgtgttttgtaaccatgaatcaattccatagcaatcagcaagatccggactataagatgttactacattagcatgataatattttctgtgaaggggaatgcactcaccaatgcggacaccgccaggagccaatgcactgctgtcaccaaagacagcattcttgttaagtgtaatgctgcaaaggtcacacatcttctcaaccttgttgcctacatgagtaaaccaacattaggacaagtttaatagcactaattaaaaattaacagcaattatactgaagaatgcaaaaacagtctgcataccagtcaagccaagagggcgaagatcccagagaacaaggtggttctcagttccatcagtcaccattttgtagcccttgctcataagatacttgccaatggcgacagcgttggccttgacctgctttgcgtaggccttgaatccaggtgtcatggtttgctgcagagcaacagcaagggctgcaatctggtggttgtgaggaccaccttgcagtgacgggaacactgcgaagttgatcttgtcctcgtagtcatagacagcaccctcaggctggcccttcttgggaggcttagggcccttcctgtagaagatcatgccagctcttggtcctcggagggacttgtgcgtggtggtggtaaccacatcacagtactcaaaaggatttgcagcttcctaaataaatgaaacaagcatattttagagactataggactaaaattaacattaatacatcatcatacagttcagacatgccagacaccaaagaaaaacaacctgaatgaacagtatatcttatgattttgccctttatatcccagcatcggtgcacgtaataagaaattgaggaatatgtcaaacatgtattcttatggctaacaggaatatccactcagataattctttagagatctgttaccactcagcaaaaaagctattgtttcataacaatgtttataaatatataagatgaagcaaaacacaacttgtcacaaatgaatatattgtgccctataacacccaaaacaaacaaattagatgggcgagcgcaaaatagcaaattgattgaagacaactaggattccattgtgtatccactatcagagtgctcggcaagttgcatgaccgaacacaggaaaacaaatcctctaccacagactaccagatctatcatatttaaagaattgcactaaagcacactgaaagactcaaattttgtatcgaattgctaataaacaaaacaagctagaagacaaagagacatacatccttccaagatttgcctattccaaacaaccccaacacccctcacccaatttaggtccttatagatatatgtgtataaagctaaagttaccacatagtttaatcacatacaaccaccaaacccaactaacccagtccttccatccgaaaatagggcaaagatatgtccagattcatagtattagaatgtttctcggccgatactagattgctatatttcgggaccaaggtgtagatccaatcaaccaaaccccccagatcgggcatccaattcactctaaaacccaactcgggattactcaccatccagatccccaaatccaacctttacagcagacagcaacgaagcaaatgccggcggacagaattttaccccatttcatttttcatttctgaaatgcaacaactaatcgagacgagttgggggtgggaggattggactggataggatttttatacctgcgcggcgacgaggccgctgatgtgcgccatgtcgcagaggagcagcgccccgaccttgtcggcgacggccctgagcttggcgtagtcccagtccctcgggtacgcgctgccgccgcagatgatgagcttggggcggaagtcgagcgccttctcctccagcttctcgtagtcgatgtaccccgtggcggcgctcaccttgtaggggaggctctcgaagtagatcgacgtcgcggagatcttcttcccgcccgcggtgtagtagccatgggtgaggtggccaccggaggggaggtcgagccccatgatgcggtcgtgcgggttgaggagcgccgtgtaggcggcgaagttggccggcgagcccgagtagggctgcacgttgacgccccacgacgcggcgtcgaggcggaacgcggcgagggcgcggtcgcggcacaggttctcgatctcgtcgatgacgtcgttcccgccgtagtagcgcgccccgggcatcccctcggagtacttgttggtgagcgcggagccgagggcctccatgacggcgaaggaggtgaagttctccgaggcgatgagctcgatgccgctccgctgccgccgcttctcccgctcgaggaggtcgtggacgagcgggtcggccgcggcgagcggggtcagcccccacgacgcgacggagtccatggcggcggcggcggcggctgcgggtgatgctgcggcgaggcggcggtggttgcggcggcgaggcgggaggagaggggagtggtgggaaggggtggaaagcaggggatatatancgnagnaggaaaggagggcgcgcgtgcacatggatgtgggttgtggggtgggaggttggtggtggtgggtgcgggtgaggtgttcgacggaatgcgtatgcggctcgctcggtcggggttggtacgggtgcgggtgcgagccagacgatgtttgggtcggggataaggaggcgtggagattcgtgcggagatctctgcatcggctgaggtgtccgccgtcagcagtggtattcgtatccaacgtttaaccgtccgtcttatttaaaaaatttatagaaatttttttttaaaaaatagttacacataaagtgctattaatattttattatctaataataaaaaatactaatcataaaaaaatttcaagaaagacgaacggtcaaatgttagacataaacggtataaaactacatttactttatggagggagtacattttgaggcgtttttttttcttcttttaatttgtgtgtgtgtgtgtgtgtgtggtggctagcggagcaaacaacgctacacaggagttggagcaatgtatagggcatatgaaaagaatgtagtaatgttgttttctaaagaaaagaaatgtaatgtatgtgcaagtgtacgtctcttttgaacttggcatgttagcatgtggattttcttcttttttttttcgaggacatgaaatcacgtggttcttactctaaaatatactcactctgtttcacgatgtaagtcatgctagcatttctcacattcatatagttgttaataattctagatttattaacaactatatgatttatgtctaaatttattaacaactatatgaatatagaaaatgatagaatgacttacattgtgaaacggaggaagtagttgatatgaaagcgagggtgaaaaaggtttgcataactttctctctacgtatattgaggataactttcatttacccctctctcattaagcttttcaagagctgaactatttgttagtcattttaaatgatgtgaatctgtctcatgatagagatgtctgggaatacatttggggtaatttgaagtattcttctcagaaatcctatgctttgaactttaattagagctatgcagccaccttcttattttctctgattatggtagtgcaaggcaatttcgaaagttaaagtctttgggtggttgctattgatgaatagactaaatacaaaatatatgttgggtcataagcattgtgctcctcctgactgtgatctaagttatgtgctctttccagttaattctatggaagacttgatccatctcttttttcaatgctcgtttacacagaattgttggaatgttcttggtatttattgggatacttcaatgagcatggaaagtatgtcgcgccatgcaaattaatccctttatcagggacagtgcttcatggacaaatttttatatggtacttggaatatttggaaataaaggaatggttttatttttgagcaaaaaattccttccttgaattcttggacgcaactcttaaagggtgacatcctccttctgctgtttagaattaaggagagagataaggatgtaatcttgaattggatcaatttttttgtaattttcttttttatttatttttaatcaaatctttctaccagcgggggcctcccgtgttgtgctcctttcaaaaaaaaaacagagattgtttcagcaattgagcatatacaagcaaaaatacctagtactacctctgtcccaactagctacacacggatacagatggatcaacaattttaagatatggaagtacaaatatgatagcccaatagagacaaccgtgtagatacattatctttcaagataacgaagcaagggggtagagtctcgtggtactagctatcggtctcaatgtttcgaagattgtttaaggcagatgtgcattctttaaattttttttataaaaataatatgtgacaggtttataatgagcgatatagaccatcaataattatgtatatcatggttttctaagattatatactttttcatagagaataaaaaaaagtatgaataactaacttaacgtgtgtagatgtgtaaaactagactaaagccagccatgccaatgctactatacattagttgttttttttaacctatggacagtcagccatcgaggtaggcacgagcatgagccacagtgtcacgagccatggagaggtaataggtgtgagagtatatatcaagggtagagctaaagtgtaattattaacgggtctaatgacccagtgaacttctataaactttatggtaaatcatttagtcacggttaagaaaacaagattgactctatggtacaacgtatacaacacaagtgaccctggtgattttttccccaagatccaactttggttggtatggtgtacaaatattaaggtgcatgggagcggcaacggataaggtagatctagaagatgacgaactcacgcatacttgttggcggtaccctttattgatatccggccttcaacaaattcaatatctacatcacatctagaccacattatggtttaccctcaccttcaccccctgtgttttgtcgtaccatgcaagctcatatttagatgtgctagattgtatgctatgttactttgaaactcacgattataaaaatagaggtatacgtatgggaaaagagcaatgcactagaatttagcacacatgaatttgaaagatggatcatagaaaagtgaactggaacattagtggattatatacagatgtgagagataaagacagaagatgcatattggacttctcaaaggaaaaataaaataaggtttgagctcacatgtaaatttcctttggaattgagatataggattgtaatccaaaagaatttttcaaactacagcaagttaggaagaaaattcacaaggacgaatcctcctttgatatattcctatagactcatttgttgatcctcagtgagctttgagcaatggtctcaacgtgaatatatagaagtaccagtgtaccactaaaaatgctgcattcagttcacctaaaaaaaaagctgcattcagtgtgtgctatgtgtgctagcggctgctctgagctgcataccaatttcatggaacattttgaaatggtaacgactcacaaaagtcctctctttatatatttaacccctaaatcattttagctcgatgattagacaaaagcttggaggttcaattagtggcctccttgttctgcctttttcctttcctatctatattaagagactttgttaatgaccccttctctaatcaaaattagcggactgtttccagcttaaactacaaaaaaatgtggacttcttttaacacctaacagaagcacttggtatatatctttctcccttgtgatggttgttgaggttggtgagcgaaaaggacccttcataattggcacggtaagtagagcctgtagaggttgttcgtgtggtcaccgtgtcatgctaccaagatcattggatccaagttgcttcttagtttttgttgatatcaatattagtctctgtccgtgaagacatatccatgcaaggaactgatttgtgtgacatgtaaaaaactaatttcgaatcctaatacaagataagcccccgagctgcataagggagagttcgcagacgaagaaaatgaagacccaattctgtttgctaaaaccctaaacctaatcgtccgatcgacttgaaccgagaagaggtttgtgtagctatctcatgcctggtgaagactcgaaggctatcgacatcaagctaaaagcagacaattagatcttgatagggccggtgtcctatttcccttatgacacaaccaaaagaaaaactataagagaaataagaagaaagaagagaggaagaaccgcaaatagaatatatcaaacagacggcgaagacgtgtcctaggagttgattatttgaagattatgcacgaagcttatattttttctttctgttctatgccgctaaaaagaaagataatacctatatgctaatgagtttgtttctccatcctcaccaagataataagtggcaaatagcaatctggtagcccctaatgaattagtgtaggtagcaaattgcagattgcatatgctatgatagatttaattttatggcaataatacataccaaaccattatccgccacccaaaacgaatctaaccccggtcaaggtttacaaaatgacatatatattatcaagataaaagaacacatgacattatgttttttctatcatgcataaggaaacctatatatctaaggctccattcggtagtacaggttcccaactcctcctcctcgttttccacgcgcacgcttttcaaactactaaacggtgctttttttgcaaaaagtttctatacgaaagtcgcttaaaaaaatcatattaatctattttaaaaaaaataaactaaaatttaattagtcacgtactaaaacgctgcttcgttttgtgtgccggggagtgagccctcactcccaaacagagcctaagtatagttaatgctaattctctctcctctcatgaagccacatcgcatcaattgctttaagcctttggagattcatcaagggtgtaaattgcatctcttcatatcacctcaattgtgtttaaccttttgacgatttatcaagggtataaattacatctattcccccaaaaggcacaccatacaacccaatcatttataaactatagataattaataaaggtacaaaaatatatataaacacataaaaaaaatcgtatagtaggtaagaaaaaaaatagaactcatatatattattatcacacaattctcccttagcaacacgcggggtacccatcttgtattatttaagcgcagtaagtcaatagcggttgtaacagtagttgctaagtgctgtagcttccactaagtttgaatacactatttttgttcccctactgctaaccttggtcaacaggtcctaaaatggttattaatcagcttaggttgagtttttatcagcatgacttcctcgtttatcacgagcatgttcttaactgttaaacgacatattttgtgaaaaaaaattatttaaaagtattttaaaatattaaataaatctattttccaacatatagttaatacttaattattcacgcccaaataatccgtcccattttatgtacaattaaaaagttgaaggtaacatttgttttgaacacaaccttactctgagtttcaattagctttataaactttttcaaaaaaaaactttttatatgaaatttattttttaaatttgtaatagataatattcaatcaatcatatgctaatagttttcttattttacgtgtcattaaaaagctcaaacgttgagcctattcgaataaggttgcattctgacacttggtttttgaaagtcgaaatggggtgattagtgtcaatgtttgatgtcgcgattccagtatttgcatagtatggggatcattggtaccaggatatatgcgagattgtagtaaaagagacggggacgaggaattttatacaggttcggacccctgaattgtcaggtaatagccctaaatcctgttggccgaagccggtattgatcttattcaccataatcacacctgtacaatatttggggtagcctatctaactgttgtcgatatggcggtctgaagctctgactcgtagtcgacaacagggtagtcttcctccttgagttcgtgtccggcgagatcagagacaatgctagatccttacggccggcctctgtaggtattgaatagggtcgatccaggcatatctttgatgtcgatatccggcagctcgtcttggcgtatgttggcttgtattggcttctggctttgtggcgtctatgttgattgtccgtctcccctctcctcctatagggccttgtatttatacccataggtgtccccttgtccaagtagaactagggaaaccaatatggatacaatccgagtagtccttgtcgttttcatgtagaactctattcatccttccttatgcggaactcctcctatatccgaaggttgtatccgtataagacatggtatgtggtgggtcctgctgagatttagtcaactactattaggtatgtggtatccataaccctgacaattagtgtgattaattcggtattaactaacataaactttaaggtggtagcactgtggcagggagcaggagctagagccaaagaggaaacctctatgccatgagttaggacatctacaccttcccaccaccgtctcgccctcctgcccacggccatcttcatcatcgcaggctcatctgtgcgcttagatctgactcgactgcttgacctcaacgggcagccacatccaatgcctcccttcatgcggacaagtgggcgagatcgacctcgacagggctcgccgggtgccactgccacaaccccttcccgcagagctcgaactcaatggggtggtgccagcatgtgcgtggtactcaagctcgagcaaggcgtgttccaaatctgctaccgcctaggcttcggtggaatggtggatgcggtagctcaaggttgagttcgatggggctcactgaccaccgttgtcatgttccctccatcacgccacactggagccaggagtcaccatcaactcgctgtgcactaccggtacctcgacccaatggtagatgtggtgtagaggcaagggtggttgtcatcctgctaccctcattgcactatagtccatccatgctgctgcctattgctgccaccatcgctcagcggctagtattagcagtcatcgagctcaacatcctcgtcactatggagaatagggggggagggctagctagccaggggaggaaagggtgaagagggaggggagagagaaaagaggaagagaacggatgacatgtgggccctatgctgggactaacatgtgggctccacatattttttattttttattgaaatcgataatgcatgtgggtcccatttattttatttttacttttttgttgattgtgacttcacataagtgccacgttagccgttacataggataaatactgtgtcaacgtgccacatcatcgaaaacgaccgttaatactgccgagggagttattttgcacatgttttaatagttggaggagtagttgtgtggtttggagatatagggataagattcgagctatagttgagggagtcaagttggctatagttgagggagtcaagttggactttttcctatctctggtatagttcaacttccacctgaaatgaaggctcaaattagagctgaaagccacattctttgctggcctatgggccgcactctcagcactcgtggatcttagcccatcatacccttggagatgcacttaaaaatccacgggaatttattattggaaatcatctccaaccaagaaaggtagtgtgaagaccatatgcaagtttcagtttggcaaaaaaatgacagcgaagtgttggaatatccgggcacctttcactgtcccaactcggtaggcgtactgcatattcctgtggttggtgaagaacagatccaaggcagcgtatatatataaaaatttcttcacaaaaagaaaagattcagtgatctgactgaaccaaccaaccaaatgagagagacatgctttgccagtagaaaggaaaagaggagaaaaactgagccgtcagagcagaatccaccaaccccccatggtgtgcatgcctgaactaatggcgacttaatttggtggtagctcagctagctgcaaccaggttgactgatctgcagatcttgccaaccaatactatacttgatggcaactaatttctactaattagtaaagtgagagtgagtgagttagtgagaggagcaaggaaagatggacgatggatggcaagggaaaatggaagaatatatataatatcattgccgacgacatgctttctacgcgtgatctcatcgatcgatcggtcggtcagtcggtgggccgagcaaaatgatcgagttgatgtgtgcctgcctgcctccgcctccatgtggtcggtggttaatttgggatcagaaatgctatggtgtaaattaaatactccctccgtttcgttttatttgacaccgttaactttttagcacatgttttaccgttcgtcttattcaaaaacttttgtgaaatatgtaaaattatatgtatgcataaaagtatatttaacaatgaatcaaatgttaggaaaagaattaataattatttgaaatttttaataagacgagcagtcaaacatgtactaaaaagttaacggtatcaaataaaacgaaacgaagggagtatgtctatatttccatctcatcgaatcgatcaggttacattccattgacttgaatgaagtttgcttttctacccgattgaacagcaatttgataggtgctggccgttcctgacgttttggagcctggactgtattgatacacacatgagttcactttccattgctactataaccaattcttcacttactgattagcatattcttcatgtaggtttcgggctctatctcttttgattttgtgtgcaagagtgctttagagatcggcaagatttatttccaacaaactaggtttcacgcgttaatgactcacaaacaaagagaacaacgaaactctacctaatttaaatgttatatgaaattataacaagctgtctattcaaatgatttgatcgtattacaaataaacatcggctttcttatctccaattttcctctaagtcaatttgattatcaatcattacccgtatttgacactggcacactgccaacagctatctatctataatgtactctttccatcctaatattctaggattttagctgaatgagatatctgttctctagatttatattattagaatatggcattgttcttttgtccaataaaagttggattaaattttggatactcgtggcacgtttttcaaactgctaaacactacgtttcgtgcgaaaactttctatatgaaagttgttctaaaatattatattaatctattttttaaatctggaataattaaaactcaattaatcacacgttattacaacctcgttttgcgtgaaacactttgggtgtgtttgaggagaaggggattgaggagattgggaagatacgcaaaacgaggtgagccattagctcatgattaattaagtattaactattttaaatttcaaaaatggattaatatgatttttaaagcaactttcctatagaaattttttataaaaaatacaccgtttagtagtttaaaaagcgtgcgcgtggaaaacgagactcaatcccccctatctccccagaactaacagagccttaatcttcattagacattcaaacaccacctatatatctcattcaaacataatctcttctgttttgataggcccgcttttaggccaataacttggcctagcccaagcccaccagacccaagcctaggtctaggcttcctagctacaaaccatcttatcattagtaaaaccttctacctccgtccaaaatataaaatataagaagttttaaagttgaacacggttaataaaaaaaatagatataatcaaatggtgaaaagttgttattggttaagaagtaaatttatgtgagaaaaaagtaaatagtggagagttgcgattggttagaaagagaatgttaccgaagaagttatattttaggatggatgaagaattaattattctaccttttcatcccaaactaaattcctatacttaattagctcttgctagtccagagcaaaacgatttatcctcctgacaaagtgtagctaaaacaaaaatgcccatgtttggcacgccctaatcaacgagttaacatgtgatagtgctagtgctagcttagcctttaaaagatgatgggggccccactctcactgtcccagttgaatcggtaggtgtacactctcgtgtggttggtgaagaaatatgctttgtatctttgcgaggccaaacaatatatctgcatttttaatgtgagaccaaattaagtggactagcctctattttttttcttaagattataatttagaagtggacaagtaccggggagtttggctgcatgcaccaaccatgaaccgacggcgacgttgcccccacgactccataaaaagagaaagggaaagatgggcagccaccggcgggtgggcgcttctccaccaccaaccccacaaattatcgtggaaattatccgtgaaatcggactcaatggcttaagaaaaaaaattatgacggacgatgagcctggtgtacgtgtggtgtggatcgtgtgatcctacgtgcgccgtcggcgtcaatcaatggcggctaggctccgtcccataaaaaaacaatctaatacggtatgtgacaaatcttagtactgattagaagatttatggtattaaaatgtgttgcatcttttattggatttgtttttttatgggatggagagaatagttgagcagccttatatatacgtgccgtgcaatatttgttttctgtcaaaaacaaacttgtgcaatgtttcatatagacataagatacgggataaagtagagaagatattactatctttgtcctaaaatattataatctagaatgaaatttgattcatcctagggttttgttttaggagcttaagattctgagaaacaactggttagaagctaattggtgagaatttggagaagctgagtttagcttctgacttctaactaattttctaagattttacaactgcagcttcataggaattgtatgaaaatctatattgtttgaaggagtttctagcagctaaagattctagaaaaaactgtagttatcagaaactcccctaagcaaatcctataatggacataaatgacaatgtttatgtaccatacacatctccatgtttttttacggatcttagttgacatggcgacagctgcgtcgattcccgtaaacttatttagtcaaaacattccattaagatcttaatcccggagtaagtgctaagcaaggctatgcttgtttggtctttacacacttcaaagaaagatgttctctctttcttaattcctttgctcctactgccactaccttttactacgataccattcgcacctcaacaattttgcacatagtttaagtttatcgataactaataaaccatgtgagctgatcaaataagcaagatcatcatgacggtatcttcgatgaagtagtgtataaataataattgaaccccccaagtatgtagtgctatactccctctgtactcataaagtaagtcgtttaggacagcgacacggtctccaaaacacaactttaacttattgtaagctataattcagtacgtgctccattattatgtggtttaattagtgttttggtttagtggtaggtgtttgatttggcaacgatgcgttaacacgagttacatgcagctgattaatgattaattgttgtttggggtgcagtggtcgtatgtcactttctggacattgagttttttctacaggcttggtgtaggaaaagaacaattaattaataatactagtggaaacagctcggagaaatctgctgccattgcacctaaactgcaagtggaactttggtgtggtgacactgaatttcgtgcggtttggtcactgtcaccaaaagtttggtattcatgcttggactcctggttggcataaaggtctgtcttggacaaaaatatagttcagacacctcttgtttccttgaaaataccccctccttccctaaatgattaacaccgttgacttttttaaacatgtttgaccgtttgtcttattcaaaaacttctgtgaaatatgtaaaactatatatatacataaaagtatatttaacaatgaatcaaataatagaaaaagaattaataattacttaaattttttgaataagacgaatggtcaaacatgtttaaaaaagtcaacggtgtcaaatatttagggatggagggagtagtataacaacacttgtcccaaaatgtttatcagtattatactccctccatattcgtaaagtaagtcgttttggacagggacacagtctccaaaacacaattttgacttcttatttctataaaaaatatctatttaaaaatgatatatgtatacttttatgaaagtatttttgaagacaaatctattcatataatttttacattttcaaactcaacaacttaagagttatttatgatttatattttcaaggttagacttaacattgacctaaatgactttcgtcaatgactttctttacgagtacagagggagtatttcattttgataccctcaacaaatggttcgctttttctttaatggaattacaattgaattcacataaccttcacataccaagcacataaacataaaaacatgcagtaatgcacaactacgccaactgaccaacagccaccagagcatgtaatcgcaaaatctagcttcttgtcaaaaatggcttgggtaccatgtcttttcttgttttttttttaaacaccgtctttgtacacatataaagatagaagatgattggtgagctcacaaaatagcatgttgtcttttccccgacacatttgggtgcttaggaaatgaaaacataccggctacatattataactataataattaagtgctataacatttacaggagagtggctggtcttataagtatgatattatgcgagactatgtgccaagtagactaaagctacaatcaacgacgacatcccttcttaatacacaataggatgaatataatggtgaaaaaactactacaataaatactacattactcgcacacaactaggttctcgagattgctctcctctctggattgatgtgttcgtttggccattcctaacccaagacactaaatataatttccaaaaacttcacatcaccaagaaactagtactaagacacaacttttccaatgcaaacatcattattctatacttaaatttaatgctacttatttcacatgatgtcttggatgttgtgtagaaattctctttcctcatttattcatttgctatatcattttttattctagatggcaatttatttaatactatggataccatcttagtcattgggttgggaatggcctaagatcactcaccatgtcattaagcaagctctctagggctccgcgtcccctgtctcagcaaatttcactaaatttaaaagacttttttgagtaaaattcaactcaaacatatctgagtggcaagtgcgtgggtccgccatgatctacaccaacaagctccccggtttggatcgtgtgtgcatgacggtgcagccgccgacgcggcgcgccgacgcgatctgaaacccatccccctctctctctctctgtgtgtccgaaggagatatttttcgcatcgaatggagcagcgacaagtcatgtgaaacagtgactgtccaaaccagcacgcgtggattcttcagatctcgatgtcctcctcctcagatgggccatgatgggccggcccccgcaaccaacggcccggatcacctcttccccccacccccatcacaaaaccccaaacccatcaccaacttcccaatctcacccaccccaccaatccccaccagatccaacggcccagatctccccctcacccagatccaacgcctccccttcgtcttctccctccataaaaccccacctcacccccaccctcccactccgcctcctcctcctcctccctcctctctacccacccaccctctcgccgtcgcagatccgatccaggaagagctcgccgccgccgctgccatggcgctctccgtggagaagacctcgtcggggagggagtacaaggtgaaggacctctcccaggcggacttcggccgcctcgagatcgagctcgccgaggtcgagatgccggggctcatggcgtgccgcgccgagttcggcccctcccagccgttcaagggcgcccggatctccgggtccctccacatgaccatccagaccgccgtcctcatcgagaccctcaccgcccttggcgccgaggtccgctggtgctcctgcaacatcttctccacgcaggaccacgccgccgccgccatcgccagggactccgccgccgtgttcgcctggaagggggagaccctcgaggagtactggtggtgcaccgagcgctgcctcgactggggcgtcggcggcggccccgacctcatcgtcgacgacggcggcgacgccacgctgctcatccacgagggcgtcaaggccgaggaggagttcgagaagtcaggcaaggtccccgacccggagtccaccgacaacgccgagttcaagatcgtgctcaccatcatccgcgacggcctcaagtccgaccccagcaagtaccgcaagatgaaggagaggctcgtcggagtctccgaggagaccaccaccggtgtcaagaggctctaccagatgcaggagaccggcgccctcctcttccccgccatcaacgtcaacgactccgtcaccaagagcaaggtgaagcatcccctccctccctttctaatcccattatatttcagatctgaagctgtttgcgttagcctagcctgctgcttgtactgttcttaccttagtactacttgattttgccgttattatggatttgattatgctactactgtggatctggatctggtttatctgcttcggttgattcagtagatctggtgggctattacgcataaaaaaagtttatgctataggagtggtggttaggtggattatacatgtgtctttaacattttagattcctgatgtttgtggcatgttgaatatggatctgtcatctagatctccttttgtgacacaaactaaaaagacagggttaaaaaggtttagttgattttacctaagcaacactaacaattgggggaaatttgcacctgatgtagtgcgcgaattttgcttttcgtgatcgtttggttgcttgatttagacgggatgcttgtagttcctttatttagtgtctcctgtgttataggagtaggagcgtcgaatttaagtcttaggttactgcggttggatctaaatcttggtctaattgttgcgtagctgtcaaagatgtctagttttgttgttagcttgcatgttttgcggatctgatgacagaatatggaataaaatattggtaccaaactgcttgccatttgttttattttactcgttattgtgcacttgtgtagcttgattgtttaatggcattttactggactccttagtacacccttcatctgtagtgaaatattactgaatgctgggaattacaatctgttatattttgcaatgattttatcatttttgcttgagatatattaactctgtgtttcttctgaacagtttgacaacctgtatggttgccgccactctctccctgatggtctcatgagggctaccgatgttatgatcgctggcaaggttgccgtggtctgcggttatggtgatgttggcaagggctgtgctgctgctctcaagcaggctggtgcccgtgtcattgttactgagattgaccccatctgtgccctccaggcccttatggagggtctccaggtcctcaccttggaggatgttgtctcggaggctgacatctttgtgaccaccactggcaacaaggacatcataatggttgaccacatgaggaagatgaagaacaatgccatcgtttgcaacattggtcactttgacaatgagattgacatgctcggccttgagacctaccctggtgtcaagcgcatcaccatcaagcctcagaccgaccgctgggtcttccctgagaccaacactggcatcattgtccttgctgagggtcgtctcatgaaccttgggtgcgctactggccaccccagttttgtcatgtcctgctcattcactaaccaggtaaaatatgatgaccagtatctattgtctcactaaacatgctgagtatagctgtaagttacatgattgaatcaattctgtgcttgttgcaggtcattgctcagcttgagctgtggaaggagaagagcactggcaagtacgagaagaaggtgtacgttcttcccaagcacctcgacgagaaggtggccgccctccacttgggcaagcttggtgccaggctgaccaagctctccaagtcgcaggctgactacatcagcgttccagttgagggtccctacaagcccgcgcactaccggtactaggctgcccagcacgactagcggctgtggcatgagaagtgtcaacttgaagttcgccatgacgactctggagtatcctgctttgttttcatcatcttatatgccgtcacttaggaggatttgttgtggggtttatggtttgagactggtgaaggggaggaatgggaagccgtttgcttttgcccagaaataatggcgtaattgggtggagttggggaggtgtgctttggcagatacagttttgtcttgttgactctacttatctgatatcatttgcaagcgttttgataaaaatcatgcgtcatttatgaataatattcttgcctttaaagatagttttgctcgttgtgctggattgtatgcctgtttcgttggtttgttatgtgttgctagtctcatttgctcgtggtagagctggtgcttcacttcccattgggagtgtgttttgcatttgcttagtgtgctattatttggtactagtacattaaataagcttatcagaatcaggggtgcaagttcgatacttatgcgaattcgtattgtccggtataagaagatagaaactgaattcgtattcgactcaaatcctgtcaaagtaaattgaaacgataagagttttgatatttgacttaagaataatatccttattctttataattgagcatcctaatcaaattcgaaaaggcaattcaatctatatgcccgtttgatttttgggttaatttgatctgtgccattgatcaaattaacccttgatttttagacatggctctcctatctgccactttacctctctcgtcggtctctctcgagttctaagtgagtgtccatttttctcctactctctccgggcgtgcgtggtttcggctcttgttgtctttgttgagcttgactgtggaggctatcgttgtaaagtttgcgagaatgcttttcatcgggcgtccgggccgacgcaagaaatcggacggtagtaacggtgtctcttcacccgagacaacagaagtcctcgcgtgcatgcagggagctagtgcacgtaagcacacgtcaagtgcatgcatccatgcatattcaaatattcaaaatttaaatacatgtttctctacaatcatttatccaacctactatttaattataccattagattcgttataattaaatatttatataatgatcttacatggttatatcagatagcggctggcgcggtaggcggcgagcgggggcgaacgggcaatagcacgcgggggcggacgatgggcggcggcagcgggggtggacgggcggcggcccgtggctcgtggagagcagctcgtttgccgtcggcatgaacgcgcggcttgtctccggttacatggcgcagctcgtggacgatggcgacgactacaaggtcgttggccgtgaccaccagggtggtcggagtagacggcggcacacttagtggcacgcacggcagcagccaggcctccagccaccgcctccgccaccggtcaccctaccatcccgagccctacctccagctgcatccgccaccggccgccgcccccatccgagccccgtctccagcctcctccgccaccagccgccgcccccatcccgcgcgccatcccgacggcgaagaagaccggactgcggcgccgaacgcctacctgccgccgtctgcgccgctgcgccgtgcgtgctgccgtgcctgccgccgcccaccgccacccccatcctgacggtgaagaagaagaccggaccatcctctctgtgtcccgcgcctccattgctccctcccggaggagttcaacgtcgctgcctctgcgtcccgcgcggtcgccgcctccgtatcccgcgccatcgctgcttcctcctggactgcggtgcctaacgcctgcctcgccgaccacccacgcccactgcccgtccccacaccgccgtgcgcgctacgagagaggaatagctagagagaggaagagcgatagatagaagaagagaggggaagaggggtatgacatgtgggtcccatattttttaataaataaaatactaactggattgccacacgtatgctatgtaggacaaaatcgctctggattgggtcgagaggggtaatttgttcggtattaaaagttcagggtgaacgatgactggttttcgggtttagggggtaatggcaaggaagttgctagatatcccatgatcccaaggccacatgcttaggaacctatcagtctgtcacaccaatggcaccttttcatttttaaccctataaatatttctctttagatgtataggtttagagattgagttttccatactagtaactttttatatactttatctataataaaaaccacatatacatgaaacaccttggaagtttcaagtcttactattgaaattgtattctttactaattttctttaccattgtataaagtacactcaatctccagttttgtttagcatacaagttaaaccatctcagtttttttttttgcagtgaacacatattctaaactaaattattataaatttagtttaactaaaataaaataaaataaaataaacattagcaaatttacaaggtaattaactaaacatagcctaccattttcaccttaccaaaatgataaagtcgaattgcacataatagttatggctatcaggcatcctaccattgattattattgttgtaatgataaaacaaatcacaacaaaataaataacatttacatatttttttagtaaagcgaatggtcaaacatcatattcaactgtatcatctattaaaaatagatagagtatatttttttattacgaataatatgtgaagacattcggtatagaggaaggttaaagtcgtgcattcgcacgactatatacactagtcttctattgaatacattgttcttcgaggcacatcaggtagtggtcaagaaaaaagcttttggacatgatgttcaatcatccatcctattcagagttccacgaaaaatcaccttgtcctatggaaaaggtgagcctaatgaaatttgcatttagataaatccatgctcctattattatgagtgtaatatatggtcaatcattaaagttgaacgatggtgtcacttagaatccgcgaatttgcaaaatacacattcaggtctatattattggtttaatgtagcacaataggtccatttgtcgtttggccttgttagtttgttgatgcggctctccattttggcaccaaatttgtgttcgtcccctctgcagcatagcgtgacgcgaaaattgcatttaaccccttttcgctacagggataccccaaaagccaccaaattcctctcctccctcgccttctcccccaaacacgatgattcgtggtggaacgggaaatcatcaacaatgcagagtgcttcaggcggtggttcgagctgcaccataggtgacgtgtggtggggctctatcatcggcacggcgatgagcgatggacctcaacttcatggggaaggttaaccgatgcgtttgtatcatgagtactgcccacctatttcttgtactccagcattcatctagatgaattttagtaattaactttggttctttatgcaatgcaacatgatcttggttaagtagttggggtttgatctagggtttagtttgttgttgatttgtttggttttattttccatctgtttgccctggttcaaattatttctcaattgagtttcattacacaaatttctctgtggtatgtgagtaaatttgtcgattatatggagtactattggagtctaattttccttaggcgtgtatgttcaaaggtacttcctccgtttcatattataagactttctagcattgcccacattcatgtatatgttaatgaatctagacatatatgtgtgcctagatttattaacatctatataaatgtgggtaatgctagaaagtcttataacctgaggaggtagtatgatggaatttcgattctttttcaattgcacagttaacggtagcaatgatgttttatctttcttttttctctctttcatgtcagcaaatattctttattggttaattaatttactggatgatgtgtagcactgaaagaacacaacataacggtaattctaatgatcggtagtacagttttgttggtaactttttgtgacaagtcgacaagcacgatcacaacacctaaacgccttgcggtgatatggagtcgccaaccacctcgatctagccaaacggccaaatcaagatgggtttcgtagaaaaacagttaaaccggctagcggagccgatttagagatcaaaatcagcttctaggccgatttagatcgatatgaggataactacccgtctcgtgggcaaaacggaaggttttcaggacaaacctacagagaggcgtcgcactctcgcagcggcggcggacaatttacagcgcaaatcgacgaagatggactaaaactagggtaaaatagaaaacatggtaaaagaacgatttaagtagattgtattcggggttttacaatgaaccggccttatcccttaaataggggttggtcttgccttctccacatccaactcgggatagaaactaaagaaaacatgaaacatgccttcctgagtaaggaaactcgagacctgacgaaatcggactcggaccttgacggtctaaccgcccacatacctgcggtcagaccggccctactagccggtcagaccgcccacatacctgcggtctgaccggccctttgaaggaaacccgacactttctaaattttgataattttcccctattttgtccataggtgctaaatttgggtgtaaacactgttgatttgtttccgttgttatctcctgaacatcctcgaacaaacggggttaaacaacacttgtctctttccatttaatcatatatagttgcctaataatctgaggctttctaatttctgtttagatctcaagcggttttatctgcatgggtgtctcaccaaagaccaaacaatttcagatctgcatgtttatatgagatctctgtttatattggtgtgcaccagcttaatttggcccagataagaaagctgaaaccgaatccaacagggtctcttttaagttgtaaaaaaaatgaagaaaaacagggactcttttttgagttggactctacttggcccaacttactttgcatagataatttcctttctttcctaggggcctatagtttttgcctgaattggactctacttgggcccaatctatattctcttgtggcatagatcttgtttggcctataaatattccaagacctattgcttatccttccagattctctgccatagaaattagaggtgttaagctagggttttgggattgtcatcaagggaagttgccaccagcacaacatctgaaattattgaaggaactcccaacagaaattattggggaagagatctcttgatctattcagttggcaggaaggagttggatcatccgtgggggtgaagagagcagaaggatcaggccttgaattgtgaattcttggtggtgattgagcagaaggatcaggccaagaagtccaaacgagcagtgaaatcaaaatagatacaacaggagaggcgcacgtaagttttccatgtctcacatctgtggtttttctgtcttgttatttcaattgaagtcgattgcacaatcgctgcttttcccccctcctttctagatttgttcggtattttatatgcaccctttcagtttttctccaaggatcacgggagctttccgttttgaacagtccttccaaatcgatcttgatattgcattattagaactggcataccatgaatttttttttttggtgtggggaaggggggggggggtattatgtgaattttggatcatgagatgtgcagtaagatttatggtagcattcttctcctccaactccgatgagtcacgacggcttcggggaggctgcggcggcctcgaccaatagttcaaggttggtgtgaagggagggggatggccgtgagaagcaatcagaccggccatacggcggctcatgtcatggggtgaggagctaggggtgatggtggggcggggcacgtcgtatccacctggcttagggagtgggagaccgtttaggtgggccttgtcggcacagttggtgcctttcggtggtgacgaggttggggtcgttgtgcgagccagagaataggatggtgttagcgagctgcaggacggggaggggggggttgttcttgggcagatctcgctcctaaacataagggagggacaggggaagaggctggacctatcatataaataagacttcaaccatatgtacccgtatctattaatttaccttctctgtgttattttccatgcataaattttgatgcaattctactgtgtgaaaagtgattaagatcatgtttttttttgaaatgttctataagtagcaatgtggccgtgtgcactaattagatttaacaaactaataaactttccttgccaaaaaaaaagaagcaaatgtcccactactccactagcatatctcgttgatgcgtgtcacggctggtccatgaatgtgcgtgttgtcttatgtaccatgtcaaaaattcaataaaaaacactgcatgacaaaatcatattatgaaataggaaaaagtacgaattaccccctgaactattacggacgaccgaattacctctctaaacccgaaaatcagacatcgttcaccctgaactttcgataccagataaattacccccctcgacccaatccagaacagttttgtcttacgtggcgtacgcgtggcagtccagtcaggattttatttataaaaaaatctgggacccacctgtcatacttctcttccactcttcctctctcttctctctctctctctctcactcttccttactctctctcgcgagtcggcggctggcggtggacgcggaggtggcggtggcgaggtgaagcggaggcggcggcagcgtgggacgaggaggtggcgggagacgaggaggcggtggcgagtgatgcgggacgcggaggcggaggccgtggccacaatgagtagccgcctcctcggcgcggggat
